United States Patent Application Publication US 2006/0123505 A1 - sequence listing, part 16

SEQ ID NO: 25595 - DNA, 2763 bp, Oryza sativa
  ref <308>: DATABASE ACCESSION NUMBER: AK101037
  ref <309>: DATABASE ENTRY DATE: 2002-08-28
gtccctagccggcggcggcggctgcacgagcacgagcacaatccccgcgagctccaaaccctagcctagccgcacgcgcgcgcgcccgccgcgcgccacggtggccggcggcgctccgtccgccggtgctcgcgggctgggaggtgaggccgtgatttggggggtgttcctggcggcggcggcggcggcggcgtgggtggtgagggagcggaggcgcgactactgcatccccgactccggcaactgcagctgtggaagcttcaccgtggccggaaagtgtaagtcatggggagcaaacagatagtagctgttcttcaagtaggtggagaattcaaaactgatgatgatggacagatgtcctattctggtggagaggcgcacgcgatgcatgtgaaaagtgattggacttttaaaacattcaaacatgagatatcttcaacgctcaataacctcaaacttgactcctatgtgttcaagtacttccttccgaggaataacaagactttgatttcaatttccaatgacaaagacctaaaacgcatggttgaattccatgcagagtcagagacaacatatatttatgtcatgaagaaggctgacaacagggtaaaaacatctgccgtggtgcctgctgcttctgcagatcatgctgtagcagcaactactccagatggatctaagaggcaaaagatttgtgcaagttgggagaatgcgattactggagctggtcaagtgtttgaaggtccaaaggaattccgtgatgcactacacaagtatgccattgcacataggttccattacagatttgtcaagaatgactcttctcgtgtcactgtggaatgtaccgctgaaggatgtccatggcgtatacatgcatccaagtctcctgcaaagaaggatttcatgattaagaaagtttttggaagtcatacatgtgaatcagagtcagtcaaaagtcatcgtctagcgtctcaaaagtgggtggccagtgttattaaggaaaaattgcgtgatagtccaaactataggccaagagatattgctaatgatcttcagcgggaatatgggctaagcctgaattactcccaagcttggcgaggcaaatcaatagcccagaaagaactatacagttcacatgaagaggcatgcaaccagcttccttggttttgccaaaggattgtcgagacaaaccctggaagtgcggcaacagtagaggccttggaagattcaaaattccgcttctttgttgcatttcatgcctccattcaaggttttgtgcatggctgcagacctctcctctttcttgatgtgatatctgtgaaaccgaacaagcattggaagctgttggctgctacctcagttgatggtgaaggcgatatgttcccagttgcactctctgtagtggacgacgagagtcaagaaaattggcattggtttcttgaacagctaaaagcttcattgcctgtgtctggagaactaacattcatatcaaatggcaaatgtggtctgttggatgaggtctctcttatatttccagatagctatcatggctaccatgtcaactattttattgaagaatttaaggcacaattggatgacagttggagtgaagaactaaaagatacaatggttgagcatgttaagaaagccatgtattcatgcaaagttgatgaattcaaccagtgtattgaactcatcaaagttgaatctgataagcttgctgaatggcttttggagactaaacctgagaagtggtcagatgccttcttcaaggggtcgcgacttggccagtacacctgcaatgttcccgagacaattcttcagtgggtccccagtagatatgagctctcagtagtgcagttggttgatacaatcagatgcaacttgatggagatgatgtatacgcgcagggaatattcgaattcatggacggaaccgctaactccatcaaccaatcagaaaattcaggaagagatgggcaaagctcttacacacagtgttgtttgctcaacaggcaatgacggaaacaataatgtgtttgaggtatgcgatggcgctgtcaatgttgtcaacattgatacatgggactgcacctgcagaaagtggcatgtctctgggatcccatgctcacatgcaattgcggtgtttgagcgcactgatcataacccacttgacttctgtgccaagtatttcacaacagagtgctaccgcttgacctatgccatgtcaatcaatccaatacctgacattgttgtggctgctccatcaactgacccatcacaaggcgaggcattacatcaatcaccgattctaacccggaggcaggttggaagaccaaaggaaaagccagctgatcctcgaatcgcaatcaaaagggcggtgcgctgcagcaggtgtaagggttatgggcacaacaaggcaacctgcaaagtccctatcgcagcataaaacccttgccatatgttctcaagtgtaaattatgttgtgccttttgttgcccttttatgaactcgttctagtggaacctgtgcaatgccatcatgtatcttttatcagataacgtgtgaaacataatcttattcggtggttttagctccaagtatggtttgcctagcactagccggtacttttagattgaactttttgtggtgggcagaatctgggaaaaggattggagttttttgtacgttgttatccagcactcccttcctccatatggttgtaaattttgacatccgaagataagttattttatttctgttg

SEQ ID NO: 25596 - DNA, 1763 bp, Oryza sativa
  ref <308>: DATABASE ACCESSION NUMBER: AK101038
  ref <309>: DATABASE ENTRY DATE: 2002-08-28
gactccacacctcttgctgctgctgctgctgctcatggcgcctcctccgtctttgctcgccaccgcgcttctcctcctgctcctcgccatcgccggcgggccaaatgccgccgccgtcgccgaggccgtcaggtaccagaccctcgtcgccaccccgctctcgccgcacccgtacaccgccaccgccgtggaggatgacggtctgttccaggggagcctcgccgcggacgagggcggcgccgccgcgtcgacggtggggctacgcgtggtccaccgcgacgacttcgcggtgaacgccaccgcggccgagctgctcgcgcaccggttgcggcgggacaagaggagggcgtcgcggatctccgcggccgcggggggtgctgcggcggctaacgggacgcgtgtcggcggcggcggcggcgggagtgggttcgtggcgccggtggtgtccgggctggcgcaggggagcggggagtacttcaccaagatcggggtggggacgcccgtgacgccggcgctcatggtgctggacaccggcagcgacgtcgtgtggctccagtgcgcgccctgccgccggtgctacgaccagtccggccagatgttcgacccgcgcgcctcgcactcgtacggcgccgtcgactgcgccgcgccgctctgccgcaggctcgactccggcggctgcgacctgcgccgcaaggcctgcctctaccaggtcgcctacggcgacggctccgtcaccgccggggacttcgccacggagaccctcaccttcgccagcggggcccgcgtgccgcgcgtcgccctcggctgcggccacgacaacgagggtctcttcgtcgcggcggcggggctcctcgggctcggccgcggcagcctctccttcccctcccagatctcccgccgcttcgggcggagcttctcgtactgcctcgtggaccgcacctcctcgtcggccagcgccacctcccggtcctccaccgtcacgttcggctccggcgccgtggggccctcggccgccgcgtccttcaccccgatggtgaagaaccccaggatggagacgttctactacgtgcagctcatgggcatcagcgtcggcggcgcgcgcgtcccgggcgtggccgtgtccgacctccgcctggacccgtccacaggccgcgacggcgtcatcgtggactccggcacgtccgtcacccgcctggcccggccggcgtacgccgccctgcgcgacgcgttccgcgcggcggccgcgggcctccgcctctccccgggcgggttctccctgttcgacacgtgctacgacctgagcgggctcaaggtggtgaaggtgcccaccgtgtcgatgcacttcgccggcggcgccgaggccgcgctgccgccggagaactacctgatcccggtggactcgaggggcaccttctgcttcgcgttcgccggcaccgacggcggcgtctccatcatcgggaacatccagcagcagggcttccgcgtggtgttcgacggcgacggccagcgcctcggcttcgtgcccaagggatgctagctaattgcgccttaagcctgctgcttaatctaattaacgggggagtgagccttgtttagtcataattaagtacttaattaagggtttggtttgattaaggtggcgagtgagtgagggagggagagagctttggatgctgtaaagcgctgtgtgctttgaggataaggcggttgaaggctgtaaaacagttaaagtgatgggttataaaaatctccttgaccatgtc

SEQ ID NO: 25597 - DNA, 3685 bp, Oryza sativa
  ref <308>: DATABASE ACCESSION NUMBER: AK101039
  ref <309>: DATABASE ENTRY DATE: 2002-08-28
ggtagcagcggcgacagtagcagcagcaacgcctccgctcgctcgatcgatcgatcgatccatctcctcgtctagctccatatgcgagctggggtgcggcttaagcaactccagctcaaagtaatcttctcactagcaagcaagctctctctcatgtcgtgaggtgtagattaggggggagatttgttcttcttttttggtctggttttttttgtggtttcttgatcgttttggggggtaatggcgcaccggggcgaccggttcttggtggtggtggtggtggtggtggtgttgggggtggtggtgcggccggcggcggcgctgtccgcggacgggaaggcgctgctgtcgctgctgccggcggcggcgccgtcgccggtgctgccgtcgtgggaccccaccgccgcgacgccgtgctcgtggcagggggtgacgtgctcgccgcagagccgggtggtgtcgctgtcgctgccgaacaccttcctcaacctgtcgtcgctgccgccgcagctcgcgtcgctgtcgtcgctccagctgctcaacctctccacctgcaacatctccggcgccatcccgccggcgtacgcgtcgctcgccgcgctccgcgtgctggacctctcgtcgaacgcgctctacggcgacatcccggcgtcgctcggcgcgctgtcggggctccagtacctgctcctcaactccaaccgcctcaccggcgccatcccgcgctccctcgccagcctcgccgcgctccaggtgctctgcgtccaggacaacctcctcaacggcaccatcccagcgtcgctcggcgcgctcaccgcgctccagcagttccgcgtcggcggcaacccggggctgtcgggccccatcccggcctcccttggcgcgctctccaacctcaccgtcttcggcgccgccgccaccgcgctgtccggcgccatcccggaggagctcggcaacctcgccaacctccagacgctggcattgtacgacaccggcgtgtccggcccgatccccgccgcgctcggcggctgcgccgagctgcgcaacctgtacctccacatgaacaagctcaccggcccgatacctccggagctcgggcggctgcaaaagctcaccagcctgctgctctggggcaacgccctgtccgggaggatcccgccggagctctccaactgctcggcgctcgtcgtgctcgacctctccggcaaccggctcgccggcgaggtgcccggggcgctcggccgcctcgccgcgctcgagcagctgcacctgtcggacaaccagctcgcggggcgcatcccggcggagctgagcaactgcagcagcctcacggcgctccagctcgacaagaacggcctgaccggcgccatcccgccgcagctcggcgagctcagggcgctgcaggtgctgttcctctggggcaacgcgctctccggcgcgataccgccgtcgctcggcaactgcaccgagctgtacgcgctcgacctgtccaggaaccgcctcgccggcggcatccccgacgaggtgttcgcgctgcagaagctcagcaagctgctcctcctcgggaacgcgctctccgggaggctcccgccgagcgtcgccgactgctcgtcgctggtgcgcctccggctcggcgagaaccagctcgccggcgagatacccagggagatcggcaagctgccgaacctggtgttcctggacctctactccaacaagttcaccggcgcgctccccggcgagctcgccaacatcacggtgctcgagctgctcgacgtccacaacaacagcttcacgggtgccatcccgccgcagttcggcgagctcatgaacctggagcagcttgacctgagcatgaacaagctcaccggcgagataccggcgagcttcggcaacttcagctacctcaacaagctcatcctcagcggcaacatgctctccgggacattgcccaagtcgattcgcaacctgcagaagctgaccatgctggagctgagcaacaacagcttctccggtccgataccgccggagattggcgcgctctcgagcctgagcattagccttgacctcagctcgaacaggttcaccggcgagctgccggatgagatgtccagcttgacgcagctgcagtcgctcgacctctccagcaatggcttgtatggcagcatctcagtgttgagtgggctcaccagcttgacatctctcaacatttcgtacaacaatttctccggcgcgatcccggtgacaccgttcttcaagacattgtcatcgagctcctacatcaacaatcccaacctctgcgagtcctacgacgggcacacttgtgcatcagacatggttcgcaggacggcactgaagaccgtcaagaccgtgatccttgtctgtgctgttctgggctcaatcactctgttgcttgttgtggtctggatcctgatcaacagaagcagaacactcgcgggcaagaaggcgatgagcatgtcggttgcgggtggcgatgacttctcgcacccgtggacgttcacgccgttccagaagctgaacttctgcgtcgataacatcttggagtgcctgagagatgagaatgtgatcggcaaaggttgctcaggtgttgtgtacagagctgagatgccgaatggggagatcatcgccgtgaagaagctgtggaagacatcgaaggaggagccaatcgacgcgttcgctgctgagattcagatattggggcacatcaggcaccggaacatcgtcaagctgcttggttactgctcaaacaagtatgttaagctcttgctctacaactacatccccaatggcaatctgcaacagctcctgaaggataacaggagcctggactgggatacccggtacaagatcgccgtcggcgcagcacaagggctggcctatctgcaccatgattgcgtcccggcgatactccaccgcgatgtcaagtgcaataatatactgcttgatacgaagtatgaggcatacttggctgactttgggctggccaagctgatgaactcccccaactatcatcatgctatgtcacgcatcgccggttcttatggatacattgctccagagtatggctacaccacgaagatcaccgagaagagcgacgtgtacagctacggggtggtgctcctggagatcctgagcgggcggagcgcggtggagacggtggtgggcgactccctccacatcgtggagtgggcgaagaagaagatggggagctacgagccagcggtgaacatcctggacccgaagctgcgcggcatgccggaccagctggtccaggagatgctgcagacgctggggatcgccatcttctgcgtgaacccggcgcccgcggagcggcccaccatgaaggaggtggtggccttcctcaaggaggtgaagtgctctcccgaggagtgggggaagatctcccagcagccgctcatcaagcccgggagccagcaaggttgacatgaacatcaagaacatggaacatgaacattgctgctggtgtagcagttgattcagtggctcagcaaggggttcaaggagtaggattttgataagatgcagcctagcttagcttgggttaggggggtggaaaaaaaatttcttgtacagctccaaatggcgttgcgttgcagctcattttggtgaactttgaatggggaaaaattccgcggttattttgtttgct

SEQ ID NO: 25598 - DNA, 4034 bp, Oryza sativa
  ref <308>: DATABASE ACCESSION NUMBER: AK101040
  ref <309>: DATABASE ENTRY DATE: 2002-08-28
gattaacggcaccaatctttcccaccccccccccccccacccccacaaacctgaaaaacgccgtcgccggctcgccgccgggatggtgttcctccgcgcgccggacggcacgacgcgccacgtcgacctcgaccccaccaccgccacgctcgccgacctcacagcctccgcctccctcgtctctacctctcccaccgccgcctcctcccggccgtgccgtcccctctcctggcgtcccttcgggtctcgccctcctcctcgctgctcgtccacctccccctcctcggaggcggcgggatggcctccccgaccgcgaccaccccctcggcgcctccgccaccaccaccgccacccgcagcctgcgccgcgcgctacgacttcctcaactccaagccgccccccaactacgtggcgagactgggacgcggcgccgccgggttcaccacccgctcggatatcgggcccgccatggggcgcggccgtgggaagccgcctggggacgacggcgacggcgatggcggtggcgacgaggaggagaaggggtacgacgagaaccagaagttcgacgagttcgagggcaacgacgccggcctcttctccaacgccggccacgacgacgacgacgacgaccgcgaggcggacgcggtctgggagggcatcgaccggaggatggactcgcgccgcaaggactggcgagaggcgcggctgaagcaggagatcgagaggtaccgcgcgtccaaccctaaaatcaccgagcaattcgccgatctgaagcggaaattggtcgatttgtcagcgcaggagtgggagagcataccggagattggggattattcgcttcgtcgcaacaagaagaggcgatttgagagctttgtcccggtgcctgacaccctgctcgagaaggcccggcaggagcaggggcatgtcaccgcattggaccccaagagccgtgcagccgccgctggcgcagagacgccatgggcgcagactccggttactgatctgacagccgtcggcgaaggccgtggcaccgtgctttctttgaagctggacaggttatccgattcggtatccggtgttactattgttgatccaaggggttacctgactaacctgaagagtatgaagattactagtgatgctgaaatttctgacataaagaaggccaggttgttgctcaagtcagtgatacagacgaacccaaagcatccaccaggatggattgctgctgctaggcttgaagaggttgccggcaagcttcaggttgctcagcagctcatccagcgtggctgcgaggagtgccccacgaatgaggatgtttggctcaaggcatgccggttggccagcccagatgaggcaaaggccgtgattgccaggggtgtgaaggaaattcccaattctgtgaagctgtggttgcaggcagcgaagttggaaactagtgacttgaataagagcagggttttgagaaaagggttggaacacattcctgattcagtcaggctgtggaaatcagtagtagagcttgcaaatgaggaggatgcaaggctgttgcttcacagggctgtggagtgctgcccattccatttggaactgtggcttgcactagcgaggctggagacgtatgaccaagcaaagaaggtacttaacaaggcaaaagaaaagctccctaaggagcctgccatctggattatggctgcaaagctggaggaagctaatggaaacaccgagtcagtaaacgaggtgattgagagaagtataaaaactttacagggaaaaggattgggtattgacagggaggcatggctaaaggaagcagaagctgctgagcatgctggatctgtgatgacttgccaggctattgtgaagaacactattggcgttggtgttgatgatgaagacagaaaacgcacatgggttgctgatgctgaggaatgcaagaagcgtggttcagttgagacagcccctgccatctatgcacatgtgctcagtgtcttcaaattcaagaagagtatttggttgaaagcggctcagcttgagaagagacatgggactgaggagtctctttatattctcctcagtaaggctacaacatacaatcgacatgcagaagtgctatggcttatgtatgcaaaggagaaatggctggctggagatgtccctgctgcccaaaccattcttcaggaagcttacgcttatcttcccaattcagaggagatctggctagctgccttcaagcttgagtttgagaacaatgaaccagagagagcaagaattcttttgtcaaaggccagggaaagaggaggcactgagagggtctggatgaaatctgccattgttgaaagggagttagggaatgtagacgaggaaagaaagctgttggaggaaggtctgaagttattcccctcattcttcaaattgtggttaatgcttgggcaaatggaagaccggcttggtcatgtagccaaggcaaaggaggctaatgagaacgcactgaaacactgcccgaactaatctagaggagaagataaatggcttgaggaagtcacgtgctgttctcaccatggcaagaaagaagaacccagctacacctgaactctggcttgcagcagttcgagctgaattgaggcataggaacaagaaggaagctgatgctttactagccaaggcattgcaggagtgcccaacaagtggtatcttgtgggctgcagctatagagatggtgccacgtccccaacgtaaagcaaagagctcggatgctataaaacgatgtgaccatgatccccatgtcattgcagccgtggctaaacttttctggcatgataggaagtttgataaagctaggagttggttgaacagagctgttactcttgctccagacattggagatttttgggccttgtactacaaattcgaactacaacatggaaacgctgatacacataaggatgttgtacaacgatgtgttgcatcagaaccaaagcatggagagagatggcaagcaatagcgaaggctgttgagaactcacacctgtcgattgaggcccttctgaagaaagctgtggtggctcttggccaggatgaaaatccaaatgctgtagatccctagtctgtatcacttttaactttaaattaaggtcttcttctgcaggtcgataaagaaatatgtagagaaagaaatacaactagacagtgaactgggatgcactcaagcaactgcttctgctacgacctcgcattctctacccaccgaactgattgctgcagtcccccaaccgtgaagcttacctgaagaagcaccaggcatgccattgctccaatgtgattggctatctctagttaatggttagcaatattcttgaactaccatgaccatgtagacaatattcttgaactaccagcaccagaccaggagcatgaagcattacaagatcaactttcagggaaggatcattttcaaacagttttgtgtataaatgggacagtcccactgctgccttccttggcgtcggcagaagagctttgttctacatgtaagagcctacgttcgaaggaccttcagcttcatgttattacctccaatatgatgattgacgctttgctcaaaggaggcagataggaatatgccatggatatgtttagtccagaataatgtggtctacaatttatttaatgattattttcattggagcttctactgcttcccagctacctctttttctcaaagaggaaatatatgcagcatgtgcagtccctccctgagaaataccgttttcaagtatcacatgcagtatttgataatcgaaattctggtctgacaataagaccaaattgctacttcctccgtttcatattataagactttctagtattgcccacatttctttgtaggactcatctgaatccttagtttttataatcgaagtattgtttaaagtcaaagatgtcagaacatggatgtataaacctgatatttagatcagttatgtaatgtgatcatattcttgggagataacaagatcagtttttcagttgtt

SEQ ID NO: 25599 - DNA, 4372 bp, Oryza sativa
  ref <308>: DATABASE ACCESSION NUMBER: AK101041
  ref <309>: DATABASE ENTRY DATE: 2002-08-28
ggtatattgatcacactcaacaccatcccaatcaacgttgatgtttccccccaaaatttcaatcttcagaaaatctaggagaattgcaattgaggagaatatggtgttctttgtggagagcttgtaaaatggcaaatctctgagaggatgatacgacgcaaataacctgacaaaattcagtattcagagaactggggtcatggtgcaaacgcccatgtggccatgttgacaggctgtctagtcaccaggtactaaactcctgatggctgttatgccagcaggtggcaggatgcagaataaccagcattgtgaggtttcccaccacacattgcgccgccatagtatgctggcaatccttttgaaatttgcagctggtattatggttcaacaaccatcttgcattatcatccatacattggctctcaaggtgctttagttgatgaccaaagtgaacctgtgtatccattatccagtccgcagataagagctttgataggtcacagtgcagttcttgtccatattgggttgtttttcccccaattataaacattcagggcaatctgttgctgctgttggataccccacccaagacagtaggtggatgatcatgtaaacttgagcagaaatgttcagaacaacctctgctgttgctggatagctcccaaagattgaccatgaccaaatgaattggagggaactgttaggagatgtaaaattcataagatcaaaggcagaatcagtggccacatgttctccctactccctgttcattcttggacggttcttgtcagaacgaagaaggtgtgccctaaggttccttgaccacacatcattcaacactggaagcagcttctttctggcaccaaggagcattaattccattagataatatgttatacatacgatcatcttttgttaaagcgcctgaggacaattcagcagtatgtcctatatccttatccaatgaatttacctcagaacaccttgcaattagtgtaccataagtaatattgtcaggaataacacctgagcccaccatctcatcgaaaagcttggaagcttcttcactgttaccagatttagagtaagcatacataagagtagtgtaagtaagcttatttggagatatacccctggaacgcatctcctcaaagtatgcaacagcttcaaccatttttcctagtttgcagtaaccttgaatcataattgtgtaaccaattactcccaggtcaacattgttttccctggcttgtgaaaaaatggtcttggcctcttcaactagaccagcatgacacatccagtacataagactaccataagtcacattaattggttgtatgccattagacttcatagtctcaacagcatcaattgcaccagagatgtcaccattcctaccataaccaccaataagtgcattataaatgaacacattaggtttaagtccacgatccatcaattcagtcaaatattcttttgctttacgaatatcctttgctttacaatgaccatctattatagtgccatatgacactatatcaggctgaaggccctcagttttcatctgatccaacagatgaaaggtttcctccattttacccaaattgcaataagcatgcaataaagtattaaatgtgaaaagatcaggcttaaaccctcttctggtcatgtcgccatggagtttaatagcttcctccattttactgtctttgcagcaacctcgaatcataatgttatatgtgatgctatccaattcaattcccttatttaacatggtctgtataacttttgtagcttctttcatgtacttaccttcacaaagaccatgaattagcgcattggaagttgcaagattaacacctaaacctttgttcaatgtcttgaaccaaatcccaactgcttcttgatgtttccctcccttgcaaagctccctcatacaagctgtcatcagaggatcatttgggcgcatacctcgtgtaaccatttcatttgtaatgcttaccactgactccaatcttctggttctttgaagaagccatgcaaccactgtattgaacaaaccacaatgaactgtcattccaattgacaacatatcctccaatatcctctcagcccgctccatctccccttccttgcacagtgcctttgcaatcaagttataagtcacggctgttggcttcatcttctttaaaaccatttcatcaaacaacctgagtgcctgtgagcaatggcccttcctacaatgccaaccaataagctcattgtaaataacctcattgggggaaacccctaactgttccatctcctgcaatacaatgccaacctccccaaaccgctcgccccttgcaagaccattgatcaatataccgaatgtgaccacgcttggtgtcatccctccctgttccatcctccctttcaatcgaaaggcctcctccaccctcccactcttactcagtgcatccataagcacattgtacgtcacaaccgttggctgaagcccagcccgccataactctgcaagcatctcaaaaccagcatccacctttccagccttgcagagcgccttgatcatggcggtatacgagtactcattcagagcgacgttcctgctttcacgcatttcgtcgaacacctcgcgggcggcatcgagctgacctgcacgaacaagggcttcgaggaacgcattgcaggtcttgatggagggcggcgcgccgcgcgaggagagaacgcggaacgcgtcggcggccctgcagagggagccttgggccggggaggtgatgaaggtgtggatgaggaagtccgaggagggggtggaggcggcgtcggcgaccgcctccgcggcggtgcggagcgggtggacgtggaggagtcgtgagaggaggcggcgcgccgtccggatggcggtgcgatcggcgatgagggagggcaggaggagcgccgagacgcgcggggtgaggaggtcatcctcggagcgggaggaggtggaggaggtcctggagaggaggtggaggaggaggcggagggcggaggccgcggggagaggggagggcagggacgagaggacggcggcgaggccaccgccgccgatgcgacggaggagggcgtcgaggtgtcgcgccgagtcgggggagggcaaggcggagagggcgccgacgagctctccggcggccccgcggcagaggagacgacgtcgacgaggaggaggaggaggaggaggtggggtggtggtggtctcatggcggaggttccgggatggttctccaccatatggaagaggaggcagatcatatgggaggggctctggtgctcctggaaaggagttcattaatattgatggagaatatgttcacaggaatgatccaaatctgtcgccaagagaaggcgattggatatgccagaatcccaactgtggaaatcttaattttgctcggcgaactcactgtaacaactgcaacaagtatcgctattcacgagaagtatgtgagcctggccacagtcctcacagagattacgtcaatcctccacgtggacctgcaaggaatcttggtccaagtgatcgggcccctccaagagagatggccaggtacgggtcaccaccccgtggttggggaagtgaccctaagggttatccagctcgatcacctccagatcatgcaggacggtatgcagatccagtgcaaagggaaagaatgggcttccgtggtgattgtcagttgagggaccgtgtaaagcatgactggtcttcagctgaagactacaacccaagggagcgcccacatgatatgtatcttgagaggagtcggcgacgatcagtgtctcctcgggataactgggggcacaatatgcgggaccggagcagatcccctgcaggaggcaggctgaagggttctttcacaggtggaggtcgaccagacttgtatgctgatccctatgcagggagggggcgacccaacaatttagatgatgtccgtggccgtggccgtggccgtggccgtggttacatacctggaggtgctacatacctaggcaagggtcgaggtgacaggcgtgctgctcccagtagtaggaatgatggaagctattagatcatcatagtcttattgcatgaccatcaaacaatctagttaaggtagctgttgaagcaagatgtagcttgtaatattaagatttcccgtactgtcttgaactatgatattacatttgcatcttgtatggacatacagtgaatgtacggtcacttggtcaacattttgctgctcgacgtaaatgttgatgcgtttgacattaatcggttctgtagagatgaccaattcatttgattattcatgcttcggatcattgagttcccatgagctgcttgggttgtttggcc

SEQ ID NO: 25600 - DNA, 1798 bp, Oryza sativa
  ref <308>: DATABASE ACCESSION NUMBER: AK101042
  ref <309>: DATABASE ENTRY DATE: 2002-08-28
gatcctcactcctttcttctttcctttcccctctcttcaccagccgcacgccgtcgcagaggcgctcaatctccggcgtcggtatccactccagcaactcccatagcctggacacgtcagtgatgatgggcttgaggtagtccacgtacagctcgtgtgcgcgctctgccctggacatcgacatgcgcgtctcccgctgcttttggtcgcggtagagctgggcgaagaagaggtgctcaaccttgttgggcacggtgtcgtaggggtagtcggcgagggagggagcagagcgacggcggtgaagacggcgggagcaaggcgacggctcggagatggtgtgcggtggtgacgtgcgaggtcgccgcccgctgcccacctcccgtcggccggcgcgcgcgctgcctcctctcccgccggcccccgcgcgccgctactcctctcccgttggctgccctgacgagctcgcctcatccctcgcggcgctccgtcggccgccctctccaccggcacggcgcgcgccgccgctcctcttcctcccacccaccggccgggcgtgtgccgccgatcctctcccaccggccgccgcgcgccacaccctcccgccggtctccgcgccactgctagagatggatggtaagaccctctacaatgagcttgaagttgtagaaggcatgaaacttgacagaggctctctctccttacttcattaccaaccaaaagaaccagaaatgtgaactagatgacccactgatcttgatacatgaagtgtccaaccttcatgctgtggcgaaagtgttggagttagctctgaagaagcaaaggcctctgcttattgttgcagaggatttagaaagtgaggcattgggtactctgattattaacaagctttgtgcaggcattaaggtttgtgcagtcaaagctcctgggtttggggagattgttagcacaagaacaaagtcttgtgtggcgccttctggggaatttgaaccattccaatcctggcgcaaagttcctggaacttgacccgcccaagagacttggtgaggaggtcggtgagccgatccttggtgttgatgtagctggccttgatgctcccctcgtccaagcagctccgaatgaaatgatacttgatgtggatgtgcttgctgcgctcatggaagatgagattcttcgccaaggccaaagcggacttgctgtccaccctgagctccactgctttagcatctctgcccaggagcgagatcgcccaacagctgagccaacaagagagctgtatctaaggatgacatagtgatccttgatggagctggagataattaagaaggccattgaagagagagagagctgagcaggttcattctatgctagtttagttttacatgaatccctcaaacatgaagccacatgaatcccttcagtctagagtcgtgtggcttcatgtctagacaactcggcatttttgcagcactgttattccatcaattatatagtattgacttttttttcatcttaaaaagagttggctgaaacttaaatctgtcatagctattaattgaaacctctatatgagagttatgtcatattgctgttacatgtagtttctttcctttaattttacagattgaggaacttgcctttttggtccatacgacccgtgttctaaccatactttgggttctctaatcattcagctttgtagatttttgcgtttggctgtgtacactcttgactcttgtggaaaactggactgtacaggctggaatgatatccattatctaaaagaagtgttgatttttgc

SEQ ID NO: 25601 - DNA, 1975 bp, Oryza sativa
  ref <308>: DATABASE ACCESSION NUMBER: AK101043
  ref <309>: DATABASE ENTRY DATE: 2002-08-28
gagggggctcgtcgacggcgatcaaccgccgtcgccgcgccttggatcttaggcccttggtcggggatagaggcgaggatcgagtcgtcttcttcctctctctctctctctcagccagcccgcgcgatcagagatacacattgatcatcgattcgttctcttcctctcctctcagccggtctgtgaatttcttggccaggtgagaggtgatccaaggtttctttcctcctttgacgctcgcaaggtgttcgacggaatgtctccggagagcaagaaggcgttggtggaggggggcggcgacgaccgcatcagcttcctcccgaccgcgctcctgcagcacgtgctgtcgttcctgcaggcgaaggaggtcgtgcgcacctgcgtgctcgcccggcgctggcgccacctctggaagtccatgcccatcctgcgcgtcaccggcgccggcgacgcccgggcgttccacacgttcacgtaccatcttcttctcctccgagaccggtcgcccctggaatcttgcacgttcgacttcaatgtattctccaaagacgacatgcccatcgtgaacctctggattcggtatgtcttgctgtgccaagttcgggtgctcactctcgccatcggtggacatcagctgactgatctgcctgtagtctccccaatcttgacaaggttggagcttagtcgtctgagtgtaaatggcaagtttcttgatttctcgagctgtccggcactgaaagagctgaagatgaccaactgcgagatatctgctgacaaaatatcttccaagtccctcaagcgtctcaggatctgtgaatgcaagtttaagtcgaagatgagaacaagaatctctgtaccaagtctacttttcttgaaactaatagctgtcaagggtagaactcctttccttgaagacatgccagtgttggtagcagcaaaagttttactgctcgacttctactgtaaggattgttgtgatggcaatgatcctgggtattgtcctgctggctgtacgcattgttatggcattgatgatggtagtgcaggctgtgtgcttctaaaaggtttggcggatgctacgaatttggagttgatagctgatcctgaagtgtttattctcaaaagggatttgaggtggtgccctacattcactaacttgaagactttattactcagccagtggtttgagtcttctgaccactgtgcactaatttgcattcttcaacactcaccggttctagagaagctcactcttcagctttctaagaaatcagtaatcaatgttcgatcaagagcgatctacaattcgatggaaaagtcatttacatcagaaaaccttaagacagttgaagttaaatgtcaagatattgaccagagagttcacaaacttatgaagtccttgaacagctatggaataccacttgagagaattaatatccaacaaacaaatcaattttctgagtgttttaatttcgtttggacaggattcataccaagacagagttgcggaagacccgggctgtcgatgtatctaaattctccttaatttgccatctggtattgctgcttcaaaccaatggggatattcttaaatcggttccaactgagggaatgaaacataggtttattgatacgatttgcttggatgtgtctggacgtggttttattagctacctactaggtattagtcttactccatgtttcgttaacggcctgacttggtagtatctttcgtgatgactgaagctggatcagctactgaactggaactgaatgttcatgcgatttataaacttgcgatgccctaggacagttttatgctttcctttgtgtattttgtggagatttgatcaaatttcagttcattttggaccgacgcacaagctggattactattgcggaatttggaaaaaaaaaaagaactactttgtaaagcaggtatgataccaagcaagaatcaggcaggtatcggatt

SEQ ID NO: 25602 - DNA, 2864 bp, Oryza sativa
  ref <308>: DATABASE ACCESSION NUMBER: AK101044
  ref <309>: DATABASE ENTRY DATE: 2002-08-28
gcttcggcttctgctgcttccgcgcagaagaagaccaattcctcgcgccacctccaccaccgcctccgccgccgccgtggacgccgggatggatctgcggcggccgacgacgcgctcctcgtcggggggagtggagccgaggtaccggcaggtcggcttcgtcaccaccactgccgagcccgccgcggcggcggcgtcgtcttcctcctccccgcgtggctccgacgtctacccggggtcgctctcccccgtgatgatcccgcccccgcgcatccccgaccacctcaccgccctttctcccgcccccgtctcgctcctgccctcctccccgccgccgccttcgtcatcccgcctcgacgccgcagaatccgacctcgacgacgacgacgacgacgacgttgacgtctcgtgggcgcggccacctccacctgcccttctcgaatcaaaggaaggtcttcctgatacacagaatgaaggtgctccagctccagccccagttcaacaaaaacagaagctttctaaagcagagagacgtgctattcaggaagctcagcgtgcagccaaagcttctgcaaaggaggcagggttatcaagaaaatctgtagccacagtttctacttctaatgctgcaatgtcaaaacaactcaaaactgtaaagacacctcccaagaaagatctgccccaacttacacctccagttgcttctgaaaagaagactagtgagcaccctcctgacagagatagaaagaaagatgttcctccccctcgtatgcagtttgataatgtacatcgggtggagaaaacaaagaagcattcactggtcaaccaagtagaagcacaaaacagagtcgaattgttcaggcatctgcctcaatatgtacatggaactcagcttcctgacctcgagtcaaaattttttcatcttgatctaatgcatccttctgtctacaaggttggacttcaatttttgtctggtgttatatcaggtggcaatgcttgttgcgtagcaatgcttcttgctttcagagaggccataaaagattactctacaccttccaccaaaactctcaaccgagatcttactgctaaaatcagtagctacgtgtcatttctcatcgagtgcaagcctctttcaatcagcatgggcaatgctattaggtttttgaagaacagaattgccaagctattgcttacattgtctgagtcagaagctaaagctagcctacagtctgacattgatcggtttataaatgagaagataataattgcagaccatgtcattgttagccatgcaatagccaaagtcagagatgatgatgtattactgacatacgcatcatcctctgttgttgaaatgatttttgatcatgctaatgagcttggaaagaagtttcgtgttgttgtggtagattctcgtccgaacaacgagggacaagcactattgcacagattagttgcaaagggcatcagttgcacatatacgcacattaatgccatctcatacatcatgcatgaggtcacaagggtttttttgggtgcctcttcgatattgtcaaatggagcagtttactccagcgttgggacagcagctgtagcaatggttgctcatgcctttggagtgcctgttttagtgtgctgtgaggcgtataaattgcatgagagggttcaacttgattctatatgctctaatgaacttggtgatccagatgttatttcaagagttcctgagagggaagatttgtgccaccttaaaaactgtacttataatgaaaatctacaacttctgaatcttaagtatgacactatgccttccgactatgtttctatgatcataacagaatatggaatgctcccacctactagtgtgccagtcattgtgagagagtaccgcagggagcacatatggatatagaacgaatgatattttccttgatgatttaatgagttggatttttaatatgaggtactgtctatcagcatcatcgtttgagttgtgtggtcacccttggtccaatgcgcacatgaacgctagtcctgccaccagcaagggatgttcatcagtagtcatttgaacagcttgttgtcagtctacaagaatggaccctacaaataaatcatgcatctgagttagatctatgtcactttggtcattgaaagctcatcaaatcaagggctcaagttttaagtggcaccaggtggtggatggcctggtgaattactgttgctccacactcggtggatcattactgcggacctaatgagttctcagtacacactaatgggcatcttttggtggggttcattgctttcctttaagcctgctaatgctactgcctatttttcagctagctcagacctgccccaacattgttgttgctgcctatatttatgctgatcaagacctgtttacagcgacggtccctggcaaggcaccagttgatcaactgtctgaaaacgtgatggcagattgaattgctcagcgtaagagtgcagtaggtactgtagcaggtctgggttgtgttttggcttggtgttggcttgctcagacaggatcttcagctgtatcagcatgaatagacgacgacatgattgttttggggagtttttcaccggcttgcacatatattaatctcccacgcttgtccagttgggcaactatcattgtcaattcaaggtcatattggtgtccatgtctgccaaagttcttgggtacaaggactgccacagttctgttcctggctgctacgacaggccttgtttagtggagaaattgtggatcaattcgtcgcctgatagctgtaaatcctaaaactcctgtagtgcggaaaaataagagaaatcctcagaaagtgacttgttgcagc

SEQ ID NO: 25603 - DNA, 2170 bp, Oryza sativa
  ref <308>: DATABASE ACCESSION NUMBER: AK101045
  ref <309>: DATABASE ENTRY DATE: 2002-08-28
gactcaaccaacagtcggcgcaccagcagctgaggttggaggaggaggaggaggcgccgcccctcaccgcacctcgcgcggcgcgggcgcaggcggttgcgagcgacggcctcagcggcggcggcggcggcggcggtggtggtgaggaggaggaggaggaggagcggggagagtgtcgcggtgttgtcagggtgaggggagtcagatgcgcgcggaatggggaagcccgtcgatgtggagctcggcggcgcggcaggcctcgagatcgccggcggcggagggggaggagggggaggggtgtgggccgtcgccggggcgatcggccgcgccgcgtcgttccggtgcgtgttcgtgctcgcgctctccgtgggagtcctcgtctcggcgctgctgctcatcgtgcccacccgcgggcacgggttcctctccgacgaccccgtcgtgctcggagctgaaatccaggttggttttaccttggaaaagccagtttcattccttgctgctcacatggataaactagggggtgacatatatgaagaaattggtattcctaatagcaaggtttccattgtgtcaatgcgttctttgacctctaagtactccacaaatgtggtttttagtgttcttccttctccaaaagaagcctcaataagtttgcctgccctaagtgtgctgagatcatccttaatagcgatgatgctaaatcaggtgaacctatcgttgacagaaccactttttggccatccatcttccgttgagctgttgaggttccctggaggaattacagtaattcctgagcagtctggttctgtatgggcggatcctcttttcaactttgtgttgaacaattccatttatcagatcttgggtaatattacagagctaaaggaccagttgaagcttggattgaacttgaggtcctacgagaaagtatatttgcagttcaggaatgagattggatcttcagttgatgccccggcaactattgaggcatctgttctagatgggagcagcattcttttaccatatagattgaaacaactagctcagctaatcaaagaacccaatgcaaggaaccttgggcttaatcactctgtatttggtaaagtaaaaggtgttcaactgtcatcatacctacagcattcgatctcagatttatctccgagtccatctccttcaccatctccatccccatccccatctccatctccatctccattcccttcttcaagtgtaccaccatctttctcaccatctgggagcatccattaccctgcacctccaacatatatgaacccaagtcttcctcctcaagcttcaccccctttgcctgacacaaatccttgctttccatgtttcaattgtgaccgcttttcttccgctggtagcccaacaggcaaaccaccttgttttcgcagagaccctaagctacctccatttatacactccccgcagccatctgttgctccttccccatatctttctccagcttttccaccaattcctggtcatgtagatcctcccaatcatttacctggtgcagtccctggaccaacttatcaaatgatgtcaataccttcaccctcattgcctgtgtttcgaccttcaatggctccatggaagaagcgacgaaaaaccaagtcccccccttcaattgccccttccccatattctctccattcctgaagtgagacttggctggtgccctggactgtttgcctacagagttaccagtgcacaaggtggttgtggttgcaaagtttgcttcttgaaatctcctgaagcatggagttgcaatcgtgagcgatcgtactgcaaaggcaggtttatgaatgcaatcatgagcaatcatactgcaaaaaggcaggttttgcttatcggttacttctaactgtatggtggtttctcgcacttcagagttggagtataactgtagatataggtctgtattatgctaatttaccagggtttttatgtcacgaaggtgactgccctacgcctctaccaaatatcaagtttctcaccgaagggttgggtgcttatggtagaggagaatgtaatgacttaccatagtcgaattgatgttgtatcttgcgatacgactgttcgtttcctgtaacatcatcatatactgagcataatacgatacatttacacccgtctttctgcg

SEQ ID NO: 25604 - DNA, 2103 bp, Oryza sativa
  ref <308>: DATABASE ACCESSION NUMBER: AK101046
  ref <309>: DATABASE ENTRY DATE: 2002-08-28
gatctccgctccattcccccctcccgtgtcgcagcgagaagcatccatcggaattctcgtcgaccaccgcaaccgccatgggcggcgcccacagccgcgaggacctcgacctcacctcctccgacgacgaggacgacgacgaggagtacgacgcccagaccgccacctccgccgcctctcgagaggacatcctccggacctctaccccctcctccctcgagttcctcgacgcgaagctgaaagcgctcgatctcaagtaccaggcgccgaacgcggcgaagctgtacctccacgtcggcggcgcctccgcctccgcgcgctgggtgccggccgagcggcgggcgacctacgccttcgtcgacaaggcgacggcggcgggcgacagcgattgtggcggcccgaggtgggttctggaggttggtccgggtcccagggtctccgcccccgtcggcccggcgctacagctcaaggcgctccccgcgcagcgccgggccgatttcgccgcgggcggctccgtctgggcgctgcggctgccgaccgacgccgccttccgccgattccggcaggagtacgaccggtgcctgttcgagaacacgtatggcgtcgaggccacggatgagggccggaaggaggtgttcggcgctaacttcgccgcgtgggcgcgccccggtgagtccgacgacgccgtctgggccgacgcagaggactccttcacccctcccgttgcgaccccggcgagagacctgctcgaggagttcgaggaggaggccggggacggcagcatccagagcctcgcgctgggcgcgcttgacaacagcttcttggttggagggtcagggatacaggtggtcaagaatttccggcatggcgtgcacggcaagggcgtctctgtgaggatatctgatggccgtggtggtgggaacgcgtacatgacaccgcagaaggctctgcttatgcgtggcgagacgaatatgcttctgatgagccctggagagactggcactcgccattccaatggcgtccatcatgttgatatagagactggcaaggttgtggctcagtggaggtttgagaaggatggaactgacatcacaatgcgagacatcgccaacgacagtaagggcgcgcagctggaaccctctggatcaaccttcttaggattggatgacaaccggctatgccggtgggatatgagggattccaggggcagggtgcaaacaattgggagctcatctgagtcaccggtgctgcaatggtcgcagggccatcagttctcaaggggcaccaatttccaatgctttgcaagtacaggggatggttcgattgtggttggttctgtggatggcaagattaggctctattccaagagttcgatgcggatggcgaagacagcattcccagggcttggatcaccaatcacacatgttgatgttacttatgatgggaagtggattctgggcactactgatacatatttgatcttgatctgtaccatctttaaggacaaggatggtaaagagaagacaggattcagtgggcgtatgggaaataggattgcagcaccaagattgctgaagctctccccattggattcaattttggcagggtccgagaacaaattccatggcgggcagttctcttgggtaacagagaatgggaagcaagaaaagcatcttgttgcgacagttggcaaatttagtgtcatttggaactttcagcaggtgaaggacagcaaccatgagtgctaccgcgatcaggaagggctcaagagctgctattgttacaaagttgtcctgaaagacgaatccattgttgacagccgtttcatgcacgagaaatttgcaacaaccgactcccctgaggctcctctggtggtggcaacacccatgaaagtcagctccttcagtttagccaatagacgattacactgacagtcttattttgctttgcgtatcatggtgggagaatctactggtttttgtgtagctcactgctgttcctttcgtggtgcgagaatctacaggttcactgctgttcctattggttcatttgttacttgattttggtgtagcaggcatgttgataatactagtactctttgtg

SEQ ID NO: 25605 - DNA, 1337 bp, Oryza sativa
  misc_feature (261)..(261): "n"=any one base of a, t, c, or g
  misc_feature (264)..(264): "n"=any one base of a, t, c, or g
  misc_feature (267)..(267): "n"=any one base of a, t, c, or g
  misc_feature (270)..(270): "n"=any one base of a, t, c, or g
  ref <308>: DATABASE ACCESSION NUMBER: AK101047
  ref <309>: DATABASE ENTRY DATE: 2002-08-28
ggtagagcacctgcccaccgccatccctctcctcctcctcgactactagaacccaaagaggagcacgaatccgcctccttcaatcccctcaaaaaccctcgttaacccccgcatcgatctcgccggcagatcgcggaactcgcaaagatcggcggcttttcttttcttttctttttcttgcagcaaagatcggattttctgtctcttttcatcgggaggagatagatggcggggggaggcagcaggaggggcgcggcggcngcngcngangaggcgaggatcggcaccatcaacgtgttcgcggcgctcgacacgctcaagaggaggaataagccttcgtcgtcgtcgaacaagcactcggagaaagataaggaggtgctgtgggcccccgcgccgctcaccaccaggtcctgggccgacgtcgagaacgacgacgacgacgactacttcgccacctccgcgccgccgcgccccgtctgggggacacaccaccacgccgctgacgcccacgacgacgaccacgacgagcaagctgcccttgaacaggaacttgaaagtgaagatgaggaggttgatgatgatgctgaggatgaacacgaacatgaaacagaggatgctacccctgctgaacctgcaatgaataaagctgcagctcctcctgcaccaccgaaagatactgaaagacaactctccaagaaggagttaaagaaaaaggaactggaagagcttgatgctattttggctgagttggaactttctagcaaatcaaacaatgatgctcaaaatgaaacaaacggcaagaaaggtgcagagcaagctgctgatggagagaataaagaaggtgcacctgcccctgcagagagcaagagctcaaagaagaagaaagctaagaaagacaagtctgcaaaggaggcgaaagaaacacaggaacttaatggtggggtgggagaagctgctggtgctgagcctgatgaagaggtagcttctatggatgtcaaggatcgtataaagaaggtagcctcaatgaagaaaaagaagtcaagcaaagagatggacacagcagcaaagattgctgcatctgaggccgcagcaaggagcgcgaagcttgcagctgcgaagaagaaagagaagagccattacaaccagcagcctgtgcggtgaattactgcccagattttggatgtcgaaaactcctaatacaatccttgttcgctctggactcacaatagacaatgttggtccactgtacttatgttgacttggggttgtaggaggttccttctgaactgttcatcacaggaaaccttttgaatcttgattacatgcaaaaatacagt

SEQ ID NO: 25606 - DNA, 2452 bp, Oryza sativa
  ref <308>: DATABASE ACCESSION NUMBER: AK101048
  ref <309>: DATABASE ENTRY DATE: 2002-08-28
ggtcactggttctatagtgattttgcttttttgctccagtaaatgggaaaattgctctggttactgagcaattagggagttgatctggttgattttgttttggtggaacatagaagaagctgtcggtggaagagaagtgcttttcactgcatagtagctgatttatgctagatttatgagcgcgcagctgttcttgagttttggccctcttgttcagctattcattcagaagctgtcaccgaagaaagttgttgagcttagactcactgatttataagcacattgctctgggaaaatttataagcacatagcgcctcctctgctcctcacattgctctggtaaaatttataaacataaaatttataagcttcctgtttagcaagcagactcatcggtgtgtcacattcagaagataccagcacattccaactggaacctagatctgttggcctattgcatcatgtacaggcaagtctgaaaactaaataagggtaaaaccgtcttttctcctctagttaacaccatcaagtgtaaaaactaatggaagtgctacatagggaagggaaattttgagggtgcatagatagagaacttttgaagtttgggtggtagagatagaagaacaactttttttttatactacatagggaattttctctacaatatatcagtttgcgaggggtacggcgacggagatagtggcaggcctgctcattggaggacagcacctcaccgtcgtcagagctcatcgttgctgcccagctcctcctactctctaggtcagcccaaacggatgattatcggctctgggttctctattcggaggcaaatgctggccaacattcaaagattcatctgctcgatttggagtacgaaaccacctcgccatcacaggcatactgcctgccatgtggacttcgattataaatctacctcgccatcgcgcccatactgttcggtgtggtgtcgatgctcctgttgagaagtagcgcaattggttggttgcttacttaggcttaatattgggttaatgtagatatgaccctatggccttttattgtctttattttaaaatatatatatatattctgaaatacaggaagtatattttgtcccaaactaaatacatcacagtaacagcatggttgccttttttcttagattattttttcttcaactcaacattagggaactacctgttggtattaaaattttacactaataattaaataagtcaacttataaagcgattcatataaggatgtaatctaactcaatttatttaaagattgttttgtgttgctcaaacctacaattatgatgcattaataattttgtacaagatcatcggcttcatgatatacacttatgtaagacttgtacatatcaatgtagtttttaagacatttatgaactgtgttttgaaacaatcatgttttcaaattatcaccttgcaataaataactattgctacctagcaaggtgagaatgtatagccacctcctcaaggatggttaaaaaaaagatcctttttacggttcttgtagagctacacatctggtttaaatttgtggtatctgctatcatccaggaggtatgatactatgtacatcttcgaggcctgtaaaaaggctttttgtttgtaaataatcaccttttctctatagaaatgtgatacatgccttaatttgtgtttacttgtactgatgatatctggtctttgtctaccaggattttatagtgataatggttaattatttgatgatttcatgtaatgatggacttagtcaattgcgagctataataagatgccaaaaaatccctatttttgaaaattcatgaggaaagcactttctaatttctgactcttaacacggtatttgtgaaatttcagctttgatctgtttgagaccaattaaactctactagcaaatttcatgcctgatgtcgacatcaagcttccatctgcttttggagtaactggtggtcttttctgagcacgactgaacccaccatttgataattttgaaatcttccctatacatccgtttgtggaagcaaatgctgaggactccagtgttggtgctggatcaaaggaatatgtgcacacgctcattcagtgtggcacaacggaagaaaaagactgattattgttcaaggcttgaagagagaatacagccagaacaaaatattctaggatctagaaaaggaatttggctgtaatgttactgtggtccatgattcagagctaggaggtacaaaatagcacgtatattgtgttgtatccaagttgtttggtgtgaatgtgtataataatgaatggtctgctatatatgtttgtaggtcattcagattcaaggtgatcaacgtaaaaatgttttgatatttcagtactttgaaatacatttccttgcagtacaatttgacaagtgtaattctctgcctttctgc

SEQ ID NO: 25607 - DNA, 3712 bp, Oryza sativa
  ref <308>: DATABASE ACCESSION NUMBER: AK101049
  ref <309>: DATABASE ENTRY DATE: 2002-08-28
ggtcttcgagacttcgactctcgactctcccggcgacggcgacggcgccgccgccgccgccgccgcgtacgagtcccgtgacgtgctgagcccccccctccggctcgatcggctctcttccccgacccgatccacagggggagtccggcgtgagagagggggaaacccggacgcgacccggcctcgccgccaatcgtggccaggaattagggttgggtccgtgtcgggctcgggactcctgccgtgccgctgtctgacaagtgacaaccccaacaccgtcccggctgcggtctcctatcctcccctctccctctaaaacatgcctcgcaagaagccaacttcgctttcgccgggaacatcccggtttcctccaagccctggaatctacaagtttcgaccggctatcctttgggactccgcgaggcacagcagattcagcgcacgcaacagattcagcgtactagaagccatcagcgacgaggacgacgattcgttgacggagcgagactccaccacttcagacagctgtggcgaggacaattcgcggaaagacccaccgctgatggaggatggagagattgtgaatcccttggtgaggacattgctcgagctgttcagcgaggaacaaatttctgaaatcccactcatggaaacatatattcgcagatgtggtatcagtgaaggaatgggatctcatcttattgaagagaataactttctctttggagcttcacttctatagtggcttgtccatggattaaaaaagatacaatactgctttccagcatacttctccgtttatcagaaatatggaaccaatcagaatgggtgacaaatctattggacttttttgaagatgctcagttcaggacatctgtgtacaatgttgttgcatttttcgaggatcagctcacaatgtccacgacagaaaattctaatggaatcgaccataaggagaaattaagctattcaactttgtttgcccttcttccactgttacttcccttactcttaaagcttcttcagtatgtgcattcactttggacggatgaagttgcttctaacgtatcagaaaaacttgaaggagctaaatttattatacaagctgagaagccatttggtattattgaagaaactactgaaatgctagatatgaatgaggaagagttgctggaaaatgagataaggaagtggctaaaaaagatccgccaaactgggtataatgtcataggtatgtgtgtgtgtcttgagggagcattttataaacttttggacaacatttctgtttgtggtgccttactgaaggacctagaagtaatggagttccgtcatttgactatgcttattaaacatacaattgttccgttggtgaaaaattgtcctgctgaactttggccgaagtggatagatatgattttacagccagtgtttcactactgtgatgatacattagatggttcatggtgcagttttttgtacaaggaaacaatgctcgttcctgataaattctgtcatatttctttcacggaagaaaagattgaggaattaggaaaggatcatctttttgaggtgactcgtgaaatatcatatatgcttgctgtaatggcactgcctgaattaaatggtggaatagcaaatgagcatcaatctattgtcagcatagtagaaacatctgcagatttggaatctacttgttcaagctcccttgttgggtatctcttataccatgatgatcttagaccttcaatactaaggctaatcaataatattattggctattggaaagatagtgaagcaaggattaaagttgtgtcattttgtcatatgctgatccaacttgctatttctacgcacaatgataaacttatatcttttgttcaagataatttaattccaatggttgtccgatgcttaatatttgagccaatatcaaacaataatgatcttcttcttctttgtgaagatgcataccgctgcatacaaagagaggaatcagtaagtgaaggtcaacatgatggaaatagtgcagaaatatttgaaaactggttgtcaaagcaaatgatagtggctcattatgaacactcacctcctgatgaactcgaagactttgtgtgcatctgggagattgaagaagaatttactgcttatcttcacacctatactgaaatgttgcataaagtggatggaatcggtgatacaatagaggatgtttatcttaggtgtcctatcccatttgtgtccaagcatgacaataattgttgtccaatttctaattcatgggccatgtcatctatgctgtcacgtaaaataacttcaatgtattgcaagagagagactgaacaaaaattcaagtttctttgtaaacttatcacatttaaaccctacattaagtgttctggttatgatgagagtgtgcaagagcttgtggatgacgattcagaggtttggtctgcacttcctggatgttgtaggcaggagacacttgagctcttttgtagaatattagatccctgggagcctcaattccatcctctgatacgtgaggatgacaaggaaatgctacgtgaaatagcttacctattaacttcccgggaagatattcattgtgtgcagtccttccagcctgtctccagcgactttttgctgcatttacaaccttatgcccagaattatattgaggtcaagaacgcaagttctgggtatgacagggtaaaagaacaaataaggttgcatgaagcatttgatacacatttggcctctggtgcattggatgatcatgttcgtcagattagttcttcaaaggataatttcgtgaagattatgcttgatgatgatactttgcatagtcagtttatagatctggattatgatctcctgaaattgtcacatgagcgacgagctaaacttcttagtaaacaagatcaattatgcttatattacaaacacatgaaatgtgctgtcgtaaatttgcagcatagagatagacttgaaagtttgatatgtgagctcgagtcagaaggtttcttccgtgtggatgatgattctattgaatgggaaaaggaacacttttcagaacttgtggacgaattcaatgagcatatttttgctgggattcaccttccaaaatattatgttattcgtggagttatggattatcgggaaatgttacatatgaaggatagcacttgggatgatgctttcacagtggttgttggtggagcattctgtagatggatggaagatcgtgatctgttttggatggagacaagatactataggcatcgttactatgacatcattcaagagccagtaaaaatgatatggaggactacaggtgatgagaatgagatgacagttggacacactacaaggattatagatggcaacggagaattcaccgccggaatgaactagacttggctcaagactgctgcaacacgaaatcaaggagtacctgtctgtcaatcttctaggactctagggcgacaatagtaggcatacaaagttatcaaccaaacctccatggttccagtctcgcacaccaagttttgtgatcacctggaattaagcagagctggatgcttttgattaatcaagtccacctgtaccacaaacacacttgcacatgtgtatatatcctaattttcatcatgttaccaggctacattttgacatatacagacacacccacaacgtgcaaaaaagttcaagc

SEQ ID NO: 25608 - DNA, 4093 bp, Oryza sativa
  ref <308>: DATABASE ACCESSION NUMBER: AK101050
  ref <309>: DATABASE ENTRY DATE: 2002-08-28
gagctttctccaccgccgctctcttcgccgcagcggcgccgcgcgcaaacgccctccgccgctaaccctagcgctccatggcccccgcggacggcgggggagagcagccgcacaaggcgcaccggcagcacaagtccggcgcgaaggcgaggaagaagaaggggaaggggaagggcggcggcggcgacgatgacggtggcgagaggaagaacccgaaggcttttgcctttcagtcagctgcaaaggccaagcgtctacaagcacgatcggctgagattgaacaacgtcgtcttcatgtgccaattatggatcgctcaattggtgaaccaccaccttttgttgttgtagttcaagggcctcctcaggttgggaagtcgctgctgataaaatgtctagtaaagcactacacgaaacaaaatttgtctgaagtccgtggtccaatcactgttgtgtcaggtaaaagcaggcgcgtacagttcttggagtgtccaaatgatatcaacggaatgattgatgctgctaaaatagctgatcttgctctgctgcttattgatggaagctatggatttgaaatggatacatttgagttcctaaatattatgcaagtgcacggattccccaaggtgatgggagtccttacacatcttgataagtttaaagatgtaaaaaagcttaggaaaaccaagcagcgcctgaagcatcgattttgggctgagataaaggagggagcaaaacttttctacttgtctggtctcattcatggaaagtacacgaaaagagaagtccataatcttgcaaggttcatctctgttatcaagcctatcccactgagttggaggatggcacatccttatctgctagtcgatagatttgaagatgtaactcctccagaaagtgtgcgcttgaacagaaagtgtgacaggaaaataacattgtatggctaccttcgtggctgtaacatgaaaagagggacaaaggtacatatcacaggggcaggtgattttagcttgtctggggtaacaagtttggcagatccttgcccattgccatcagctgcaaagaagagaggactacgtgacaaggaaaagctgttctacgcgccaatgtctggccttggtgatctactgtatgacacagatgcagtttatataaacatcaatcctcatcttgttcagttctcaaagactggtgagaatgatgcatctaaaaagcaagggaaaggacaggatgttggtgtaaccctagtaaaaacacttcagaaccccagatattcccttaatgaaaagttggatcagagttttataaatttatttggtagaaagcctgctgctcagtccgaagacatctctggcaaccagaatgatcagggagatgctaatattttggaagaagcagatggtaataacatatgcaacgcaaacacgttggagagcaatgatcattcttattctgagtgctccagcgatagtgaacatgataatgatgaagcaactcagcaaaatgaccatgaagttggcttgagagaagaggtggaattttgcaatggaaggatgaggagaaaagctgtatcagctaattttaaagatgatgacgatgatgagggtgcggaagaagatgacgttgacagtgaaaattctggtgatgaccagttatctgaaggttccgcagatgacagtgaagaatcacttgattcagatgatgaaactgagaacaattcaaagtggaaagagtccttgcttgctagaacactgtccagacggagtgccaatctaatgcaacttgtatatggccaagcttcaaagaagctggatgaaggaaatgacagtagtgcagaagagagttcagatgaagaattttttgtaccaaaaggacaaaagaagcaagcaaagaatgaatcaacaagctttgatgatatggatgctgaggattactccaagttttttaaaactgagctaagagattggtctgacgaagatctcatcaagagcattcgtgaccgtttcgtgactggaaattggtcaaaagcagctctaagaggacaggaaataaatgaaaacgatgtggatgacgaagaagtcgatggagattttgaagatctggagactggtgaggtgcatacaagcaaggcatatgaaaatacttcaggaaatggaggtactcacaagcaagatgaccttgctatggaagaaagaagactcaagaagctcgcacttaaggcaaaatttgatgcagaatatgatggatctgatctctccggtgaggaagttgataatgacacaaagaaatcgaaacgagaagaaactaatggagggggctatttcgataagttaaaggaggaaattgaaattcgcaagcaaatgaatatttccgaactcaatgatttagatgaagataccagggtagaaattgaagggtttaggactggttcttacatcagattagaggtacatggtgtgctgtttgagctagttgaatattttgatccttgccatcccattctcgttggaggcattggccttggtgaggagaatactggatatatgcaggctagcctgaaacgacacaggtggcacaggaaagtactgaagacaaaagacccaattattgtctctattggttggaggcgtttccaaacaactcctgtatatgcaatagaggatcgaaatggtcggcaccgcatgctcaaatatacacctgagcatatgcattgctttgctatgttttggggaccgcttgctccaccaaaaagtggtgtactggcagtccagcatctctccaacagtcaggtaccatttagaattactgcaacaggctttgttcaagaattcaacaatactgcccgaatcatgaagaaaatcaagctcacaggtgtaccgtgcaagatatttaagaaaactgccctagtcaaaggcatgttcacatctgacttagaggttgctaggtttgagggtgcaactattcggacggtaagtggaatccgagggcaagttaaaaaggcagcaaagattgaaccaggagatatgccaaggagaaaaggggaaagtatagacgggattgcaaggtgcacatttgaagacagaattcttatgagtgacattgtcttcatgcgtgcatgggtcaatgttgaagttcccacctactgtaaccttgtgacaactgctcttcaaccccaagatgagacttggcaaggcatgagaactactgctgagctgcggagggcacataatattcctataccgcacaacacagattcagtttataagcccattgagcggaaagtgcggaagtttaatcctatagagatccctgcaaaactgcagcatctacttccttttaaatctaaaccgaaggatacgcccaagcatagaaaaacaccagtggagaacagggtccctgtccttatgcagcccagtgagaagaagacacatgcagccattcaacagttaaggctgctaaaacatgagaaggcaaggaagaagaaattgcaggatgagaagaagaagaaagcatatgaggcggagaaagcaaagtctgaacttctaacgaagaagcggcagagagaggagaggcgtgtgaggtaccgagaggaagataagcaaaagaagcgagcccgcagataactgaaaatagtaagagacctgcaggcataatgagtcccagaaatctcctgaggcacatcatccagagcatatggttgcttcaaactagctcaagttgccgcctccagaaaaaagaggctcggattgacagcagacgaggtctgatgcctcggcatatcaagctggagatgcagaacaacttggtataatctgggccggattcaactagtagcgtcttttttatgtagctaaccagttttgctccaccatgctgctacgaaaattttgtcatccatgtaactgatgatttgtagctcccaggtgaagtgggagtgaatatgttaaattatcaatcttaggacataacagttgcccattttcaggcctattataattctagagctaggggacactgagttgtcagcattggatttattggtactactgtatgacaaggacgtgattttgataaatttggttcccgttctgctcgc

SEQ ID NO: 25609 - DNA, 1766 bp, Oryza sativa
  ref <308>: DATABASE ACCESSION NUMBER: AK101051
  ref <309>: DATABASE ENTRY DATE: 2002-08-28
gttctccctctctctctctctcacgctcccctcctcgcctcgcctgagcagccaccggagcagcagcagcagcagctcgccgccgacgagtcgccgacgacgatggggtacacgtacacgccgacgtactactcgggcctgcacgacgccatcgcgtcgctgtgcaagtccatcctccccttcggcggcttcaggtccggccgccgcctcaccgccgaccaggccgcggcgaggcgccacgccgacgcgctcaagtggcagcaggaatcgttccgccgcatcctccacctctccgcgctccaccgcgagggcatcgtcccgccctccgacgtcgacgccttccgcgccgacatgctcgccaccctcgccgccgccccgcccccgcccgcccaccccgaccagcccgccatcctccgcgacaagctcctcttcctccaggagctcttgtacgccaagtgcatctcggcggcggagtacaactccaccaagagcccactcgtgcagcgcctcgcggcgttcggtgtcgtggtcgactgccccgacgcggacgtcggcgatggcggcgcggcttcggcggcggcaccagcctcgtcgtcttccatggaggagtggtcggagatcgacctccgggacccgccgcccgccgcggcggcctccgacaagccgaagcacaaggccttcgtcccgccatggaagagcagaggcaagaaggagctggacgcatcgaggccaccgttagcccccgtcgaccagaacaacagcaagaacgccccatccgtcctcatggccgagagctcgccgtcggaagccatgcccaccgccaagaccgacaaggggaagaggaggcacctgacggcgatgttccacaacggcggcaatggcagcgagaacaaggagcccccggcggcgtccatggaaggcacagatcaggagaaggatgcgtcaaagagcaagaagaagagttcgtgggggttcgatggcctcaagaagtggaagaaggcaagcaacgatgaggcgacggccggcggtgagcggccggagcacgctgcgccgcggtcttcgtacagtgagtgccggcttgaggcgagcccggctgttgccaaggatgcaaagagagccaagaagaagctgaatacggccaccggcgacgatgattctgcttccgatttagcgaatgataaggttttggtggagaacacaaagaaagagctttcaaggattcaggctgagttgtcatccaccaaccgaaacttgaacttttcggatcaacaaattgaggccatctcaacaaggcttccagtggacaaatctgacctcaagaccttcttcccaaaggcatggtgcgatgaacacggagacaacgtgatcaacgtggcgaagaaagagttcaaggagcacgtcgaagagatggagaagcagagggacatcaccggcggcggtgatggctgggttgcattcggagacagccatgacgaaaatttcaacccgagagcattctctcagcatcaggctgcagtgaagggtaacgtccatgacagtcttagcagcagtcaacatttcacaaaccctttctatgacgagaagaatcctttcttgactccaagctacgattgatactgcgagtgaatgtaattggtcttttgtgttggaaatttctgtgatagttttacctccaagttactgatgttgtactttaaggttcaattgttatattggacctaggttgtgtatgaattttctatgaattatgagcttgttccatgagc

SEQ ID NO: 25610 - DNA, 1687 bp, Oryza sativa
  ref <308>: DATABASE ACCESSION NUMBER: AK101052
  ref <309>: DATABASE ENTRY DATE: 2002-08-28
gactacacctctcgaccacgtcttccctcccccgcggcgaagcaatggcgacctcgtcgccgccgtgcgcttgcgctgctcctctcctccgccgccgcctcctccccgctccgccccgcgcgccctcccccgcggcgccacctcgcctgcgcctgcccctccgccgctcgccgccccccgcgcgcgccaagttcggcaagttcgaggcctccgacgccgcccccacggaggcctccgccgaggaggcggaatcggcggcggcggcgggtgatggggcggcggaacagaaagcggaggaggacgacaggtcagggtcactcccacctcttgccgagctcgtgaacaatcgtcgcatcgtgatgcgtctgtatgtgtgctaccttgcgttgtgtgtatcagctgcttgccgtcggacttggagggcgcgatatggcaatcggggaaggcgagcgccgatttcgtcaactctggtggcatgcgagccattgtatgttgctcattgttcatctgctgttcttactgtcttacactgtttcagtttaaccttacctgtcacaaaagttgtgctgttttcacctggaagttggaatggcatggagtcacttcatgtgtgtatgagtgtatccaagatgttaaatgttctaattttgttttgatcatgcaaccttgtcatgtacttatcattgataatttgtatttggttatactgactgtaggcagagctactgatccctcagttggaattcctcaacgaggaaggagcacaggctgaggtctgggcactgtcaaggatattcctggacacacttgtaaaagagacaggccagaaagttaaggccatttttcctgatgctggagcagcggcccttcttaagtatcagtggacagatgcagagtttaagtgcgccagcttaagtgaccggaaaccagttgacgttgaagatgaagttgttgttatgattatccctgatcatcagatggtggaatctgttgaacggattgcatctcaactctctgatgatcctataagacctcttgtcatgtggaatccacgccttgttagtggagatgttggagttggctttaatgttcgaaatctgcgccggaatttcctaagcacttttaccactgtttactcgatgagaccgttgccaactggtgcagtctttcgacaatatccgggaaagtggaaagtattctatgatgacccaaagaggcctaaccggtatttgcttgcccgagaacttgtaagccgacctgatgcaacagacattgagataatatttggaggcggcgatgaacaatctgacgaggcaccatcattgatgaacaatgtaatgggcgtatttagttccgtgagccggtttatgagagtaatctccaagtgaaagtctcaaccaagccgttgatgagaatctttttggccatgatccacatcatcagcgatgctgttaatctgcaactccatgggttactagctgctactgtctactagcaagcgatgtctagttcacgttgcaggacgtgtacaagctaccaagatgtgtacttgcacgattgtattgtagattcctgcatctatgaatgatcctaaacaatgttagctcctatataacatttctgtagatagttacatatccttctgtttctgcaaataatgaagatctgaattgtactttctgagtcg

SEQ ID NO: 25611 - DNA, 3242 bp, Oryza sativa
  ref <308>: DATABASE ACCESSION NUMBER: AK101053
  ref <309>: DATABASE ENTRY DATE: 2002-08-28
gttgtgtatgtgcattgtttgtcagaaacctgtcgaatgggaggcaccatcataattatatgatctaataatatgaagtaaccatcaactgatctgagtgtggagatagagaagcttttcttgattgaagcattttaagacttgtactacaccagatgtgcccccttgagaaacaaaggttagtgttctgctatcgagtttttttttagattgtagcaaatagagattttgttaatttttaatcaaatgtgaagctaaacttctcattaatctgggattgttttccataattgtcccggtgtcagagattgacaattgatttcacaaccaaatgaaaggtagtgtttttctgggaatgccatcaggggcgcagatctgagtgtagtcaaaatccttcaatttttcaaatccgtttggtaaaagttaccactttctgaattccatgcaaggactgacttatgaaaattttactgtatattattgttctataatttgtttataaaagtaatgcagtaatgctataggaatgatgggaccctaggagttagtggcatatatcatcgacacacttgcatggccaggggaattataactcaggtgctcaccgaggatcaactgtccaggatccaggatttttagcatttgttttattgaacgctggaattacttttctcctcgtgccatctaaaggtaacttcaaagctaaatggctggccatgtataatcctaggagcataaatatttttacaaactatataaatttctttgtgaaattttaatagtgattcagtgttgcaacgggaaatgctatatacatggccagccatttatattcagtgtttaagtcgatatattgaccacagatttggtttatatcagtaaatggccatgtttttttcccaagttatgtttctaaatatgtagactgtggtacgatatttataaagttcaagttgtctttgtttcccagaaaatcttaggtctagcagacttacttagtttctgtttacaaatgaataatcgggtagtgaatactatacctgtatatttgtactactctcttatttagtaatgtatctaaaataatgtagactgtactacaatatttatttagatgcatatgctcaatttttatataagtatatgctgcttttacattacttttgtttgaatgtacatgctgatatgaaatttggagagctttcttggaatgtacgctgttaagaaaatttagataaattaaatccttatgccttatattgtttcttaaacacacctataagtttgattggagaaggggacattaaccaattgcttgaaaaaggtgttttgttagctcaagatatggtggaatatttacaactgttttagtaactcccagataatctttctctacatacatgcataactaatttctctaggataatgacacatttctgattcgttaagggcaaactttgaagtacatctgttatgcgcgagatattcagtttatatttctaaacttgggtgcactttgaatcaggacgaataggctcagttggatcagttgaatataaagaagtggtatgcgattagttttttttgtaaatagctcaagttagttttcttccttgtaggatagttacaaaaaaataaggtaaacttgcatttcttgcatgagcaaagttcattacaacctatctaagtataatttcctgaagagtgtttatagctggagttgtttcttctaattttgctgaggttaaccctcctatggcatgcatccttctaaattttgctgaggtaaaccctcctgaaattagtagggtgcacgaaatactactgtttttttaatttttgtacagtggcattgaacatggttttgctctttgagatatgatgcttccctcatgatcaatgaagatttgcattactttaggtgatctgctcatgtttgggtgtttgggtaaggaggagaagaaatggctggggtgtcggtggtaatgaggttgttgtttcagttatacagttccgcataattgtgtgacgtcctgactaatcctgactaatctgtatgaccttttcttccatttacaaatgcttgtgtctctccagttcacctgtgagggagatatgaaatcaggtatgagtaattcttgtggttttgcttctttttctggacacacttattttcatccattttgcagcaagcaatagttaggtatgagaaagaatgtgccttacaattaactgtcagtggtacacataaaactattcatttactcttctttcctggtcatattgatacaggttagtttatgctcttactcgaaaaaaaaaacaaagtacatggtcgtactatttgaccgtttgattaattatataagtttctgagaaagccctgaattcgatgtactagactcgattgttataggcaactaagtaaaaaaaacaaggtgatccaataaagtattaaaacacccatggatcatgttgctaccctgtggtgatgaaaagagacataagtgctagctactattttttgtttaatcatgaaacagaggcttcatgaaaccagatcaagcaagtcaaatgggattgcatcataggtaagatcaaagttttcccctttttgacaccaacagcgtattcttttgtctgtagagattgtatatttgttttcattcatagaggttacatcatatccaagagagtgccaaatctgtcatgtagcatttgtctttttttttttacccggcctctacatccaactggatatatgcaacctttttaaattaagaacttagccctcaaataacccaatctgaaattcgctcctatagcgatttaaattcaggaccttggggtgctactcaggttactgcaaccattaggctacatacccttttacatgttgcatttgtctagattattgcatttataagcagtaaatctttttcggagcaaatagcatttgtgcagtgaccaagggtactatcttcttgatttgcttgcagtctcccattgtttgctgagaccatcaatactcttgcatggatgatggttcaattgaataattaggaactgcaatactggacgaggcttgtttgagttttctttagttctcttcaataagttacctctttaattatatggcttcaaactttttcatattcccgagagcatgtctgtatggcaccaaactgttcacctgagcaaatggtccaataatgaattgtgctttgtcatggtacgttgct

SEQ ID NO: 25612 - DNA, 1560 bp, Oryza sativa
  ref <308>: DATABASE ACCESSION NUMBER: AK101054
  ref <309>: DATABASE ENTRY DATE: 2002-08-28
gtgtaggtgggtggcgcgctggcttcttcttggccgcgagggttttaggaggtttcttgagggttttggagtggtggtggtggaggattggagttggggtctgatgcgagtggagtgatgatgatgtggcctttggagatggaggaggggtttgtggctctcaagaggacggagcatgtcgaggtgacgtccttggcggtggcggtcgaggcgacgccgtcggcgaaggggggaaaggggaaggttgtggtgggtggtggtggcgccggcggcggcgttgggccgacgagggtgagggtgttctgtgatgacttcgacgcgacggactcgtcgagcgatgaggatgaggaggaggtgaccgcgcggcggagggtgaagcgctacgtgcaggagattcggttacagcgcgcggcggcggtggccgtgccgccggtgaaggtgaagggcgaggaggtgttcccggccgcggtgtcggcgaagatggcggaggccgcgaaggcgagggtggtgttggcggctgggaggaagaggaaggccggcggggtggacggcgccgagccgcggttccgcggcgtgcggaggcggccgtgggggaagtacgcggcggagatccgcgacccgtggaggcgggtgcgggtgtggctcggcacgttcgacaccgccgaggaggccgccaaggtgtacgacacggcggccatccagctacgcggccgcgacgccaccaccaacttcaaccagtccggggactcggcaagcctcgacgtcccacccgaggtcgccgagcgcgtcccgcagccgccgggggcgtccaagaacgcctccccggccacctcctacgactccggcgaggaatcccacgccgcggcggcctccccaacctccgtcctccgttccttccctccctccgccgtcgtcgcgaccgccgacacggccaacaagaagcagccgccgccgccgcctctcgtcgtccgcgagaccgacgagtcggtcgacgtcttcggctgctccttctccgacgacggcggcttcgccggcgagctcccacctctctacaccgacttcgacctcctcgccgacttcccggagcccccgctggacttcttgtccaacctccccgtggagcccttctccctggctcccttctccagcaacaatgggtcaccggacctccacctcgacgacgccccatcgccggcggcggcacaagtggacgacttcttccaagacatcaccgacctgttccagatccccgtcgtctagtgcagcagcaagaactgtaaaacaccggattaggagactaatccggcccaattttgtttgcgttttctcttttttttttcttctttattttttcgtttttagaggagaggagagttgagttaatgattccccgtcagtctagctgcggcagaacacccaccaccgcttcgtcaggggggaaagccttgacgaggcgagagagatgagaaagtcaaaagagaggcataaaacgagatcaatgttgttggggttatggtttttttgtaaaccatcgagaaaattaagttatcggtaattagc

SEQ ID NO: 25613 - DNA, 2106 bp, Oryza sativa
  ref <308>: DATABASE ACCESSION NUMBER: AK101055
  ref <309>: DATABASE ENTRY DATE: 2002-08-28
gagctggagctcgatcctgaagagcagtatcagtgctcagctcactgttcatcatcaccctcacctcttctctctccctcccttaccttcctccatagacgactgcagctagctcgatcggagatcgaggccatgtccatggcggcggagagggtggaggctgccggcggcggcgacgacgactacacgcaggacggcacggtggacctccatggcaacccggtgctccggtccaagcgcggtggctggaaggcatgcggcttcgtcgtcgtgtacgaggtgttcgagagaatggcgtactacgggatatcgtcgaacctggtgctgtacctgacgacgaagctgcaccaggggactgtgtcgtcggcgaacaacgtcaccaactgggttggcaccatctggatgaccccgatcctcggcgcctacatcgccgacgcgcaccttggccgctaccgcaccttcatgatcgcctccctcatctacctcatcgggatgagcctgctgacgctggcggtgtcggtgccgtcgctgaagccgcccaagtgcggcgccggcacggcggacccgggctgctcggagaaggcgtcgagcctccagctgggcgtcttcttcctcgcgctctacatcctcgccgtcggcaccggcggcaccaagcccaacatctccaccatcggcgccgaccagttcgacgaccaccacccgcgggagcgccgccataagctctccttcttcaactggtggatgttcagcatcttcttcggcaccctcttcgccaacaccgtcctcgtctacctccaggacaacgtcggctggaccgtcggctacgcgctccccaccctcggcctcgccgtctccatcgccatcttcaccgccggcacgccgttctaccgccacaagcccacctccggcagcagcttcgccaggatggccagggtcatcgtcgccgccatccgcaagctcgccgtcgcgctgcccgacgacgcgagggagctccacgagcttgatgatgagtactacgccaagaagaagaccacgccgctgccgtacacgccgtacctgaagatcctgagcaaggcggcggtgaagacgagcacgacgtcgaggtggtcgctgagcacggtgacgcaggtggaggagacgaagcagatactcaagatgctgcccgtgctggcggtcacgttcgtgccggcggcgatgatggcgcaggtgaacacgctgttcgtgaagcagggcacgacgctggaccgccgcgtcggcggcgggggcttcgagatcccgccggctagcctgcaggcgttcgtgaccatctcgatgttggtgtccgtcgtgctgtacgaccgcgtgttcatgccgctcatggcgcgggcgaccgggaacccgcggggcatcacgctgctgcagcggatgggcgtggggctcgtcatccacatcgccatcatggggatcgcctccgtgacggagcggcacaggctcgccgtggcgcgggagcacggcatcgcggacagcaagggcaccaccatcccgctcaccatcttcgtgctcctcccgcagttcgtgctcatgggcgtcgccgacgcgttcctggaggtggccaagatcgagttcttctacgaccaggcgcccgaggggatgaagagcctgggcacgtcgtacgccatgaccagcctcggcgtcggcaacttcctcagcagcctgctgctgtcgacggtggcgcacgtcacgcgccgccatggcggcggcggcgggtggatccagaacaacctcaacgcgtcgcggctcgaccactactacgccttcttcgccgtcctcaactgcgtcaacctcgtcttcttcttcctcgtctgccgcctctacgtctacaacgccgaggtgtcccgcgtcgtcgacgtcggcggcagaggcggcggcgaaggcggcgaggtgctcaggcccaaggaggtggccatggtggacacaaatctatagaaaatgtatcgatcgatgatcaaatataccatgaaattaatatcaccttcagaaatgctaacaacagcggcttcagcttattttcagaacagtgaacatatggatgcactctgaccagaaaaaaaaacgaaatttttgtgc

SEQ ID NO: 25614 - DNA, 1609 bp, Oryza sativa
  ref <308>: DATABASE ACCESSION NUMBER: AK101056
  ref <309>: DATABASE ENTRY DATE: 2002-08-28
ggtcctctgtccttcttcatcgccaatggctgccatgccaacaccaagatccttctcctacccctagctcatcgcaaaacaagctagaaatcgtctcttctcccaagaaaattcatctttggatcgtagagcgtatttgaagaatgagcaattcgacgtggcagccgtcgccgccgcagactccggcggcggcggcgtcgtcggcgtcggggattgacggcgtggagaacaagataagcccgagcatcgtgttcatcgtggccgtcttggcgatcgtgttcttcgtgtgcgggctgctgcacctgctggtgcggcacctgctgcggctgcaccggcagcggagggcgagggaggacgccgagagcgcgacggcgttcgaggggcagctgcagcagctgttccacctccacgacgccggcgtcgaccaggccttcatcgacgcgctcccggtgttcctgtaccggaacgtcgtcggcgtcggcggcgaggatggcaaggacccgttcgactgcgctgtctgcctgtgcgagttcgccgccgacgaccagctccggctgctgcccaagtgcagccacgcgttccacctcgagtgcatcgacacctggctcctctcccactccacctgcccgctctgccggaggagcctcctcgccgagctctcgccgacgtgcacccccgtcgtcatggtgctcgagtccgagagctcccgcgacatggtccacgccgccgacgatgagccagccgacgtcggtggcgaagacgcgccgggagcggaggaggtggtcgaggtgaagcttgggaagttcatgtgcgtcgaaggcaacgtcttcttcaacgtcaacgccatcgccggcgaaggggatagagccggcacgagcagcaacggcaatggcgacgccaatgccaaggctggtggtctcgggcaaagacggtgccattccatgggatcctacgagtacgtcatggacgcgcacgcctccctccgcgtgtccatcaagccgccgaggaagaagccggcggcggcggcctccaagtcgcgccgccgcggcgccatgtcggagtgcgagttcggcgcctccaagcgcggcgagtcctcgctccgcctgccgccgttccgcgcgacgccgcgcaagaaccccgacgacgacgcggccgcggccgccggcgcgaagctcgccaaggacagcttctccgtgtccaagatctggatggtgccgtccaagaaagagcccggcgccgccgccgagaggcgcgcggtgtcgttccggtggccggcggcgaaggactgggacgtcgaggccgggagctgcggcgggaacagcgccgtgtcgtcggtggcggcggaggagcggccgtcgttcgcgaggaggacgctgctctgggtcgtcggaggcagcaggcagctcagcagagtcgggagctgttcatgatcaccatttcgatcatcaaatctcaaaatgaaaccaaaaaaaaaaagatgattcctttgttcagttcttttaccccctccttttgcttgctaggttattggtagcgaactagcgattgcatccaacagcaagagaaattgtaaaacccatatgctacgaagagaagaaattttcctttc

SEQ ID NO: 25615 - DNA, 3868 bp, Oryza sativa
  ref <308>: DATABASE ACCESSION NUMBER: AK101057
  ref <309>: DATABASE ENTRY DATE: 2002-08-28
ttccgttattccagcattcgccgttgcgcttcagctcttctccctcccccctctcaaatttcccccaaattctcatccaccaccacgccgagacgccgaccccgccgccgccttcttctgaagcgtctccccgcatccacctccgcttctctcctcgctgctgccgacgcgagcgcggcgcggggaggcgcaggcgcaggcccatggctctctccgccggggacgtgcagttcatctactccgtcctcgccaactcgctcagcgccgacgcggccacgcggcagccggcggaggccttgctcgcgcagtgcgaagcgcgccaggggttctgctcctgcctcctcgcgatcatcacgtcgagaggggaggaatccgacgacgatgtgcggctgctcgccgccgtacaccttaagaactgcgtcacccgctgctggcggaacagcgtcgattcccctgccatagataatgaagaaaaggtctacattcgaaaaagtcttctgctaaatatgcgagaagaaaatgggaagattgcacttcaattggctgcactgatagccaggattgtatactttgattatccaaaggaatggtcagatgtcttctctgtgttggcacagcaacttcagacatctgatgtattcacttcatatcaagtgtctacagtcctattccgatctttgaagaaactatcaaaaaaacgtcttgctttcgatcagaggaactactctgagatcactgtctacttgtttgattatatctggaacctctggaagagcaatgcacagattgtattacaaaatttttcagtgctttctcagcataattccagtttggaccaatcaaatgatctactgttaatatatgaaagatggttagtctgtttgaagatcattcgcgaattgatttgctcaggttatgcaagtgattcaacaaccatgcaggaagtctgtcaaatcaaggaagtctgtccggtacttctgggtgctattcaatctattcttccatattatcccttcttcaaagaaaggcaagctaagccgtggagccatgcaaaaagagcatgcattaagctgatgaaagttcttattatattacaagacaagcagatacatcttttgaggaatttcttgtccagtgcatggttttggtgaaattagtattggagtgtcaggaatacaaaccaggtcaaataggctttgaagcagttggaagttcagaacatgcaatttttgatcaaaggaagaacaacctttcagctactgccagcagcatggtgatgtctgttcttcctgctgaccgtattatgctgctatgcgatatattaataaggaggcacttcatttatacagcaacagatatgaatgaatggcattccaatcctgaatcctttcatcacgagcagaatctgctacaatgtacagagaaacgccgaccatgtgctgaagcacttttcattattttgtttgacaactacggagtgcaacttgctccttttgttgcctccatcatccatgatgtcaaagctgtttcgcctccacttgaaatagaaattactgctggaatgcttttaaaggaggctgcttatacagctgctggccatgtttttgatgaactctcaaagtaccttagtttcgatgaatggtaagtttcttggtgtgtaataccttctgtatttactcatgctagataatatgcactggactagtagatgaacaatatagcctaattcaaatacatacaaaatgttaatgaacctaaggatccatgggtattcatcggtttctgtggctttcatgttatgtgaaagttgcatcgctacctttgctcctgctcaattatgcaggttctgtggatatctatctattgatctttcaaatggcaaccccaatatgtgcatcattcgtcgaagaattgcattgttacttggacaatgtgcttttgaggttccgttattaacttcaatattttccctcagatattaaacagaaattagaagcagagaacatgttaaatttcctacttgtgtgtctgctttaacataaaaaataataattctacagataaagggcgttattcagaaagaggtctgcgatgctttggttggacttcttggggatcaggacatggccgttaggctggcagcatgctcttccctatgttacgctttccgagtttttggtatttgggaagtagatttgcttgagtgtattcctacatgttgggcaatgtgtttcaagttgataggagctgttcaagaatttgattcaaaggtgcaagtcctgagttttattctggttctccttaattatgttggggacgacaggatcattccatttgtgagcgagctatcacaattttttctaaagacctgggaggaatcatctggtgaatgtttactacagatagaacttctagatgcaattcgaacttttatttcttctcttgggtataactctccactttgttatggcatggttcttcctatactccaatatggcatggatgttgatagtcctaacgctcttaatcttcttgaggacactgttttgttgttggaagcaactctttctaatgccccttccattgtgcctcaactgctggactgcttcccttatcttgtgggcatcatgaatgggagcttcaatcatttggagatcatgatcaaaataatagagcactacatagtttttgctggatcagatctcttgcaaagccatgccacaagtttagaaagcatcgttgatactattgtgggcaatgctgatgataagggccttctcacaacacttcctatcattgatcttcttgttctgatgtttcctcaggaagtcccacctctgatatcaagtgctcttcagaaacttgttttcatatcattgagtggtggtgatgagcattatccttctaggactgctgtttgtgtcacttctgcagcaattcttgctaggcttcttctgctgaatagagactttttagctcaactattatcagagccagcacttatagcaaggttccaacaagcagggataaaccagaatctacttcttcttttggttgattggtggattaacaaggtagataacgcaagctctatagagaaaaaggtatatgcaatggctctttctgtaattttgactgcaaatatacctggagttatcgagaaacttggtgatattctgagattatgtacaagtgttattattggaggacatgggaggactaccagtgatgattctagtgacgatacaatctcttcattgcctcttagtgatgatccagagtattccaatacgagtaaggaattcaagaaggcgcaaataagggagctggatcccattagaaaagcatcgcttgtcgacatgctaagagagaatttgaaagaatgtgcagctctgcatggtgatgcagtcttcaatgcagctatcagcaggatcgatcctttagtaattgcgcagttgtggcaggccctggagattggataatatgtgcaccatggcgattctcttcgccgttgtcccttctccgaacaaacacttcatcacaactcacaagccatacaatttgcatggacacatgtggctactacatcgtttttactgacattgaagtgtgctgttcgatagttacgacaccatggcaccttcaaaaaaacactgacgtccaaaatttagcatacataaaacactgactatctgacgtctcaaggatattcctttcgtagtgaatgtaacaagtatggggtagcatattcagggatagccgttttcttgataggatatactcccaaagtcccaatactcctagatcagatattgacatgttataggaaaccatttgaaaagagaacatatgaaaatgtatagaatcg

SEQ ID NO: 25616 - DNA, 3215 bp, Oryza sativa
  ref <308>: DATABASE ACCESSION NUMBER: AK101058
  ref <309>: DATABASE ENTRY DATE: 2002-08-28
gagagccactacaacattgttatgcacagatgcaatggctatcttccaccaaagctctccatgagatcccaaaaggtgacctccctaagggcggctggtttggcagtatgatctaacagaaaagcacatagctgaatagtgctatggcagaagctctgatactagtattgcttcaaaaaattgcaaccaccctaagaggagctgcacagaaggcaatcagctcacaattggggaaggaagccacccttttgtttgacgtggaaaatagcatgagagaagttgagtgtgaatttgatgtaatgcaggcctttataagtcaagtggatccatattgtacgaataaccaagtcttccaatcctggctaaagcatataagaatggttacctttgaagttgaggatatcgttgatgaatacgcctttctcctcggaaagatgaacggcacggaaagtttcctaaggaaaacactccataagtccaaaaaactcaaggtgtggtatagtgttgcttcccggcttagacaagtgaagagccgcgtccagaacctaacagtcatgaaagagagatatggcatcaagatatctgacaatgatggaacctcttcaggttgtaccgctaatcgccagatacactcttctaattcatcgtatttaaattatggtgatgatgatgacaatgcaatggtgggacaaaaagataacgtgcaaagactaacaaagcatctgaatgcttcaggcatggatcgttctatcattaccatccatggaatgggaggatctggcaaaacaactcttgcaaggagcatatacaggaagcaagacatcacaaagaaatttgactgtcatgcatggatcacagtgtcacgaaattaccagattgaagatcttcttatgagcatcatggataagcttaagattgggcatcgtactgatattaatcttgaagaaatggtgcaagcaatccacacttaccttgagaacaaaaggtaccttattgttttagatgacatgtgggatagagattcttggtcatgctttgaagatgcatttccaggagaagccaaggaagtaaagtcatcattaccactagaaacaaagaagttgccaaattagttgagttgcagggacatattatttcgctcaacactctcctaccaatagaatcatgggacctcttttgcaaaaaggcattctcaaaactgccagaggcgaaatgccctgaaggtctcatcaagcgtgctgaggaaattttggagaagtgcgaaggtttgcctcttgctattgtagctattggaagccttctatcttacaggggcattgaggaaaaggagtgggcatcattttatgatcaactaaattggcagctaacttataatccagagctcagcagggtctcaaatgtcctaagctcgagcttaaatgatcttccaacccatttgaagaattgtttcctgtactgtggattattcccagaagatcgtctaattaggcgtaagtggataatcagaatgtggatagctgaaggatttgtggaagatcgaggaacagagacaacattggaggaagtggcagaggattatctgaaggaacttactcaacgatcactgattcaggttgttgaaaggaatgaatttggaagaccaagaaggtttaaattgcataacatggtgagagaaattacttggatgatgtcaaaaaggcagaggttcgctctcatatgcgatgacccagatgtaacaagccttggtgatgcagtgcgccgtgtgcctgtacacaaaggaggccaacactttcagccaagtgcatcttggcagcagctgcgctcatttttgttatttgataagcacgtatctatttcatggatctgcaatgcttcatcaaatttcaggctattaagggtcctgtgcctaagatattcgctactgaaagatttcccaaatgccatagttggtctattcaatctacactatcttgatttgtcacggacaaaagtgaacaaaataccaaaatcagtggcaaggctcaaaaacttgcagacgctgcatctcaggcgtacatcagtgagtgagttgccatgtgagattacattgctcgcatgcctccgccacctgtctgtaagtacagacctatatggcacatcattttcaggcaatgtttatggtctcagatctttgcatactctcaaagagataaaagccagcaagaatttagtccaaaatctcagctacctgacacagcttcgaagcttgagtattactaatgtgctggcaaaccacaatagagacctttggagttccatcggaaagttgaaatttcttactaggctggctgtttcaagccgtgatgacgatgaagtgcttgacttggaaaactttagagctccccaatatctggagaagttctacttagatgccaagttggccaacaatgtgcttttccccatatctgggcattttcagaacctcaagctattgtcaatgcgcttctcgcatctagtgcaagatcctctcatttccttgtgtaaaatggcaaaccttgtttgccttgagctgaactgtgcctatgatggggaggcgttgaggttctgtgctgaatggttcccgaagcttaaacaactctccctggagaagctggaaaacttgaagtcaattgacataattgatggcaccatggttaacttaacgtatctcaaacttagccaactgtggaatttgcatgttgtgccgataggtcttacatatctgaagatgctccaccacttgtttgcagaaagtatgccggatgtcttcattaggggcttggcacgtgaggggtttcttaacaacagcattatcattgaatgcgtgtgagatttacctgatgcaatgtcttcatcttgtcctttgattcaaaattcttgttccaagtcaagcattaataggttataaatatcagcattgcatgtgtacacttattttgaaaatacttccataatctctctctcgtgctggctggtttctcacagctgatcggctcttctctcctttagctgatcttttttttttttttgtgacttccaagtaaggccaaggtgtggtgatagagggttgtgtggtctacaggtttgacaaagtggtgtgagctaaaaggcttgtggattatttgtgatgacttagtaaagtaggctatgtaatactgttcactgcagattaaatataatgttgattatcccttttg

SEQ ID NO: 25617 - DNA, 4115 bp, Oryza sativa
  ref <308>: DATABASE ACCESSION NUMBER: AK101059
  ref <309>: DATABASE ENTRY DATE: 2002-08-28
gaccaacctctctcctccccccccccccaactaccaaaatttcaaattcccgcactccctcctcccccctcgccgccggccatggacgccgccgacgagatggacatcgacgccgccgccgacgagacgggatcccagccctccgcctcgggatccctctccaccttcctctccgagctcgccgccctccaccgccgctcctccggtacctcctcctcctcctccacctccacctccccgcccctctccctcgcctccctcaccttcctctcctcggcggcgtccccctcctcctccatcttcccccgcctcgccgccgcgggcctcccggcctcctccctctccgccccgctcgccgcctccctctcctccgcgcaccacccgctccccgccgccgtcgcctacctccgcctcctcctcgccccggcctcccctctcctctccctcttctcgccgctccccttcctctccctcctcctcgccctccgcaagtcggcgtcgtcgtccgccgcgtcgcacgatgcggcggcggcggccaaccctagctccggctccggctccggctccggctccggcaaggggaaccaccggaaccggaagcggaagagccaccagcagcgtcagtcgccggcggcggccccgtcgctcctccccaggacgctcgcgctcctcgccgacgccgcggggaggctgccgctcggggagcacccggacgcgcggaggtcgctcgtcgacaccgccgcggagctcgccgccttcgatgtcctcgtcgccgtcctcggatctggctactacgccgaggcgatgcccgatttggtgcgcgcgctggcccccgtggcgctctcagggtccagatcggcggcgcgggcgtccgcggtggaattcttggcgaggaaggttgtgccgttgggtgtggagggaggggaggatggggtgaggaaggcggtgggttacctaccgaggtatctggcggcgaaggcgccggagaagtcggaggctagggcgatggcggtggaggccatagtcgaggtggtgcgagcaatggggcaattggagatggagggatttgctgggtatgtggtggctatggcgaaggggaaggcgaaagggcggctgcttgctgtggatttgatcttggcgatgctgccattgctgctgccatcggaaggggatgattgtggtctacaggagggttcttgggggctgaagtttgtccgggtgcttgtggagaggtgctcggatacggtgggaggggtcagggctcgggccttgacgaacgcagcccaggcgctcgacgttttgtctgaaagaggcatggaggttgaccggttgcaggaggtgatgaggatagggaacataggccttggcgagttgctgaggctgcggtgcgctgatgataaggctgctgtgaggaaggctgcgcttgtgctcattactaagtcaatcagattgatcgggaggcctgttgacgagtcgctactcagtgctatgggggctgcgtgctctgatccgctagtcagcatacgcaaggcagctcttgcagccatctcagaggtgttcaggaacttcccggatgagagggtaacaaaagagtggcttcaggctgtgccaccactggttattgatagtgagacaagtatccaagaggaatgtgagaatttgtttcttgaattggtcctgaacagggtctgtcaagctgccaatttgaatctaaatgatgattccaatgatatggaggaagtgtttcctaaagggacactggatttgctgaaaagtatctgtgatggagaggttgcaccatgcataaaaaagatatgtgcaagccttgggaagaagaaaaagctgaaaccactgcttgcaagttcattgcagaatatcataacaatatcagagtccttgtggttgagaggttgtaaaccaattgagatgtggactgcaccagccggggcatggtggcttctttctgaggtctcatcatttgcacctaaatcagttaactggaaattcctctcacaccactggaaactccttgataatgttggccaagataaaggcaaagttcgtcctaaaggggaaccaaattctgcattatgggctgtggatcgtgtttcactcttgcaaactatttcaaatgtttccatggagctgcctgtggaacctgcagcagaacttgcacacagcttgctcacacggattgaaaattttgacatgaaccttagtgaggttgatgctcatgtaaaatccctgaaaacgttatgcaaacgaaaagcaaaaacagctaaggagggcgaaacactgatcctgaagtgggtgcagcaacttatatgtaaagctgttaacattcttgatgaatacataaaggagacatcagaagctgctaagggtcctaaattttttacacctttgagtggaaaactcaagggaagaaaagatgcatctgcacaaaagtcaatgtcacatgcagttattgctgtattcaccattggatcgctgatcctagcttgccccactgctaatgtgcaaggcgtcattccttcgctgcacacaatcataacatctggaaactctcagccaagaccaaaaaatcttgctggtgggactgtttctttcaaagagctagctccatctttatatatacagtcctgggatacaatggctaaaatatgccttgtggatgacaaacttgcgaaaagatatattccactttttgttcaggaacttgagaggagtgatttggctaccctccggaataacatcatgattgcactggcagacttttatgtccgttataccgcaatggttgactgttatatgtcaaaaataacaaaatcgttgcgtgatccctgtgaggtagtgaggaggcaaacatttatcctactctcaaagttgctgcagagggactatgtaaagtggagaggtgtgctcttccttcggttcctgccatctttagttgatgagtcagagaagataaggcatttggcagacttcctttttgggaacatcttgaaagctaaagcgccactccttgcatataatagtttcatagaagctatctatgtcctaaacaattgcttgggtaatggtgcgcaaaccgaatctcagggaaggttggacggaggaccaaccctttttgcaatacgaggcactgacgaaaggtcgaggtcgaaaagaatgcacatatatgtatctctgctgaagcaaatggcaccagagcaccttttagctacgtctgccaagttatgtgccgagatcttggcagctgcttgtgatggcttgctcaatgtcgatgatgccgctggaagggctgtacttcaggatgctctacaactactggcatgcaaggagatgcgcatccaccccaacatttgcacggacaattccgagatggatgaggaatgcggcgatggcgggtcgtccaatgccactctccaggcggcgaaagggagagccgtcacccaggtggcgaagaagaacctgatccagatcgccatcccgatcttcatcgagctgaagcgccttctcgagagcaagaacagcccgctcaccggctgcctgatggagtgcctgcggaccctgctcaaggactacaagaacgagttcgacgagatactggtggcggacaagcagctgcagaaggagctcctctacgacatgcagaagctcgacgtcgccggcaagggcaaggccaaggccgcagctgctgcggaggctgggccaagcggaggcctcgccggcggtgaacggtggcggcaagagggcggcggacggctcggcgagggccacggcgaggtcggtgctcaaggaggtgaaccggaacacgccgacgccgccgctgaactcgatgagcgtgcccaaggtgaggtccatgctgggcgtcggctcgcgccggcccgctgtgctggagtcggtccggcggcttgagccgtttgggtccgacgatgagaattagcgtgccatatggcagaagctttaggttggcctgatggtcagtattaggctgtgtttatgatgctaactttgaccggtttaggagaaaattacaagctcagtttctcgctgacggttttgtacatggagtatatatttaacgcattttagtgatgttcagagagatg

SEQ ID NO: 25618 - DNA, 1193 bp, Oryza sativa
  ref <308>: DATABASE ACCESSION NUMBER: AK101060
  ref <309>: DATABASE ENTRY DATE: 2002-08-28
gtttcctttttatccgacgattcaaaaaattcgaagccatccaccaacgaagaaaaaaaaaagggagaaaaaaaaatccacgcacactttgcgtgcgaggcgaggcggttcgattcgagaggagagagagagagagagagagagagagagatggacgccttctactcgacctcgtcggcgtacggagcggcggcgagcggctggggctacgactcgctgaagaacttccgccagatctcccccgccgtccagtcccacctcaagctcgtttacctgacactatgcgtcgccctggctgcgtcggcggtgggcgcatacctgcacgtcgccttgaacatcggcgggatgttgactatgctcgggtgcgtggggagcatcgcctggttgttctcggtgcctgtctttgaggagaggaagaggtttgggattctcttggccgctgccctgctggaaggggcttcagttgggcctctgatcaagcttgctgtagactttgactcaagcattctcgtaacagcatttgttggaactgccattgcatttgggtgcttcacttgcgctgccatcgttgccaagcgtagggagtacctctaccttggtggtttgctctcttctggcctctccatcctgctctggctgcagtttgccgcatccatctttggccactccaccggcagcttcatgtttgaggtttactttggcctgttgatcttcctggggtacatggtgtatgacacgcaggagatcatcgagagggctcaccacggtgacatggactacatcaagcacgcactcaccctcttcactgacttcgtggccgtccttgtccggatcctcgtcatcatgctcaagaacgcgtctgacaagtcggaggagaagaagaggaagaagaggtcttgagagcttctcttcccgctttgcacataagaaaaaaccaccgcggctattgcctctacgtattatgacagagccgcacttcaactgggttttatggtgaatacaagttcttttgcattttgttgatacggtgtgaatcttctcaggtttgtcgtcgtagtagctttgcaaatactagcatgctacatgacacggatctttctgtaatggtggtcgcgttgatcgaaacgtgaaaacacatcttcatttgcgactaatttgtttgccttttggtgattgatgatgatcctttcccc

SEQ ID NO: 25619 - DNA, 4540 bp, Oryza sativa
  ref <308>: DATABASE ACCESSION NUMBER: AK101061
  ref <309>: DATABASE ENTRY DATE: 2002-08-28
gcctccctctgactctctccccgtcgtcgtcatcgtcatcgtcgttcgtcgtcgtcgtctcccctttccacggccgcatcccattccccacccaacctgaaagcgacgccgccgcagcgcacacgcaggaggcagcagcaaagcgaggaggggaggaaaccctccccccgcgacagcaacgggcggtcgcttccagtgacctaagcctccccctccccccctcgcgcgcgcttccctccccttcgcctttttgtctcctccgccccttatgacctcttcctccgccccaaaccctagccccctcgtccccacccccaccccctctccccccaccgccaacgccgccgccgccgccgccggagccgtgcccgtctcctcgccgacgccgccgcccaaggatcagcagcaggagggccaggggggtggaggaggagtgggggatgggggtggagtggaggaggtgggcgtagggggaggcgaggccatggaggtggatggtggcgcgggaggtggtggtgggggggttggggatgtggaggggggtgggggtggtggtggtgcggggggaggaggaggtggaggtggaggtgggcagcaggcgtcgccggcgaccgtgttccggatccggctcaagcagccgccctcgagcctccgccacaagatgcgcgtgcccgagctctgcaggaacttcagtgcagttgcttggtgcgggaagctcaatgcaattgcatgcgcatcagagacttgtgcacgcataccaagctctaattcaagcccaccattttggattcccatacacattctaaatccagagagaccaacagaatgttctgttttcaatgtgaaagcagattctccacgcgactttgttcaattcattgaatgatctcctcgatcatgccctcgtgcattactggtggcaaattttcatggaaggattactatatggacacagccaactaagggtcctactaatcttgtacgtgatgccagttcctggcaatgtgaacacgaatggcgtcaagatctttcggtggtgactaagtggttgtcaggaatttctccgtatagatggcttcctgcaaactctagtacttcatcaaacttgaaaacctttgaggaaaagttccttacccagcagcctcaaagttcggctgggtggccaaacattctatgtgtctgttcagttttttcatcgggttctgttcagcttcattggtcacaatggccttctcaaaactcagcacaacctagatggttttctactagcaaagggcttttaggagcagggccaagcggcataatggctgctgatgctattattactgaaactggagcattacatgttgctggtgttccccttgttaatccatctactgtagtggtttgggaggtgatgccaggccttggcaatggtattcaggcaactgcaaagataaatgcaacaagctctcttcctccatcactaaatcccccactctgggctggttttgctccacttgcatcttacctcttctctttgcaagactaccttgtttccgagggcgcacagacaaaaaaacaggcacaggtagataatgagaccactgaggtagcatcgatccattgttgtccagtttccaacttttcagcttacgtcagtcctgaagctgctgcccagtcagccactaccacaacatggggatctggggttacctcagttgcttttgatcccactcgagggggatcagttattacagttgtaatagttgaagggcagtacatgtctccttatgatcctgatgaaggaccttccatcactggatggagagtccagtgctgggaatcttcagtccaacctgttgttcttcatccaatatttggaagccctgcaaactttggtggacagccacctacacagactgtttggtccacaagagttaacaaaagcatcccaccatctgaggaccttaagaaccctcaatcatatgttccaatgccaacaacttcagatgagcggagttcttctgagtgcagtgttgacagggcgaaccgacttagctttgacccttatgatcttccaaatgatgtcagacaattggcccaaatagtttattctgctcatggtggtgaggttgcagttgcattcctgcgtggaggtgtgcacattttttcaggtccaaactttgaacaggttgatagctatcatgtcaatgttggctcagcaattgctccaccagccttctcctccagtggttgttgcttggcatcagtatggcatgacacactcaaagatcgaaccatactaaagataatacgtgtgcttcctcctgcaattcttaatgctcagacaaaggttagctcagctgtttgggaacgagcaatagcagatagattttggtggagtctattggctggtgtggattggtgggatgctgttggctgcacacaaagtgctgctgaagatggtattgtctcactgaacagtgtgatagctatgctggacgcggacttccattgtcttccaactatacaacagaggcaacaacactgtcctaatcttgataggataaagtgtagattgttggaaggaacaaatgctcaagatgtcagagcacttgtgttggacatgcaagcaagattgcttctggatatgcttggcaagggaattgagtctgccctgataaatccatcaactctgctacctgaaccgtggcaagcttccagtgacatgttatctagcattgggcctgacaaaatgactgttgacccagctctacttttaagcatccaggggtacgttgatgctgttctagatttagcgtcacattttatcacacgcttgcgacgctatgcgagcttctgccgaactttggctagccatgcagttggagcatcttctggttcaggcaattctaggaatatggttacaagtccaaccaacagttctccttcaccttcaactaaccaaggtaatcaaggtggagtagcgtctacaacggggagctcacaaatgcaagagtgggtccaaggtgccattgctaagattagtaacaatactgatggtgctgcaaatgctgcaccaaatccaattagcgggaggtcatcattcatgcctattagcataaatacgggaacattccctggcacaccagctgttagacttattggggactgccatttccttcatagattatgtcagctgttgctattttgtttgctttttcggagaaggcaatctccaaggatacctgcaaatgcacaaaaaagttctgattctagcatgcagaaacaacacttgatgaacagtaagacagaggataatactttggcagtcagatctggtctaggtgctgccaaattggaagatggcacaacttcacgtggacagatggttggagcaaagggtgctgaagaaaatccagtgggcaacaaatctgctaggataggttctggcaatgctggccaaggttatacttcagacgaggtgaaagtcctttttctcatattagttgacctatgtaaacggactgcaaccatgcaacatccgttgccttcttctcaggttggttcgagcaatattattataaggctgcattacatcgatggcaattacactgtgctccctgaggtagtggaagcatctcttggccctcatatgcagaatatgcctcgtccacgtggagctgatgctgctggccttctacttcgagaattagaactgcagccccctgctgaagaatggcatagacgcaacatgtttggtgggccatggtcagaaccagatgatcttggtccattggataatacgcgacagctaaaaatcaatggctctaccaatcgccacttatcggacatggaagaggatggcgacagctcctttgggattcaaaatctttggccaagaaagcgccggttgtctgaaagagatgcagcatttggtctgaaaacatccgtggggctgggatcttttctaggtgtgatgggttctcggagagatgttattacagctgtgtggaaaacaggcctcgaaggtgaatggtacaagtgcatacgatgtttgaggcaaacctgtgcatttgctcagcctggtgctctagctccgaacacgtcgaatgagcttgaggcatggtggatcagccgatggacccatgcttgcccaatgtgcggtgggacatgggtgaaagtcgtttgaatttgacgcctccgggcgacaccttcaccgtactaaccactctgccaatagctttctcggccaaatctgtgtaggcgccatcggtttttggacaattttgtatctaactttagattgtttggtctcaggccctccctggtatggtatcatagtttacctgcagcagtcagagcagattgcaccagcagctgtgtaaaacggtaggaaaaaacaggattaggacatgcccaaacactgtcagagtcagcagttgtgttgtgcgatccttttgtacataaatgtagtgtactaatttgcaacattggaaaagaaactccgttagatactgcttgatgtcaataatatttgctggtgattgaaaagacc

SEQ ID NO: 25620 - DNA, 1357 bp, Oryza sativa
  ref <308>: DATABASE ACCESSION NUMBER: AK101062
  ref <309>: DATABASE ENTRY DATE: 2002-08-28
gtctccccttcctcttctcccccctccctctcctcgtcgtctccaccaccaccatctccgtctccactcgatcgatcgatcgatctccataggtgggggaagggaagctttggaaggtggagggacggagggggggatgacgaggcggtgctcgcactgcagccacaacgggcacaactcgcggacgtgccccaaccgcggggtcaagatcttcggggtgcgcctcaccgatggctccatccgcaagagcgccagcatggggaacctctccctcctctcctccgccgccggatccaccagcggcggcgcctcccccgccgacggccccgacgccgcccccaccgccgccgacggctacgcctccgacgacttcgtccagggctcctcctccgccacccgcgaccgcaagaagggtgttccttggactgaagaagaacaccggaggtttttgcttggattgcaaaagcttggcaaaggtgattggcgaggaatctctcgtaatttcgtggtctcaagaacacctactcaagtagccagtcatgctcagaaatattttatacgccaatccaatatgaccagaaggaaaagaaggtctagcctttttgacatggtgccagatgagtctatggaccttccaccacttcctggaggtcaagaaccagagacccaagtattaaatcaaccagcactacctccaccgagggaggaggaggaggtagattctatggagtcagatacttctgccgttgcagagagctcttccgcttctgctatcatgccagataatttgcagtcgacctatccagtgattgttccagcttatttctcgccctttttgcaattctcggttcctttctggcaaaatcagaaagatgaagatggtcctgtgcaagaaacacatgagattgtcaagcctgttccagttcattcaaagagcccaatcaacgttgatgagcttgttggcatgtcgaagctcagcataggagagtccaatcaagagacagtgtctacttctctttcattaaatctggtaggaggtcaaaatagacaatcagctttccatgcaaatccaccaacaagggcacaggcatgatctccttctgcacacaactgcatttagatgaatcccaggcaaaataagctttgcctccttgtttttttgtttttattttaagattaaccgttctccgtagtctgtatcatgtgctgtaagttatgctatgtatgaatgtatctgttgtttgtctggcacacatgataaatcactctatgttaacaaaatcagtaatggtagtgctgatcttcgtggttgtactgttgtaaactcttttataagaaaaaaaaatattagttagcc

SEQ ID NO: 25621 - DNA, 2141 bp, Oryza sativa
  ref <308>: DATABASE ACCESSION NUMBER: AK101063
  ref <309>: DATABASE ENTRY DATE: 2002-08-28
gaatctctacttgctgctgcttctgcttgcgattgcgagctctctcctctctctctgtttttttttttttttggcttgcaaagcttttgctttgttttaggtgcttcttttccactcctttactgttcccccacttttccttgctttgtcacgcacacgaaaagctcctgcctttaccttatctccgctcgccttccctcacccccgtcgtagtgggatttggtggctgctcgcctctcgcgtttcttttgctggattggggcgttcttgggagctcgggaattcgggtggtttggttgggtttcgtggagaattgcggcagatctttgagatgaactgcgggccgcccgaccagttgccgccggcgacggcgccgtcgtgcttcctcaacctcaactgggaccagtccatggacgcggcggcgggagggcacctcgacccggcgctcagctccatggtgtcctcgccggcgtccaactcgacgggcgctctccacgggatctcgccgcagccgcactacggtggcgggacgccgctcagctcgccccccaagctcaacctgtccatgatggggcagttccaccactacgccgcgccgccgcaggtgggcggcggcggaggcggaggcgggggcctgccaatcctcgagaacctgatgcccatgggccacctcgaccagttcctcgccgaccctggcttcgccgagcgcgccgcgaggctctccggcttcgacgcccgcggcggcggcggaggaggaggctacggcggcgccggcccggcgcaattcggcctccctgacgccggcgcggccggcgcatcgaaggagatggagctcgggaacacccgggacgagtcgtcggtgtctgatccggcgcccggcggcgccgagattccgcccaagggggcttccgacggcaatgcacggaagcggaaggcctccgggaagggcaaaggcaaggacagccccatgtccacctccgccgccaaggaggattccagcggcaagcgttgcaaatcgacggaggagagcaatgcggccgccgaggagaattccggcaaggggaaggccgcgcagagcaacagcgagaatggcggcggcaagaagcaagggaaggacagctcgtcgaagccccccgagccgcccaaggactacatccatgtccgcgcccggcgcggcgaggcgacggacagccacagcctcgccgagagggtgagaagagagaagataagccagaggatgaagctgctgcaggatctcgtgccgggttgtaacaaggtggttggaaaggctgtcatgctcgatgaaatcataaactatgtgcagtcgttgcaacggcaagtcgagtttttgtccatgaagttggccactgtgaatccccagctggacttcaacaatttgcctaacctccttgctaaagatatgcaccagtcatgcagcccgttacagagctcacattttccactagagacctcaggtgcgccgctgccctacattaaccagcctcagcaagggaaccctctcggttgtggcctgacgaacggcatggacaaccagggttctatgcacccattggacccggcattttgccggccaatgggctcgcaccatcctttcctcaatggggttagcgatgcggcttctcaggttggtgctttctggcaagatgatctccaaagtgttgttcagatggatatggggcaaagtcaggagatcgccacctcttccaatagctacaatggatcgttgcaaacagtccacatgaaaatggagctttgacatgaccaaataaaggttcgatccaaagctctgacgcccattgtacatacagagaagtcagcttgccgcggcagcactctgagattcaaccctaacaatgttgggccctagcagtgttttagcttctaatttcccatcttggtgtaatgattctttgaacaaaaatgaaacgcaccatgtacggtagtcgggtgtagtatatatatgtatgctacaagatcgtacataagtcgggtgcagtatatgatgcttcattcagacccttttaccctctcaagcagagagggacgacgtgtaatatcattatttgtattctcattatatttgtagctgatatatatctttaagatccttcttcctgtcc

SEQ ID NO: 25622 - DNA, 1762 bp, Oryza sativa
  ref <308>: DATABASE ACCESSION NUMBER: AK101064
  ref <309>: DATABASE ENTRY DATE: 2002-08-28
ggtctccatctctcctctctgctctagcgtgggcggagaacacgaggcgtggccgcgtcgtcgtcggaggagggagcagagatggacggccgcaaggatgtcgggatcctcgccatggatatctacttcccgcccacctgcgtcctccaggaatcgctcgaggctcatgacggcgccagcaaagggaagtacaccattggtctcggccaagattgcatggccttctgcagtgaggtggaggatgtcatctcgatgagcatgacagttgtcacatccctgctgaaaaaatacaaggtcgatccaaagctgattggtcgattggaggttggcagtgagacagtcatagacaagagcaaatccatcaagacttggctgatgcagattttcgaggaatgcggtaatactgacattgaaggagttgattccagtaacgcgtgttatggtgggacagcagcgctgttgaattgtgtgaactgggttgagagtaactcctgggatggacgctatggccttgttgtttgcacggacagcgcggtttatgcggaaggcccagctcgtccgacaggtggtgctgctgctattgcaatgctcattggtcctaatgctcctattgcattcgagagcaaatacaaagcttctcacatggctcacgtctatgatttctataagcctgatcttgcaagtgaatatccggtcgttgatggaaaactatcccaaacatgctacttgatggcgctagactcatgctacagacagttttgtaagaagtatgaaaagctggcggggaaacaattctcaatttctgatgcagattactttgttttccattctccatacaacaagcttgtgcagaagagttttgctcggcttcactataatgatttcacgcgcgactgcagctctgttgacaatgatgctaaagagaagctccagcctttctcaaatttgactggcgaggagagctaccaaagtcgtgacttggaaaaggcttcacaacaagtagcaaagcccttgtatgacatcaaagttcaaccatcaactttgcttccaaaacaaattggtaacatgtacacagcatctctttatgctgcgttggcgtctgtactctataacaagcatgctagtctggatgaccaacgaattgttatgttctcgtacggcagtggcttgacatccactatgttttcgttgaaacttaacaatggccaggaccccttcagtttatcaaacattgcttcagtgcttaatgccacggagaagcttgagtcaagacatatgaccttgcccgagaaatttgtggagacgctgaagctgatggagcaccgatacggcgcaaaagatttcgagacgtgcaaagacacgagcttgttgcctcctgggacgttctacctcaccagggttgactccatgtaccgaagattctatgagaggaaggccgacgaggagatcgctgcagccaaagccaagtacagtaatggacatgccaccaatggctatgccaatggccactagtggcacgcatggcatgatggctgctgctgatattgatttctggtttgataagttcatgattaggtgtttccagcctagtgtagtagtttctcaaataagtgttctccacacctgttatccatatctcctctaatttttttgtattgaatcagacagactagtgagacatttctgtagtatcaatcattcttgtttcttctagcttgtgtttctgctgtcacttgaagttattactatggactagtttagc

SEQ ID NO: 25623 - DNA, 1705 bp, Oryza sativa
  ref <308>: DATABASE ACCESSION NUMBER: AK101065
  ref <309>: DATABASE ENTRY DATE: 2002-08-28
gttggccgctctctcctcaccgacggcatctccagcagcacgggcattccggcgccatgggtcggcggctgttgctgctcttcctaatgctggcacaggcacccaattccaatggggattccaagataaagaacgtggtggtgttggcgctggagaaccggtcgttcgaccacatgctggggtggatgcagcggctgctgggcctccccatcgatggcctcaccggcgcagagtgcaacccggctccaggaccaggtccagccgactccctcctccactgcgtctcccccgacgccgacctcgtcgtccccgacgaccccgcccacgccttcgaggacgtcctcgagcagctgctggggttccgacccaatgactctactggcgccgccgcctccccctcagacatgtcgggcttcgtccgcagcgccgtctccgtgagcgcgctcctgaccgacgccgtcatgcgggggttcaccccgtcgcggctcccggccttctccgcgctggcctcctccttcgcggtgttcgaccgctggttctcctccatcccggggcccacgcagcccaaccggctgttcctctactccgccacctcccacggcgccgtcgcccacggcaagtggaacctcctccgcggctacccgcagcgcaccatctttgactccctcgccgccgacgccctcgactaccgggtctacttcaagaccatccccaccaccctcttctaccgccgcctccgcaccgtcgccaacgccgcccgcggcaccttccgccgctacgacgccgccttccgcgaccacgcccgcaggggcctcctcccggcgctctccgtcatcgagccacgctacttcgacctcaccggcacgcccgccgacgacgaccacccggcgcacgacgtcgccaacggccagaggctggtcaaggacgtctacgaggcgctgcgggcgggcccgcagtggaaccacacactgctcatcatcacctacgacgagcacggcggcttctacgaccacgtcccgccgcccaatgtcggcgtccccagccccgacgccatccgtggcccgctgcccttcttcttcaggttcgaccgcctcggcgtcagggtgcccaccatcatggtgtcgccgtggatcaggaaagggacggtggtggggaggccgccgggagggccaacgcccacgtccgagtacgagcactcctccatcccggccaccatcaagaagatattcaacctcagctccgacttcctcaccaggagggatgcgtgggcgggcaccttcgagcacctcttcacggacctggacgagccaaggacggattgcccggagacattgccggagatcccgccgccatcttcctcgtcgtcgtcgaccaagaaagaagacggaggatggctgtcggacttccagcgcgagctggtgcagctggcggccttcctcaacggcgactacatgctgtcaagcttcgcacaggagtacgagtcgagaatgacgatgacggtgaagcaggcggatgcgtatgtgaggcgagccgtcaaaagtttcctggaggccagcaagcgggccaaacgcttaggtgcaaacgactccgccattgtaaccatgagaccatccctcactactgcaaccacctgctgcccttagttacctactgtagtacactaaactagtctctttattaatttaattaattacctaccttagct

SEQ ID NO: 25624 - DNA, 1935 bp, Oryza sativa
  ref <308>: DATABASE ACCESSION NUMBER: AK101066
  ref <309>: DATABASE ENTRY DATE: 2002-08-28
gcggcagaaatattggctgcaacttcaacaaccagatcatcagatcacgtagcaagaatagtttcagaattcagagagagagagagagaggtgattgatgggcagctcatcagggctagtggactggagggggaggccggtggacaccaagaagcatggaggtgtcagagcatccatcttcatccatgcgatggtgctgttgaccaacgcgcccaacatcgccaacatgatgaacatggtgagctacctgcggggcaccatgcacatgggcgtggcgcaggcgtcgacgacggcgagcaactacttcgccgcgctgcagatgttctccatcccggccgccttcctcgccgactcctacctcaagcgcttctacaccgtcctcctcttcgcgcctatcgagatcataggctacatccttctagcagttcaagcgtacaccacctcgctgcacccgccgccgtgcagcccggcggccacggcggcgagcgccaccaccacctgcgagccggtgcgcggcgcgaacctgagcctgctgctgctggggctgtacctgatcccgatcggcgacggcgcggcgagggcgtgcctgccggcgctgggcggggaccagttcgacctgggcgacccggacgagcagcggcaggagacgagcttctacaactggtacaccttcgccgtctccaccggcggcttcgtcggcctcgtcttcatcgtgtgggtgcagaacagcaaggggtggggcgtcggcttcgccgtctccgccgccttcgtcgcgctcggcttgctcgtctgggccgccgccttcccgctctaccggaaccagctgccgatggggagccccatcacaagagtattgcaggtttttgtagcggcattcaagaaaagaaacgtccggttgccggagaatcccagcgaattgaagcaaattaaccaagatgacgatgccaatgcccacgaagttctccccaaaacagatggatttcggtgcttggagaaagcggcagtggaaactggcaatgacgctgggccatggtctctgtgcagcgtgacccaggtggaggagaccaagatcgtgctgcgcatggcgcccatcttcgtggccgctgttctcagctacatcccggtgccgctgctcctcagcctcaccgtgcagcagggcaacaccatggacaccaggctcggcgcagtccacatctcgccggcgacgctgttcctcatcccgaccgtcttccagatggtcatcctcatcatctacgaccgcgccatcgtgccgccgctgcgcaggctcacgggctacgtcggtggagtcacccacctccagcggatcggcatcgggttcgtcgctactatcgttgccaccgcaatcgccgcggtggtggagacgaggaggaagatgaccgccgaggagagcgggctagaggacgccaccactgggatcccgctgtccgtgttctggctgacgccgcagttcttcctcattggcattgtcgacgtcacctccttcgtcgggctcctcgagttcttctgcagcgaggcgtccatggggatgaagtccatcggcagctccatcttctactgtatcctcggtgtatcagcatggctcggcagccttctcatccaggtcacgaaccgtgtcacccagcgaaccaacggcggagggtggctggatggggccaatttgaacaagggcaagctcgaccggttctatgtcgtcctctgcatcatcgaggtggtggcgctggtgatctacgtgttcttcgcgaggaggtatgtatataggaatgaccagagggttgtggcccaagagcagaggaagggtgacacggggaatggtatggctgtgatctaaacttgaaatgaaatgagtcgtgtttatatttacatggatgtaacgatatatatggtagtaatagtaaataatttggtggtacgagg

SEQ ID NO: 25625 - DNA, 2381 bp, Oryza sativa
  ref <308>: DATABASE ACCESSION NUMBER: AK101067
  ref <309>: DATABASE ENTRY DATE: 2002-08-28
ggagttccgatctggttcgacgacgacgacggcggcggcgagggaggaaggcagatctgaggagatccgacggcgggggagaagggggagatggtggtgaacagccggccgctgaagagggcgaggacgcgggtggaggccagggacttcgctgggttcccgccggcgggggacggcggggctgccgggacgttccgggaggcggtgagggggttcctcgcgaggtacgcgcggctgctgcctctcccctctatcttctcgccggcggccgccgcggcaccgccgcatctgttgacgtggagggtgtcgctgcgggtcggcgaggagggggacgaggagggcggcggcggcgccgtggagctcaacgtcgttgaggaggatgtgctccgatcgcgatctgtgtattgtgaccagtgcagagtcgtgggatggagtggtcacccggtctgtgggaagcggtaccatttcatcatcgagaacgacaacaaccaggtgtgcggcaagcgccacagctgctgcctccgctgcgggactcccacagtcgctggagaatcaagatgcctcctatgcaactttgatatggatggcgaggagctggaggagtgcgggtacatgcatctggacgacaacacccacctgctgcacgctgtggtgcatgcaaatggttatggccaccttctgagggtaaatggccgtgaaggtggctcaagatgtctcacgggccgtgacataatgagtttctgggatcgcttgtgcaaggtgctacatgtgaggaaagtaactgtcatggacatatccaagaagcatggaatggaatacaggcttctgcatgccatcacaagtggccatccttggtatggtgaatggggatacaagtttggcgctggtagctttgcactaacctcagatacttaccaagaggcagtggatacgctttccggtatacaactcgcgttgtacttctcacatcgccagcccattcggacccctctgcagaacacgattgctctgtactgggcactctctgatcgccagcttgtgactgttcgggacctcttccggttcataatgcacctgcttcatcaagcacgcaagaagaacgagacatcaaaacccacaactgatgaacacaaagaagttgcatctaatgtgctctgcaagtggacaaaggaagatattgatcgggcagaaactgcaatgctcaaggtcctacgggttgttcagcctggacagtgggtatcatggcgtgcacttcggggagctgcatcgaaggctgttgattcacaggagctacttgactattctcttcgaggactgggtggaaaactgatggacgatggccatttcatagctgtccgctgcaatgctgagacgagtgcaattgaatacaggctggaagataactccaaccagtcagttgatgcggctgcgtttgggccttctgttgatcatcttctgcacgatctgaagttcctctataacgctttgctgaacccagaaaccatgttggcttcacagccagaggttataggtgcatcatcacacagtgcagcagcaaagattctcgactgcaagcagttcatcaaacattacgatcagcacaccccacgggctcctttgaacccattcctactttctgtgaggtgttccattgaacttcttgatcacccaaaagactacactgcaccaccggtggaactagtgcttttaccagcaagtgctacccttgctgaactgaaaatacaggctacaagggcctttcaagaaacatacctcatgttccaaagctaccaggttgaacagctccctgacttcccaaattttagtgacacaaccctcgtgaagcatgtgcttggctcaagccagctcgtgagggtaagaggaaggtgcactggggataaccgaagaattgtgcaattcaggatggaaagggggttggagaactggacggtcgactgcacctgtggagccaaggacgatgatggcgagaggatgcttgcatgtgatgtttgtggagtttggcaacacaccaggtgttcagggattagtgattttgatgatgtccctgagaagttcatctgcaggaagtgtgctagtccacgcagaggaaagggtcgtggtggtggaggtggcaatggtggtagcagaatggatgtgagcgctgcagggaggtgcaaggatgagataggatcatctgttggcggtgcaggcaaatttgggcgcatggcaactgttggatgactgtacataatgtgtgaaatgtaaatactgaggggagagtggggagtagcacctgaggcctgtgtgaaccttcatggaatcttgtctttctgaccagtgatatgatgttaatctatcctccttggaagcaatcctttctc

SEQ ID NO: 25626 - DNA, 2200 bp, Oryza sativa
  ref <308>: DATABASE ACCESSION NUMBER: AK101068
  ref <309>: DATABASE ENTRY DATE: 2002-08-28
ggccggtcccgaccgaaccacaccggatgacgcaagagccgacgtcactcctccccgtctgggcgcgggcgccaacgcggaggcccaagaccacacggcgccacccgctccacctccacgaagcagccatggaggaagaaggcgcagaccaccggcccccctcctcctcctccggcggccgcggcttcctctccggcctctgcgccgccgcgctacgccgcaagcccatctccgcccacgcggcccacgccgcctccggcgagggcctcgtgcggcagctcggcgtcttcgagctcgtgctcctcgggatcggcgcgtccatcggcgccgggatcttcgtcgtcaccggaacggttgcccgcgacgccggcccaggtgttacaatcagttttgttcttgctggagccgcatgtgtgctcaatgccttgtgctatgccgaactcgcatctcgatttcctgctgtggttgggggagcatacttgtacacgtatgcggcgtttaacgagctcaccgcgttcctggttttcactcagttgatgcttgattatcatattggggcggcaagcatagctcgtagcttggcaagctattttgtccaattccttgagctaattccattcttgaagggccatattccaacttggataggtcatggagaagagttctttggtggtgttgtatcagttaatatattagctccaattcttctcatcatcttaactacaattctctgctatggggtcaaagaatcatcagcagtaaatacccttatgactacattgaagatagtgattgttatagttgttgtatttgctggtgtctttgaggtggatgtatcaaattggtcaccgtttatgccaaatggtttcaaatctgttgtaaccggagctacagtggtctttttcgcatatgttggatttgatgcagttgctaattctgctgaagaggccaaaaaaccacagagggacttgccgataggtatcctagggagccttctagcatgcgtcttattatatgttgctgtatgcttggggattactggaatggtgccatatactttacttggtgaagatgctcctttggctgaggcttttgctgctaaggggctgaaatttgttactgtattgatcagcatcggagctgttgctggtcttactacaacacttcttgttggtttgtatgttcagtcacgtttgtatcttggacttggaagggatggattgctaccttcaatatttgccaaagtacacccaacgcgtcatactcctctgcattctcagatctgggttggttgtgttgcagcagttttggctggtctctttaatgtgcatgaactctctcatattctctcagttggcacgctgaccggttattcagttgtatcagcttgtgtaatcacacttcgatggaatgacaagaccaccagttgtcactcccttggaaatatgtcaatctggcaggagggtgttctatgtcttgtcataattgctctttgtggtttcgtagcaggaatgtgctatcggtttagctatgccattgccttcatgataatagctcttctcatagctgttgctgctggttttgctctccagtttcgacaggtatatgtggatccacctggcttttcttgtcctggagttcctattgttccaatggtctctgttttcttcaatatgcttctctttgctcagctgcatgaagaagcttggtatagatttgtcatccttagtctccttgctgtgggtgtctatgccggctatggtcagtaccacgcagttccttcaagttcagaccacccacacccggccgttgcttatcatggaattccttctgaagctccatgagctactgcaatttgcaagcctccggcttcatcccaaaattcatgtgcaatacatctgggtagcctggggcctattattttccccagctggaatattaaacctcgccttgtcaccatgcatactccatagttccacaccgtacactgtaaatcgccagtcttaaacgaagatattttagctggcatcataccaatataccattcaccatagatgccaaaaggacagacaagttgccctcctgtatctagaaagaaggaatctagcaaagtagtagcaattttttgtcacttctatgtgctgaaatgaaccttttgatatcacttcttatgggtgaaggatagatgattgcgttgctc

SEQ ID NO: 25627 - DNA, 2416 bp, Oryza sativa
  ref <308>: DATABASE ACCESSION NUMBER: AK101069
  ref <309>: DATABASE ENTRY DATE: 2002-08-28
gaatctcctccgcttcctccgccgcctcggcgcgaaggccatcgccggattccccgcttcctccgcctggattgctccgcacgcaatcggccctggtttcttcccggcggcgtggtcgtcgctgttccccacccgccgccggcgccgccgcagccggcgtctgagttgagggaggagggaggaacggcggcgcaatggcggtggctgcggcgctgctgcgccggagggcgctctattcggccctcgcgtcgccctcttggctccatgataccagttcctgctacatttgctccatttctggtacacattctttggtcaaccatcccaatttgagattacagaggggctaccacaactctgggaagtttgatttgaccgacttgacccatcctcatatatggtatccgaatgcccgagaaaagaagcgcaatgtatttttacatgtcggtcctacaaatagtgggaagacacataatgctctcaagagactagaagcaagttcttcaggagtatactgtggacctcttagattgttggcacgggaggtaggtcaaagactaaacaaagctaatgtcccttgtaacttaattactggacaagaaagggaggaaattgaaggtgcaaagcatagctcagtgacagttgagatggccgacatgacaactgagtatcaatgtgccgttattgatgaaattcagatggttggctgtagatcgaggggtttttcattcactcgtgcacttctggggctttgttcagatgagcttcatgtttgtggtgacccagctgtggttcctctcattcagcgaattctcgaacctactggtgatgtggttacggtccaatattatgagaggctatctccattggttcctctgaagactactctcgggtctttctctaacattaaggcaggggattgcgttgtaacgttctcacgacgatctatctatatgcttaagagaagaattgaaatggggggtaagcatctttgttctgtagtctatggctcattgccaccagaaactcgaacaaaacaggcgacaatgttcaatgatcaagatagtaaccttaatgtgttagtggctagtgatgctattggaatgggtcttaatctgaacatttctagaatcattttctctacactggagaagtttgatggcatctgcaacagggaactaactgtggccgaaatcaaacagattgctggaagggctgggagatatggatctaaattcccagttggtgaagtgacctgtctaaattctgatcatcttccattactacactctgctctgaaatcaccttctcccattatagagcgcgctagacttttccccacattcgatgtattatctctgtactcacgattgcatggaactgatttttttcaacctatattggagcgtttcttggacaaggctaaactatctccagactatttcattgctgattgtgaagatatgctgaaagttgctgctattgttgatgagctaccacttggactatatgataaatacctcttctgtctcagtcctgtggacattcgtgatgatatatctactaaaggattaattcagtttgcagaaaattatgcaaagaaaggtattgttcgactcaaagagatatttacacctgggacactccaagtgcctaaatcgcacaatcaactgaaggagcttgaatcgattcacaaggtgctagagttgtatgtgtggttgagcttcagattggaggattcctatccagaccgtgaattggcagcttcccaaaagtcaatctgtagcatgttgattgaagaatatctggaaaggtccggctggcagcaaaatggacgaaaggactttttgcagaagccaaaaagactacaccaagaatatgatgcatcacaattgcgcaaatattttcaagaaattgatgtgaggtcaaaataagatgcttatgctagaaagtcgcctcacaatatctgcttccggacaacggatttgctcctgtttgcatacgttatggtcgaggagaggcgacaagccgacaatacattttatggatgacaggagtcaaaagaatatcctttgccgacaatacattttatggatgacaggagtcaaaagaatcatcctttgccaaaaccatttaattggcctaagcagtaaatgtggcagcacctgtcctccatccaaacaattttgtagctattctttcattacactttattttaattatttctaacacagatggagctgtacatcacgatgaaacgtctaaatgttcgttaaagttattaacatagacaggacgaagccacctgtaaactttgcggttgtaactctttgtgttatgaaaggtgtaaatatgtcaaaatgacagttgtcaagtgatgtttcttgggcagctaaacacctgatttgtgcatgcc

SEQ ID NO: 25628 - DNA, 2471 bp, Oryza sativa
  ref <308>: DATABASE ACCESSION NUMBER: AK101070
  ref <309>: DATABASE ENTRY DATE: 2002-08-28
ggggaggtttccattcaagaccagtgctcgctgcgagtcccgacgcggcggcggcggcggagccgctctcctcacccgctcgcaatcgctgctccgttcgccgcctcacatccatggattccaccccggctcctgccgccgccgccgcggagacgccgaccaccgccccggcgttcgaggaatgcctccgcctcctccgcggggagcgcgacgagcagaagctggcgggcctcctcgtcgccgccaacctctgccgcgccggcgacgccgcctccgtcgtcgaggtgtaccgcgccgtcgggccccggttcctccgccgcctcctcaacaccgggctggggaaagtggagggcggcaaggaggaggacagggaggcgtacctgcgtctctcggtgacggtgctttccgggcttgctcgattcccagaggttgccgccgacgagggggtcgtctccactgtgcccctcatcgccgagatcgtctccaaatcgtctgatctggcaattactgaagaatgttttgagctcctgtctcttattgcaatagcttcagatggtggggcgcatacgttttgtgaacctggagtgatggatatgctcttcctccaaatctcaaacttcccagatggttcaaggtgcttagagcttgccattcatctaatgcagctacttgttcataaaatcagaatagacaacatgaccgtggagaaactgcaaggcatgacaagcatggtgacctcacttgctaggctttttgctgttcttcatactacagttaaatttgaagcgctgcatatgcttaccgcccttctatcccaaaaggaatctccgcttcatgacgctttgagatcagtaccttccatgatttggaaatgtcaaattcgagttgggataacggccgttctccaaaaccgtgttgtatcttctgaaaagttgcaagctcttcttttggcggagtgcatgatgtctatacttggtgagaattggctgtcagaagaatacaaagtccctgatgaccagaatatgatgcctgttgataaatttgtattgcttgtcctagaatctgcaagaatcgaagtttctgtccttctaaatgagcttgcttatttgaagtatgaatcttcaaaaaattcccagagagatgatgccatcagtcagaaagagagaaacctggctatattattttcactaatagaaagaataataaaaatgatatcaaatgccagtagtggggaaggtgctgtatgtcagaccatccgtgagagcaccatcatgaaagcaattacaggattaaatgagacagttggcttagttttagactttctgcaggacgcaaaggatcatgggcaaaggaaaggcgatgatcttttggcggctgtgagaatagtaggaagttatctggcagaggcaccatatgcctgcaaggagaagattagacatctgctggaatttatcttctctgttgaagggcaagatgaatcaagctcattccattctatttgttttatgcttcccatgctatcacaaataacaatggaggctgatggatgtagaattttggcatcatttggaggctataaaatggttatagactgccttattaaaatgatcgaacagaatggaatgatgattgacactggtaacatgtttttagcatgtgataccatcataaactttttgtcaaatatgaaaaatgctcatattcaaatggggtcttgttttgtcggccttctaaaagcacttgtttcatggactggaaccgccgatgattcatcagttatcataacagcctcctgcttatgcacgttggtgttggacttaacaacagaggagtttttattgagcagctctgattttgattccaagacacttgagaagttgtcaaagctcattgccagaagtttgcatcagggcattcctgacgacgacatagaacaatccaaccaaaagcaaatcatactatcaggttacaggaggtggtctgatagatatccacgtgttaaaaacatcctgcagcagcatgtttctgtgtgattttctgcttatgattgccgtcaatctcttgtcaaaagagaacccacccccccagatacaaaccttaagttaaagtatacccgtgcctgatattcttcaatcttaaggggtttgccaaatgccaatgcattctttgtgggtgcaagcaattataggttacggtagttcctccatgtaacagctagatagtactacacctaaacggatgagcaagatgccattgtatacagtgtcgcgttgcttggcagtgcaccatattggaaggagtagatgcgaagggaaaatgtacatattcaccttttgtctgttgtatcgacgagtattttttgtaatggaaggctttaatgtagtgcaaataactcgcttgaatttgtttcgcttgtgcgcacttaatatgcaactaatagttgatgagtatttgtgcattttcgaaagatt

SEQ ID NO: 25629 - DNA, 1884 bp, Oryza sativa
  ref <308>: DATABASE ACCESSION NUMBER: AK101071
  ref <309>: DATABASE ENTRY DATE: 2002-08-28
ggggtcctccctcctccgcctcctccgccgccgccccctgtatcccaccggctcgccggagagtccgcctcgccgccgcggcctcacgggcgcgtatccagcctcgcggagagcgtgcggaaccgcgacccgtactagggcagcgcgagagagaagctgctgcgcctgcgctgcaaaggtctacagttggagctcttgctgctgcttggaagacttcggacaagaacctaagatcatggcaagccttgctgattctttcttagcggatcttgatgaactttcagacaatgaagcctatcctgaggaagaaaatgctgaggcagtgggcacggaagagattggtgatgatgatatgcctgacctcgagtctcttaattatgatgaccttgatagtgtttcaaagcttcagaaaacacaacgttacaatgacattatgcaaaaagttgaaaatgcacttcagaaaggtacagatttgtccaatcaaaggtcgatcctggaggaagatccagaataccagctgattgttgattgcaatgctctatcagtagatattgagaatgagatcattataatccataatttcatacgtgacaagtataggctgaagtttcctgaactagaatcccttgttcatcatccgatcgattatgctcgtgttgtccagaagattggaaatgagatggatttaacgcttgtagatctggaagggcttttaccttctgcaattataatggtaatttcagtgacagcatcaacgacaagtgggaagccgctttccgaggagaacttggtaaaaactattgaagcatgtgagagagcccttactcttgatgctgcaaagaagaaggtacttgaatttgtagagagcagaatgggttacattgcaccaaacctgtctgccattgttggcagcgctgttgcctcgaagttgatgggaactgctggtggtttgggagcacttgcaaaaatgcctgcttgtaacgttcagttacttggtgctaagaggaaaaatcttgctgggttttctactgccacatctcagtttcgtgttggctatcttgaacaaaccgatgtattccagagtaccccaccagctctgaggactcgtgcttgcagacttatagctgcaaagtcaactctagcagcaaggattgattcgatcagaggtgatccaacaggaaaagctgggcgtaacttgttagaagaaatccgtaagaagattgagaagtggcaagaaccgcctcctgcaaagcttccaaaaccacttcctgttccagactttgagcctaaaaagaagagagggggtcggcggcttcgaaaaatgaaagaaagatatgcacaaactgatatgatgaagcttgctaaccgaatgcagtttggtgtaccagaagagagctcattggtgatggtttaggggaaggttatggcatgcttggacaggcaggaagtggaaagctacgcgtgtcaactgcaccaagcaaactttctgcaaaaattaccaagaaattcaaggagaagagctatggtagcagtggtgcaacatcggggctgacttctagtttggcgtttacaccagttcaggggatagagttgtcaaatccacaggcccacggcaacctgcttggaagtggaactcagagcacctatttttcagagaccgggacgttctcgaagatcaaaaggacctgagctgataagcaaaagtttcttcttcccatcagcccacagacccgtcataatcctcaggatgcaccgatgaatccattttgtaatgtactccaccttatacccgaattcagcagactttcgtggtgctgtttgcaatctctagaagttcgctaacttccgtacggttcaagttaattcgacatgctgcgtttgacc

SEQ ID NO: 25630 - DNA, 2050 bp, Oryza sativa
  ref <308>: DATABASE ACCESSION NUMBER: AK101072
  ref <309>: DATABASE ENTRY DATE: 2002-08-28
ggtttttcggtaaaccctagatcgatccctccatgggcgtcggcggcatcccgatgggtgtcggcggcgggttccggtgagcagggagctgcagctgtgtcctggagggcggagcgcagtgggtccagctagctgagcggagcgcggcgggtcttggcgggcggagcggctacggcagcgtcccggtgggcgtccggctgcggcggggtctcggcgagcaggtcctagcggacggagcggctgcgtttgcgtcctgaagtcgaagcgtggcaggtcctggaggacggaggacgaggggcccaaccggctacagcgatgtctcgacgagcaagttgctacggcaaagcttagcgaacagggctgacatcgagctgtgaattcatcgagcagaatggaaacgagtgaagttgtagccccgaataggggcaatttaatgaaaattttggttagcgtccgcgctttctttagcatgccagatggtaagccgaagagatacatagatcgcagagaaattccaatttatattaatccagatcggtattccttaatggatttgagtgctgacttagcaaagtcaatagactggggttctaggcagttgatttctttttggtatcctgatccagattgtaatgatgaggagtacattgaggttcgaacagataagcatttgtggagattgttggtacgacataaaccacaaaatttgcttcgattgcattgtcaagtaaatgatttagagggtcctattgctgtttcaccttcaaaaaacacattggaaaatcagaaatcacaagatcggacaccatgtactcctcctcaatgcattcctttgctagctgagcagacccaaccaacacaggagtgtacaccaaatgagtgtgcaaaaaatgagtgtgcactaaataagtgcccactacttgagagtccaaagtgtgcaagcaagaaaaagactgcagctaatgtcaaagatgggttggttgatgtagacttgggcactaaaaattcagggttagatgctgaatccttagggtctagcgatgattcattagctgtggatagtaacagtagctacacaagtgccgatgattcttctttatctgactcagattgtgaatatgaaccagagagttgttctgaggactctgaagtaaatgatgatgttgactctgatactgatgatgaggtagtttacacacatgatattgacaaaccatgtgttgatgagggtacatttttccaaattgtcaatcaatgcaaaaaagcttttacacaccatgcagttctgaaagcttatggcttttttactaagaagaaggacaaaacaaggttgattcttgtttgcaagagggcaaaagaagagaattgcaagtggaggattcatgcttcatgcaagagaggcaccaagatttgccagataaaaagaaacaaaattgaacatatatgttcatctgttaataggtcaggagaagacatggcttcaagcagttgggtatgtgacagagttatcgacatgcttagagagaaaccaagcttggggccaaaggagttgcaggaaaggctagagcggaaatatcacattacagttggatatgacaaggtttttaaagggaaagaaaaggcactagagaaattgtttggcaaatgggatgatagctatgctttgctgtttactttcaaggaagagctattgaagtcagcgccaggaagtaaagttcagattgatatcgaagagcataatggtcagatgtgcttcaaaaggttatttatagctctcaaaccttgtattgatgggttcctactgggctgcaggccctatattgccatggacagtacacatttagttggaaaaaataaaggtcagcttgctgcagctgtagccattgatggaaataattggatgttcccggttgctttcggtgtcatagagacagaatccatagaaagttggacttggtttgttcaaaaccttcaatcagccattgtgtcacatcctgattttttttgttttaggatttataaattatttaataaattattattagaattc

SEQ ID NO: 25631 - DNA, 2089 bp, Oryza sativa
  ref <308>: DATABASE ACCESSION NUMBER: AK101073
  ref <309>: DATABASE ENTRY DATE: 2002-08-28
gaagaaagctcactgcgctgcaccaccagccaacccaagatcaacaggaaccagagagagagagatgaacgccgacttcggcgcgcccaaggacctcgcggggggcctccagcagcggaggtctctctaccagcccaccctccctccctgcctccagggcgcaacggtgaaggtggagtatggcgacgccaccaccaccatcgacccaacctgcgccaacgtcgtcgcgcaggccttcccccgcacctacggccagccgcttgtcagcttcgtcgcgccgccgcccgacgccgtcgacaaggaccgcgccccgatcagggtaggggtggtgttctccggcaggcagtcgccgggaggccacaacgtgatctggggactccacgacgctctcaaggcttacaatcctcatagtgttctctatggattcgtcggtggcactgagggactgtttgcgaacaagacaatcgagatcacggatgatgttcttgcttcatacaagaaccaaggtggttttgatttgctcggtagaagtatcgatcagatccgcagcactaagcaagtcaatgctgcaatgactacatgcaacaacctcaacttggatggcctggtcatcatcggaggagtgacatccaattcagatgctgcacagcttgcagaggcccttgtccagaataactgtaagaccaaggttgtcggtgtgcctgtttcactgaatggtgatcttaagaaccaatttgttgaaacaaccgtgggatttgatacagtgtgcaaggttaactctcagcttgtgagcaatgtttgccttgatgcaatctcagctggaaagtactactattttgtccgtctgatgggtagaaaagcatctcacgtggcctttgaatgtgcacttcaatcacacccaaacatgcttatcttagcggaggaggtagcactatcaaaactcacactgatggaagttattaacaagatatgtgatggagtacaagcaagggcagaattagggaaattccatggtgtgctccttattccagaaggactaatagaaagcattccagaaatgtatgctctgcttcaggaaatcaatatcctccacaacaacaatgttcctgtggcagagatgccatcacaactgtctccttgggcagctgcgctgttccagttcttgccacccttcatcagaagagagctgctgctccatcaagaatcagacaactctgcccagctgtcccagattgatactgagcaattgttggcccacttagtagaagcagaaatgataaagagaacaaaagaaggaagatacaagggaaggaagttcagctctgtatgccatttctttggatatcaggctcgaggatccgtcccatcaaactttgactgtgactatgcttatgctcttggccgtatctccttgcatatgatagcagctggcttgactgggtacatggcaactgtggctaatctgaaggaccctgtagacaagtggcggtgtgctgctgctcctctaactgcaatgatgagtgtgaagaggcatttgcgtggtcctggggcaatcccgataggaaagcctgccattcatccttctccaattgacctgaaagggaaggcttatgagttgctgcgagagaaagcatcaagttttctccttgatgatttctacaggactccaggaggcattcaatatgaaggcccgggttgcaatgcaaaacccatcacgttgaccattgagaaccaagactacatgggcgacattgagatactgaaagactgtctcagcaaggtgaggacgatggtgaagcctggatgctcgcgggaggttctgaaggcggcgataagctcgatgctgtcggtgaccgacgtgctgacggtgatgtcgcacccgctcaacgccgagctgccgctctaccatttcaactgagcgttgtagagaataaggtccagttttgtaacacaccgggagagactggcgtattgggctactggtatttggtagcttcatccactttcattttcatttctgttcgttgctgggagtgagaaccactggagttttcatgtcaataaacatcgaaaacggtagttgatcctg

SEQ ID NO: 25632 - DNA, 2451 bp, Oryza sativa
  ref <308>: DATABASE ACCESSION NUMBER: AK101074
  ref <309>: DATABASE ENTRY DATE: 2002-08-28
ggtggagatcctgggaaacttgttagttacagattaagcaatggctgtcaacctggtgctgtcttttgcccttgccattctgatatcctccagccctaccgcggttggtgtggatgccaccgaggagctgaaggaggcggtcctaacgctggatgcgggcaacttctcggaggtggtggccaagcacccgttcattgtcgtcaagttctatgccccatggtgtggtcactgcaagcaactcgccccagagtacgaaaaggcagcctccattctgaggaagaacgagctgccagtggtactcgcgaaggtggacgcatacaacgagaggaacaaagagctgaaggataagtatggggtgtattcatacccaacaataaagatcatgaagaatggggggagcgacgtgcgtggctacggtggcccaagggaggccgatggcatcgtggagtaccttaagaggcaggtcggcccagcatccctcaagcttgaatcagcagaagaggcggcccattccgtcgtcgacaagggggtgatccttgtgggagttttccctgagtttgctggtatggaatatgaaaatttcatggttgtggcagagaaaatgcgagcagattatgattttttccacacgtctgatgcaagcattttgccacgtggtgatcagagtgtcaaaggccccattgtccgtctctttaagccgtttgatgagctgtttgttgattcggaggattttggtaaggacgcacttgagaagtttatcgaggtatctggtttcccaatggttgttacctacgatgctgatccaaccaaccataagtttcttgaaagatactatagcactcctagttctaaagtgagtaaacacaacagctgttacattctgtttgtttcatcaaaatacattgtcaactacacatgctaattcttaaaactaatctgtatatatgctatatggaacgatgaacatttcagttatattattcaattttctttacctgcatcagcattatggctagcatgtataacgcctctagtatacctctagatacatcggtataccattgttcttgcataactgcaatgatctactttctttcaaacacaattggacaggcaatgcttttcgtgagcttcggtgatgacagaatcgagtccttcaagagccagattcatgaagcggccaggaaattcagtggtaataacataagttttttaattggtgatgttgcagacgctgatcgtgtcttccaggttattgtttgtaccactcagcacttccttgtgaaggattcttagaacttagaacttccacttatgagcttccacatccaccctttcagtactttgggctcagagaaagtgatgtgcccctccttttcgtgatagcatctactggaaaatatctcaatccaacaatggatcctgatcagatcataccctggctgaagcagtacatagttgaggcttactctactttactgtgttgatcaattacttattttatttcagggtacttcatgcccactcatttctaacgtatgttagtttctattctgattttggtccatgtagtatggcaacttgacaccatacgttaagtcagagcctatccctaaggtgaatgaccaacctgttaaggttgttgtggccgacaatatagatgacattgttttcaactctggcaaaaatggtatgttttcatttcaatggttgcgagcagtatcattttctgagtagttccattcgatattttggtatgttctatttgattgtttgtttcaccactgcatgacatcaatttcgttgcagttttgcttgagttctatgcaccttggtgtggccattgccgcaagtttgccctgatcctggaggaaattgcagtgtcattgcaagatgaccaagatatagtgatagcaaagatggatggaactgtgaacgatataccaacagacttcacggttgagggatatccaactatctacttctattcatcaagtgggaaccttttgtcgtacgacggtgcaaggacagctgaggagatcatcagttttatcaacgagaacaggggaccgaaagctggtgcagctgctgcagtggatgagaaaacccagattgatgctgtggaagaggaggtaacatcatcatcagagcctgttaaagatgaactctgatcaaggacactgatggtctctacactgcatacaacagagactactgaaaatgagtatgcagtgcagttgttcagcaagatggatagaaattcagagtgggttaaatatgacccgtgacccaaccaagtttgagtttggtcagtcttgtcaccattctcttacaggaacactagccattttgttcgaaatttgtgaactatactagtcagtttgttggaaatctgctgtctaaacttaattgcattgaataattcaatacagttcgtcttttgttccgttg

SEQ ID NO: 25633 - DNA, 2423 bp, Oryza sativa
  ref <308>: DATABASE ACCESSION NUMBER: AK101075
  ref <309>: DATABASE ENTRY DATE: 2002-08-28
gactcgcatcccggcccatccgcctcgtcagcggcggcgcaccaccatccccacccccaccctcctcgccggcggctcaccggcgcgccgcctccacggcggccacctcgtcggcgtccggttgctccacccgcccaccaaactcgccgcccaccacccccaccaccgcgtaaccgcaaatgccgcgcccctccacctccgcctccgccaccgcctcccgcttcgccgccttctgggccgccgacgcgctcgccggcgacgacgccctcgacttcgccgtcaccaaggcgatggtgggcgtctccccggattccgtcagggccgcccctgaggcggtgcgggagcgcgtggcgctgcggtgcctccaggaggtcgtctccctcgcctcctccgatggcgagcgcggcgccacggcctcggccatagcggcgccgggggaggggatgcttggggtggaggacgcatcccgcacctgcgaggatttgctgcttcaactcatccgggaggttggtagctcagggagcttggagaaggatatgcttccgccctttagacaagatatccagaagtttatatgcataaagagacctacattaccagaaacttcttttgagttgctcagaaaagtttacccagagattacacctgtggttccaccatccccagtggagcagaatggaaatgaccaacacgacaatatcagccatgatcttgtgaatacagagaagaccggattcactacagatggtgctcaacttcagcaggatgatctagcaaatttagtcgatgaaagaaacacagaaaatcttcagaaggatgcaatggcaacttctgattttcaacaaccatgtacatcagacaataggtgttttgatcagcgacaagaagattctattaatactgttggtgtcaacatcaggtctccagaagacagtccaactaatgtaaatagacacatgtcagttgcagctgagccttctttagctagttctgcagatttgctgggaagtaatacaggaagaatgtctgagcaggacacgatagatcatacaaccatagttcaatcacaatcttgtggggtcagatatcctaataaacatcacagtaataatggagacatgccacttgttgccagcattcagtcaccaaaggattccatccatgaaggatcaaccatgcagacaactgtttctccagctgttgacagaagcaatgatgctttaccggcatccaacatgacccacttgcctgagtttattgctgtagaggataaaataatgacttcagaaccacacttcagcaaaactcatccaaattcagggcaacatgatactggtgataaagcaaatcaagatgtgggttgtggcagtactggtattcagacagctgctgctttaccatctgaaggctttaatggggatgttcaaggagacaaatctgaaattaaagatccagcagggaatactacacagcatactgaaacttttgaacaagaaaatagtgacagggctcatttggaagttggttgttccgacaaagttaatcaagctctatatgatgatggcaacatcataaaaaataatatggtctttggtgggctgaataagcaaactgctctagagtctcatggctgcagcatgaccttgcataacagaaattcagaggccaaccatttctctgagcagaatattggaaggaacagaactgaagttcagaatgattgctgcagtattccaacctctcctaatgatgttaatgacaagcgagcaaagcaagcttcaaacaaggaaaccatggcgaatactgtggcagaaacattgcatgtgcattcttcagatggtagtttcagtggcttcgcagctggtggtcttctgtcaatggctgaaaaactaccgttctgtactcagggtcaatatgctaatggtactgttgagggcttgtcagaacaagagttgtgcataaaatgtggcaaagatggtcagttgctgaaatgcagtggctgttttttagccgttcatgatacatgttttggctcatcagtgacatttgatgattctggtcagttctactgtcctgtatgcttctatactaaagcaactgaagcatatcaaaaggcaaagaaaacatattctgaagcaaggaagaacctatcagctttccttggtagaaagcaattggctgagcaatatcaacaagctgcagtgcggcaaagagctgccaacagtgaggatcatttcaatgggtgtaacaacgcaatcaaaaggcaaggtaatcatcaatctgaaggaaataacctttctcatagggatgaagagcctgcccgacagaggaagaagcagaagacaaatgctagggatgcttgcactcaggaagtagtcactaaaaaggcacccactgttcataactctgatgttgtatccatg

SEQ ID NO: 25634 - DNA, 2572 bp, Oryza sativa
  ref <308>: DATABASE ACCESSION NUMBER: AK101076
  ref <309>: DATABASE ENTRY DATE: 2002-08-28
ggtcgctgttgcacccaagccaccacccatttcggcacacccttccctccacttgccgattacttttttgccccccggcgcgctgggcgccttggctttggccctggctttggctccgctgttcttatcttccccactcgtgcctggctctctctctctccctttctcctctcctccaaggtcgtggcaaaggagaaataacagctagcgggcttggggaagggaaaacagcaagtgggagatcggcagggagaggtgaattactacttgagtagaagtggtacaagaagagtcgtcgtctacctgtgagcgaattatttcgaggttgtgcgttgcgatgatgggaggtggtctggtgatggaccagggcatgatgttccccggcgtgcacaacttcgtggatctcctgcagcagaacggcggcgacaagaacctcggcttcggcgcgctcgtgccgcagacgtcgtcgggggagcagtgcgtgatgggggagggcgacctcgtggacccgccgccggagagcttcccggacgccggtgaggacgacagcgacgacgacgtggaggacatcgaggagctggagcgccgcatgtggcgcgaccgcatgaagctgaagcggctcaaggagctgcagctgagccggggcaaggaccccgcgggcggcgtcgtgggcgacccgtccaagccgcggcagtcgcaggagcaggcgcggcggaagaagatgtcgcgcgcgcaggacggcatcctcaagtacatgctcaagatgatggaggtgtgccgcgcgcaggggttcgtgtacgggatcatcccggagaagggcaagccggtgagcggcgcctccgacaacctccgcggctggtggaaggagaaggtccgcttcgaccgcaacggccccgccgccatcgccaagtaccaggccgacaacgccgtcccgggcttcgagagcgagctcgcctccggcaccgggagcccgcactcgctgcaggagctgcaggacaccaccctcgggtcgctgctctcggcgctcatgcagcactgcgaccctccgcagcggcggtacccgctcgagaagggcgtccctccgccgtggtggcccaccggcgacgaggagtggtggccggagctcggcatccccaaggaccagggcccgcctccgtacaagaagccccatgacctcaagaaggcctggaaggtcagcgtgctcaccgctgtcatcaagcacatgtcgccggacatcgagaagatccgccggctggtccggcagtccaagtgcctccaggacaagatgaccgccaaggagatctccacctggctggccgtcgtcaagcaggaagaggagctgtacctgaagctgaaccccggtgcccgccctccggcacctaccggcggcatcaccagcgccatatcgttcaacgccagctcaagtgagtacgacgtcgacgtcgtcgacgactgcaagggcgacgaggccggcaaccagaaggctgttgttgtcgccaacccgaccgcgttcaacctcggcgcggctatgctgaacgacaagttcctcatgccggcgtccatgaaggaggaggccaccgatgtcgagttcatccagaagaggagcgcgtctggcgcggagcctgagctgatgctgaacaaccgtgtctacacctgccacaatgtccagtgcccgcatagcgactatggatacgggttccttgaccggaacgcgcgcaacagccaccaatacacttgcaagtacaatgatccactccagcagagcacggagaacaagccatcgccaccggccatcttcccggcaacctacaacacgccgaaccaggctctgaacaatctggatttcggcctgcccatggatggccagaggtcaattacagagctgatgaacatgtacgacaacaacttcgtggccaacaagaaccttagcaacgacaatgccacgatcatggagaggcctaatgcagtcaacccaaggatacagattgaagaaggcttttttggacagggaagtggcatcggcggcagcaacggaggtgtgttcgaagatgtcaatggcatgatgcagcaaccgcagcagaccaccccggcacagcagcagttcttcatccgcgacgatactccattcggtaaccagatgggcgacatcaatggcgcatcggagttcaggttcggctctggtttcaacatgtcaggtgccgtcgaataccccggcgcaatgcagggccagcagaagaatgacggcgcatcggagtttgaggaattggaatgatcctaagagatagtgctggccaagttatttttacatcatggcactctctggattattgcaccgaggtgctggaaatctagcttacatttaagtttgcataccattaaaagaaaaacttgtcgtaatgttttactcatttatgtctagtttggtttttttcctaactgagcgtttcaataataaatgtatagcaaacttatttttttactttgattgaaatggacaattttagaaacaagatgtatgtgagttgaaacatcgattaatatactcccaataagatattatctatactcctct

SEQ ID NO: 25635 - DNA, 3204 bp, Oryza sativa
  ref <308>: DATABASE ACCESSION NUMBER: AK101077
  ref <309>: DATABASE ENTRY DATE: 2002-08-28
gagcgaactacccaagccaagccactgccctcctccctttgccttgcgcccttctctttcctccttcctcctgcgtttgcgtgacgaggaacgaaagcatcatctccgccccccgccgccgcctcccgccgccggcgaccgcacccaacgcccccttcgtcctcccgtgcgcccgcccctctccgcatcgaatcgatcgcgccctccaaagtcggtgcagagttcgttgggcgagcccgcggaagggagggaggtggggggggggggtgggagaggcggcccgtggagcaacgtcctttcgttatacaccacccattgcaagcattccgctcggagctgcataacatcatctccctagaagtcaaaaatatatatgggctgattttaacatttcatgggaggttttgaagacgatgaaccaccctcgaaacgcgcaagagcatcctcagcagaaccagcaagtttgttagatagtttttcttgcttgaaacctgccgctcctttgggaagcacaatggctagacctttgccttcccaggggaaagaagttatggttggctctaaaggtgttattaagagggatgaatttgtgaggataatcacaaaggctctgtatagccttggttatgaaaaaagcggagcagttcttgaggaagaatcaggaataactctgcattccccaacagtgaatcttttcagaaggcaggtacttgatgggaattgggatagtgcagtggttaccttgaagaaggttggccttttggacgaaaacattgtaaagtctgctatatttctgatactggaacaaaaatttcttgaacttttgagaaatgacaatgtcatgggtgctataaggactttgcagagtgaaattacaccacttggtgtcaacaaaaaaagagttcatgaactgtcaggctgcataatttcttctccacagcatgtattacttggtttttcgaagcttggcattgaatcttcaaactcacggctgaagctgctagaggaattgcaaaaggtgcttcccccaactgttatggtaccagagaggaggttagagaatttgcttgagcaagcacttactgtccagcgtgaagcttgttatttccataattctattgatggcttgtcactctacactgatcatcactgtgggaaggatcagctaccatcttgcacggtgcaggttctgcgtgcacaccgtgatgaagtatggtttcttcaattttcaaacaatggaaagtatttagcctcagcatcaaatgataaatccgcaatcatatggaaggttgatgaagatggagagctattgctaaagcacacattgactggtcatgacaagccagtcatgatggttgcatggagccctgatgattgccagcttctcacatgtggaatggaagaagtcattcggtgttgggatgttgaatctggcaaatgtcttcatgtttatgaaaagtctggcattggtctgatctcatgtggttggtttccagatggaaagcatatattgtctggtctaactgatcataacttttgcttgtgggatttagatggtaaagaagtagattgttggaaaggccagagatcatctaaaacatctgattttgccgtatcaaacgatggcaagcttataataagcatgaatagagagtccaccattcgtttatttgatcgggagacaaaacaggagagattgattgaggaggacaatacaatcacatcattttctctttcagaagatggtgatttcttgcttgtaaaccttataagtgaggcgattcatttgtggaacataaggaattgccccattcgagttaaccggtatgctggtcataagcgcagccggtttgtgataaggtcttgttttggtggatccgagcaggcctttattgctagtggtagtgaagattcacaggtatggtgattttgcttgatggccacctatcactataaaataatgatatggatgttgttaaatttcgttgttacagtgttcttctattacttgtgctaatgattggcattctgcattctagatttcctcagtatgtaaggaaaatatagtcatagcatacgtaaacatcctcaatacattggattattacactgtatacaaaaacatcactacatctagttcacttttggaaccttgcacagtaccgcaaatgtattaatgtttaggcctgttcttcagatttacactgtgttttcttgttatctaggcatcgaccacctcattttctccaaaatgttatgaatgcataaatattgattgctgttttatcaagtctaatgacttggaacggctgctgctgattttatttttagaatagaggtgacagatgagtttaaagtttaatccaaataaatatgcattattatgttgggatatttcgtcagaatttactgtctttatactgataattagtagtctaccagatagaaccatttagtattccagtaatggcacccattatctgatatacaaaattaatatggaaaagaagaaagatgaaatgctacaaattactttggatggagctagttaagtctcaaaattgttatggcaaacaaagtgtggagctatgtgctgtctagcgtggtctaaccactagattgtcacgcatcttttcctatcatctgcatctatatatcttgtcctgtcttctgcaacttccgtaacctcaaaatctggaataattttcctacttcagatctatatatggcatagagctactggagatcttattgaaactctgcctggtcacaccggcacggtcaactgtgtgagctggaatcctgcgaatccgcacatgcttgcatctgcaagtgatgatcacacaattcgtatatggggtttaaagaaggccaatctgaagcgcaaggatgttggcagcagcaatgggatctatgcaaatggtaatacacccagcaatggtgtggtacaccagtgcaacgggaacagcagcaaatgaacatggcttgctaaccaatggatggatgactggcatttgtaaatccccttttccttccctttcctttagtttcctatccatcagggaggacgccatagtaaaacaaagctctgcagcacatagtgtggggaaacctgctgggtttcatgcacgatctctcatgtattccatcttactgtttgtcacatttatttcttaattcatgctgaaaagatatttcgatact

SEQ ID NO: 25636 - DNA, 2350 bp, Oryza sativa
  ref <308>: DATABASE ACCESSION NUMBER: AK101078
  ref <309>: DATABASE ENTRY DATE: 2002-08-28
taattgtgcttatttcttttaaccttccataggaagccaaaggcactggggctggattgatggcagcagctattttggcaatggttccctcatacatctcaagatccgttgcaggaagctatgataatgaagccgtagcaatatttgctttgatattcacattttatctatatgtaaagacactgaacacaggatcactcttttatgcaacgctcaatgctctctcatatttctacatggtctgttcttggggaggttacacattcatcatcaaccttattccaattcatgtactgttgtgcattgtcactggtcgttattcttcacggctttacattgcttatgctccccttgttatactgggaacacttctggcagccttagtacccgtggttggttttaatgcagtgatgacgtctgagcactttgcatcatttctggtgttcataatccttcatgtggttgctcttgtgtattacataaaaggacttctaactcccaggctgttcaaagtagctatgactcttgtcataacagttggcttggctgtttgttttgcagtaatagctatactcatcgctttggtggcatctagccccacaaaaggatggagtgggcgcagtttgagtctacttgatccaacctatgcaagcaagtacatccctattattgctagtgtcagcgaacatcaaccccctacctggccctcctatttcatggatatcaacgtgttggccttcttgattcctgctgggatcatttcatgcttcttgcctttatctgatgcaagctccttcgtggtcttgtacttggtcaccgcagtatatttttctggagtaatggtgcggcttatgcttgtccttgctcctgctgcgtgcattttatctggaatcgctctttctgaggctttcgacgtcctcacaagatccgttaaatatcagctatcaaaattatttgatgacagccctgctgcttcaggggatagtagtgcagagagttctagcgctagtactgtctccacaaattcaaaaaaatgagactagacctgaaaaaactgaaacagccccaaaggaaaaaccatcaaagaaaaaccggaagaaggaaaaggaagtggctgaaagtgttcctgtaaagcctaaaaaggaaaagaagcttttggtacttcctatggaggcatctgttttgggcattttgttgctgatcgtgttaggtggtttctatgtggtccattgtgtgtgggcagcagctgaggcgtactcagctccttcaattgtgttgacttctcgttcgcgtgatggattgcatgtttttgatgatttccgtgaagcctatgcatggctcagccataacacagatgttgatgacaaggttgcgtcctggtgggattatggttatcaaacaactgcaatggccaacaggactgtaattgtagacaataatacttggaataatacccacatagcaacagttggaacagcgatgtcatctccagaaaaagcagcttgggagatcttcaattctttagatgtcaaatatgtccttgttgtatttggaggtcttgttggctaccctagcgatgatattaacaagttcctttggatggttcgcataggaggtggtgtattccctcacatcaaggaacctgattatcttagggatggtaactatcgtgttgatgctcaaggcaccccaactatgctgaattgcctcatgtacaagctttgctattacaggtttgacaaacagaattcaatagataacgtttagttgtcatcaatatttttttttttacatttggctgttttccttgtttcctccaggttcgttgagaccgatggcaaaggttttgatagagtaagaggatatgaaataggaaagaagcatttcaaactaacacattttgaggaggttttcacaacccaccactggatggtccgtatatataaactgaaacctcaaaagaatagggttcggggcaagttgaagaagttgaaatctggctccaaagctagctcaacgaatgcggcgggccgaaagaagaacccatggcaataaaaatgagtaaatgcgaaaagcgacgtggctgcttggaatttgcttttgctagctcaactgcaactaagctcaaaagaactagaaaaccacaggcctaggattagagattgctgcgttattgcactcagtatttgacacccctaatatgtttttgggaccagcaggagtgctgaagaaatttttgatagactgctctaagctttttggccccattgtttgcaacacgcggtttagtgtcttttatactccttttgcactgaagatgtttaggcggacgtacaatggaagtttattt

SEQ ID NO: 25637 - DNA, 2405 bp, Oryza sativa
  ref <308>: DATABASE ACCESSION NUMBER: AK101079
  ref <309>: DATABASE ENTRY DATE: 2002-08-28
gaactctctctctcatccgttccccaatccatccaggagttcatggcggatcaatggcgaagcgaaggagctaaaccctagagctctccagcgcctcgttcacctatccaaaactaaaggtggcatccccttctcagtattacagcatgcacatgatgacttctgcaagcggatgtgcaaagttggattaccttagttcgcaggagcctggtgatgaatcacagatcaacgctattgacattgtggataggctgctagtagaagatgatatagaaacttatcagcaaataagcatcgaccagacaacgagggcaaagtcagcttctactttaggttcagatatagctcaatgcctggccaaaagggctaggtgcagttccccactaaaaaaggctggaaattttgactgggttgatacccccactgttgatgattgcagaaccagtattatttccatggaaaatacagtagatcgtgctaataatcaagtgaaacacggtggctgtggatcaagtaccagggcttggcccatactagaatgcattgatgaggacttgggtactaattgtctgaagaaaacggaaccattttgtggtactgatgatttataccaagaatatgatattgggccaaatactcagatggcagctgaagccatggaagcattgttcaatgcttcaactgtcagttatgatgtcaaggagaatgaacgtcctgaagattctgttgttaaaaatatgacaaaaggaaccaaagttgataagacatgtgcagttcattcaccaattcaaaagagaaaggtaaacttcttgcgtcacagatcaggagtggcaacagaatacaagcaaatcaaggtagatgatacagtaagggaaaatggtgaaagttcagtctctcatacaaacacatcacaaaccaggaagtatacgaaacagatggcagggaaagcaaaaagaaacatcagcagtgggattactcaaagagacatagatcatgaggtgtcagaagtaatcacaagatctggtacaaatgactcaaatattcctctttcactagatacagatgctttaatccatcctaaaaggaggaggacatatatatttacctcgggaagctcaaaaattgagttcattgaagctatcaagccaacggcacttagagccaaaactacagaagtaaaacagctttcaacagctaacacagtaagcgtatctgatcaagataccacaagtggcttgagaatgagtcaacattcttcttttgctgatcatgaagcatcagcaggtagttcatacttcaatccacttgcagaaacttttactgtagggcttgaaaaacagtcaatacctgagaagaagggtcatgactctagtttgatgcccagtgtaccgctgagagagctaaatggtgcagggccccaagctaggacacgtacatcagaaacaccgaagagagtcctgaaatcaccaggttccagagaacttgctaacctctttagaaatgaagtatctccagtattgcaatctagcaggcgaaggagaaagcatatgtccacagtccgtgtactacttagccaaagtatgggcaatgaaaccctcaacgatcaaacaaagattttgatacattttggattatcagtggcaacaactatttcagaggctacacactttgttgctgaaaagtttgcgcgcacaaggaacatgctagaggcaatagctacgggcatacctgtagtcacaccggcatggcttgaatgctgcagggaagctaggagtttcattgatgagaaaagatacattctgagggatataaagaaggaaaaggagctaggctttagcatgcctgtctcactaagccgagcttgcaaaaaacctttgttagagggtagaagagtgctaatcacaccaaatgctaaacctagcaaggagcttttgaaaagtttagtagtgactgctcatggcaaggtgttggagagaaacgcaatgtccaagatgaagaatagaagtttaatgggagcttttgtaatctcttgtgaacaagactacaaaatatgcgtgccattcattaagaacggttttgaggtgtttgaatcagagcttgtgcttaatggtattgtcacccagaagctagaatttgaaaggtatcgtcttttttcaggataaaaccgtgtgaagtgtccgcgagtcttgataaattaggtactatgcaacaaagcgtattattgtacataaatccttattatattcctctagttactcgtattcgtatgtttcctcgcaaatttgcgaacgcttgttgcaagtatttatccctgcagcctcttcttggcatgactatttctgtgggtagacaccaagctcttgtgtgaagaagaatgatgatgtcattaacatggttactcattt

SEQ ID NO: 25638 - DNA, 1295 bp, Oryza sativa
  ref <308>: DATABASE ACCESSION NUMBER: AK101080
  ref <309>: DATABASE ENTRY DATE: 2002-08-28
gagcggagacagaagaaggggggagaagagaatcgcggagatagcatgagcagcggcggcgagctcgcgctgaggcaggagtacgtcatcggcgacgagatcgggcgcggccgcttcggcaccgtccgccgctgctacgccgtcgccacgggggaggcgttcgcggtcaagtccacgcccaaggcgccgctgcgggaggcggaggcggcggacgcgctcgacctcgcgctcgcggagcaggagcccaaggtgcacctcgtcgcgtcggcgccggggcccggggccagcccgcacgtcgtcgcgctccacgccgccttcgaggacgacgccgcggtgcacctcgtggtcgacctctgcgcgggcggggacctcctctccctcgtctcctcccgcggccgcctcccggagcacgaggccgcggacctcgtggcgcaactggcctccgcgctcgcgtcctgccaccgccgcggggtagcgcaccgcgacgtgaagcccgacaacctcctgttcgacggcggcggcgtgctcaagctcggcgacttcgggtcggcggggtggttcggggacgggaggccgatgacggggctggtcgggacgccctactacgtggcgccggaggtggtggccgggagggagtacggcgagaaggtggacgtgtggagcgccggggtggtgctctacatgatgctctccgggaccctgcccttctacggcgccaccgccgcggaggtcttccagtgcgtgctccgcggcaacctccgcttcccgccgcgcgcgttcgcctccgtctcgccggaggccaaggacctgatgcgccgcatgctctgcaaggacgtctccagaaggttctccgccgaccaagtcctgaggcatccttggatcgtgagccgtgggggagccgcggtgatgggctagttcgttcgatcgaggatgatgatgaactccatccatgtgtagatagcttttcttcaggcgaaggactcgtctgctagctgtgaattttggcttggattagtggcagggttcagtggtagtagcgtattattagtgtttgtgtccagtaggagttaggaccatgacgagctctggtgaattggctggaatttgggagctagctatatctttctacccgagtttgtccgatgtacatacagtgatcagttgatcaccttttggctgaactgaagaagagggtagtctctcttagtgcgtagcaggcttgttcagatgaaaattgaatccaaaaacatgagaaaatttctgtgaattgctgcagttcacctatgcatatttcc

SEQ ID NO: 25639 - DNA, 2996 bp, Oryza sativa
  ref <308>: DATABASE ACCESSION NUMBER: AK101081
  ref <309>: DATABASE ENTRY DATE: 2002-08-28
gactcttttactcggcgcgccttgtctctctctctcagtacgaggggagtagtagtcagtagtcacagcagtagaagtagagcgccggtgccgtcgccaccgcggcgggggtaatgcatgcgctcgcactcgcactgcgcctgctcctccagctgtcgcgatgaggcagacgcgctcgctggcggcggcggcggccgttctggtggtgggtgtggtgctgcattgggtgggggtggtggacgcggcgacggcggcggagagggggatactgctggagttcaaggccgccgtgaccgacccgaacggcgcgctcgcgtcgtggacggcgggaggggacccctgcgtggacttcgccggggtgacgtgcgacccgtcgtcccgcgccgtgcagcgcctgcgcgtccacggcgcgggcatcgccgggaagctcaccccgtcgctggcgcggctggcgtcgctcgagtccgtctcgctcttcggcaacggcctctccggcggcatcccctccagcttcagcgcgctcggccccacgctccacaagctcaacctcagccgcaacgcgctctccggcgagatcccgccgttcctcggcgcgttcccgtggctccgcctgctcgacctctcctacaatgcgttctccggcgagatccccgcctcgctgttcgacccatgcctccgcctccggtacgtctccctcgcgcacaacgccctcacggggccagtcccgaccgccattaccaactgctcgcgcctcgccgggtttgacttctcctacaaccgcctctccggcgagctcccggatcagctctgcgcgccgccggaaattagctacatctccgtccgaagcaactcgctctccggcgccattgccggaaagctcaacgcttgccggagcattgacctgctcgacgtcgggagcaaccatttcgccggaccggcacctttcggccttcttggcctggtaaacatcacctacttcaacgtctcgtccaacgccttcgatggtgaaatccccaacattgcaacgtgcggcaccaagttctcctacttcgacgcctcagggaaccggctcactgggccggtgccggagagtgtggccaattgccgcagcctgagggttctggatttggggacgaatgctcttgctggagacataccaccaagcattgggaaattgaggtcgctttcagtgctcaggctcgcaggaaatgcaggcattgccggttcaatccctgccgagctcggaggaattgagatgcttgtcacactagatcttgctggtcttgctctcatcggagacatcccggtgtccctgagccaatgccagttcttgcttgagctgaatttgtctggcaaccaattgcaaggagtgatcccggacacgcttaacaacttgacttacctcaagttgctcgatcttcatcggaaccatcttgtaggggggattccagtgacacttgcacagctcacaaaccttgatcttctagacctctcagagaaccaactgactggaccaatcccctcagagcttgggaacctgtctaacctgacccatttcaatgtgtcctacaatggactctcgggcatgatccctgccttgccagttctacagagtttcggtagctccgccttcatgggtaacccattactatgtggacctccactgaacaatctgtgtggggctagccggagggcgaaacaattggctgtgtctgtcataattgtcatagtcgcagcagcgcttatacttattggagtttgcattgtttgtgctatgaacataaaggcttacatgaggaggagtaaagaggagcaagaggggaaggaggaggatgaggtgctggagtccgagagcacaccgatgcttgcatctcctggcagacaaggctcaaatgccattattggaaagttggtgcttttcagcaagagcttgccttcaaggtatgaagattgggaggcaggaactaaggcactgcttgacaaagactgccttgttggtggtgggtcagttggtacagtttacaaggccacctttgagaatggtttatccattgctgtgaagaagttggaaacactgggaagggtgagaagtcaggatgagtttgagcaggagatgggccagcttggtaaccttagccaccccaatctggttgcttttcagggttactactggtcatcatcaacgcaattgattctgtcagagttcatggttaacgggagcttgtacgaccaccttcacgggagtcctcatacattttccggaagcagcagcagagttggtctctcctgggagcagaggttcaaggttgcactcggtacagcacgggcacttgcataccttcaccatgactgccgaccacaagtcctgcatctcaacatcaagtcctccaacataatgttagataaagactttgaggctaaattatctgattatggatttggaaagcttttgcctattctaggtagctatgaattgagtagattgcatgctgccattgggtacattgccccggagttagcatctccaagcttgagatatagtgataagagtgatgtatttagctttggtgtggtgttgcttgagattgtgacagggaggaaaccagtggagagccctggggtggcgacagcagtggttctgcgtgattatgttagggcgatattggaggatgggactgtgtcagactgctttgatcggagcatgaagggatttgttgaggctgaattagtccaagtgctcaaattaggtctggtatgcacttcgaacacaccatctgcccgaccaaacatggcagaggtggtacagtacctggagtctgttagaactaattcatgatctcctgacgtcacggtacagtagcagaataggatgttaaaacaggaaaaaacgttttctggtttttgaacagatgatcacattgtttttattctttattgtgtccccagtcacatttgtaaaatgtagatttgcatctgaataagtggttattttggcc

SEQ ID NO: 25640 - DNA, 2771 bp, Oryza sativa
  ref <308>: DATABASE ACCESSION NUMBER: AK101082
  ref <309>: DATABASE ENTRY DATE: 2002-08-28
tgggattggagaagggttggggtttttggcttcgcggaggcggcaaggcgaggcgaatcgcgaggagcggaggaggaagggtagggtttcgcgtcacggaggggaggggatcgagagctcctcctcctccgccgtctccgcctttgctctcttcctttcgcctgttgttgcgagaaggcggccgccattttcttgattccgaccttgcagcactcagatatctgctgaatctggtgatagcgcagcttgttcatctgtatttcacaatggaggatcttccggatgcccttattggagagatcgtcaagagggttagcagtacaagtgatctgagctctctttcccttgtgtcaaagcgtctctacaaaattgaggcagagagcaggcatacgatccacataagctgtagccttggaccagcaacagatgccatagtatcactttgttcccgatttcacaacttgttgaaagtagatatcaattactctggttggacgcaggaccatgggaaccagttggacaaccatggtctccgtattctttcatcatactgcctctcgctgagtgatatcaccttaagcttctgctcatacattgatgacactggtcttggttatctagtattttgcaagaaattgatcaccctcagactgaactctgcaacaaaaataacatcaagtggacttctcgctgtggctgttggttgcaagaatctatctgctctccacctcatcgattgcaataaaatcagtggcgcctttgaatggctgaagtaccttggcagtgatggatcactggaagaacttaaggtgaagaactgtgtaggaatcaaccaatacagccttctaatgtttggtccaggatggatgaagctccagaggtttgtgtttgagttcagaaatatttacagcatatttgaatctaaagatccctcgtatgtggcgaattgccagtatagatatgatttctcctgtgagaatttgaagcaattgagcttgagacggattgtgaccatggaagaaataggactccgctctctcctgggaaaatgcaaatcactagagaaactttgccttcattttgttcttggtctaactgacagtgacatgattacactcgcccagaactgcagcaaccttagaagtatctcacttcaacttgagcctgtcttctgtgaaggacctgaaggtagagtctgcaggacgccgttgactgatgaaagcctcaaggctttagccgggtgccgtatgcttcaagttgttgagctcacaatgtttggttgtgattatgcttatccagaaataggcttcacccaagagggccttatgatgttttttcagtcttgcccaatccgtgatcttgtgctatgtggcgccaatatctttgatgatgaggggatgaaggccctctcatctgcacaattcctgcagacgctctagcttatggattgcgtatatataactgatgctgggatgtgcttgcttgcagatagcccatctttggttaaccttacactgcggcaatctgacggtttttctgatgttggagttggtgaggttgtacgtgcacggaaattggattctctgattgttgaaggttgtagcagggtatctcagaaagctgttctggggactgccaaatctattcgctatgaacgatattatcctggttatgggaagctaagaagatcaagcttgagcttcgggcaggattgagtcccctcaagatcttcagttgttttttggaccccctgttgaagtgcacagcattgacggctgctgttttcatttttcatatttctggacctgcttttggtgattgtctgtcagtcggttatattagcttgtaatagtgatttttataaggcatctgatgtgtgaaaaccatggtaatggtcaacacaatggtaccctgcaaccagtgatttacttatttcctgatgctttcttctctgttcacccatcccaaatccatgaaactcggctactcattgactcaaatgttttaaaagttctgcattgtggaagtagtgaattctggaagtatgaaagacatgagtgcccatattttcaagactttggatggcaatacatgtacatatcatatattggtagtctggaaaattaggtaacccttcccatggttcttaacatatttttctaggggaatgctgtggatccagtcctatgagatgagcaggttttcagtcagttttgatctgaacattcctgcatttgaggagcaagcagatattctcgcaggcggagagtgaagcaatgtcgtgtacaagggatatctgttgatgtaagctcaagaaaaacgaagaattgtgagctataaaaagattggaattgattgaacagtgggactactatactgccccttgcagagggtctggtgtgaacaaaaactcatcacttcttcctatatagttggtacctactacaagtattaacactataaagaagcatgcaggttaagccacgtcatcgataaccaatagccgtcggatcacgtgtatctttctttgttgttgtttagctggaattcattcattcgttcaatggccatgcaggctgtaagtaagcaaaatgccattggtaattaaacacatcaatggatgactcacttgagtgctcctagtcatgcatgcatcccccatattaagccacttctatgtcccttggccatctactacccaaatgccaactttatactttataattttagaatgtttacttttgatatttcaattctttgattctgtttgt

SEQ ID NO: 25641 - DNA, 2439 bp, Oryza sativa
  ref <308>: DATABASE ACCESSION NUMBER: AK101083
  ref <309>: DATABASE ENTRY DATE: 2002-08-28
ttgggtggcggtgaggtacagaagactagaagagtagtggagtttacccgcggtcttgacagcaacgccgctcacctcacctctgctctcctccaccccgcaactcccggcagccgccacgcgcgcgcacgcacgccctgtcgcgatgcactcgcaggcttccgccgcggccgagaaggcggtggtggcgccgtacgggtcatgggagtcgccgatcagcgccgccgccgtctccgccgccgggaggaccgtcgaggggctcgccgtcgccggcgacggccgactcctctgggtcgagacgcgccccgaggagggaggacgagcggtcctagtgaaggaagcggcggagccgggcggcgatgccgtggatgtgacgccggaggggttcgcggtgaggtccctggcgcaggagtacggcggcggggcgttcgcggtgcaaggggatgtggtggtcttctccaactacagcgaccagcgcctttacaagcagaccattggagataactcagcacaacctctgaccccagattacactggatcagtgctccgttacgcggatggtgtctttgatcctcacttctgtcgttatgtaactataatggaagatcaccgaaaggatagctcaaatcccgtgacaacaattgctgctgtaacaataagtgacagagatgctaatgaaccaactgtgctggtcagtggcaacgatttttatgcttttccacgcattgatccaattaaaaggcgtatggcatggattgaatggagtaacccaaacatgtcatgggataaagcgcaattatgggttggatatttctctgagaaaggagaggtacacaacaagatttgcattgctggtggtgacccaacgttagtagaatctcctactgaacccaagtggacttcaaaaggggagctgttcttcataactgaccgagagagtgggttttggaatatttataaatgggatgaggagagcaatttgatagtgcaactgtattcacttgatgctgaattctcaaagccaatgtggatttttggtgtcagctcctatggtttccttggaaaagatgacacgagtaacaaaatcgtttgctgttacaggcagaatggaaggtcatgtgctggagtgctagaccatgattcagggtctttttcagaactggacattcccttctcttctgtaactaacatagtttctggggatgggttcttctatgttgagggtgtatctgctactcttccagtgtcgattgctaaggtgacactggatgaaaagagaaaaacagcaactaatttctctatagtctggtcctcttcagaggatgttatgcaatatgcgtcctactttagtttgcctgaatttatggagtttccaactgtagtccccggccagaaggcttatgcttatttctatgccccgcacaatcatattttccaagggtcgtcagatgagaaacctccgttattggtcagaacccatggtggacctacagatgaagcacgtggagttctggatcttggtgttcagtactggacaagccgaggatgggcatttgttgatgttaactatgggggaagcacaggctatgggagaaaatttcgggagaggcttttagggcagtggggcgtcgttgatgtaaatgattgctgcagttgtgctacatttttggtggaaactggaagagtagatgcgcaacggctttgtgtaacaggagaatctgctggtggattcacaactttagcttgccttgcttttagacagatattcaaggctggttcttctttatatgggattgctgacttagcttcgttgagggcaggcatgcacaagtttgaggcatactacattgacaaccttgttgggaatagaaaggcttactttgagagatcaccgataaacttcgttgatagattttcatgtccaattatattgtttcaaggattggaagacacggttgtgtcaccagttcaggcaacgacgatatataaggccataaaggacaaaggccttcctgttgctttggtcgagtatgaaggggaacaacatggtttccgcaaggccgagaacatcaagtttaccttggagcagcagatggtgttcttcgctagattagtggggcacttcaaggtggctgatggcatcactccaatcaagatcgacaattttgatgaaccctccttgtaagcgttaagaagttattcgtcacctaatcaacttctgggaacaactcgagggaactctggagcaacgctgtcctagctgtagtttgaaataatctcttgaagctttgcatacgactctggtcaatataatggaataaatgcttccgttagctagaatttctcccacgttttcacattgtagcacatttgcaggaattttatatgacttttacgaaatttggtataattctagtaggaattggggaaaatttcagc

SEQ ID NO: 25642 - DNA, 1161 bp, Oryza sativa
  ref <308>: DATABASE ACCESSION NUMBER: AK101084
  ref <309>: DATABASE ENTRY DATE: 2002-08-28
gggccacctcagcacgcgcgcgaattcggagcagccgccgccgcccgccgcagtcgtcgtcgtcgccgccgcctcgccggaaatggtcaagaacgccatccagtacgccgtggtggacgcgttcgcggccgagccgttcaagggcaaccccgccgccgtatgcctcctggaaggggaggatgccgcggcggcggcggacgagcggtggatgcagtccgtcgcagccgagttcaacctctccgagaccgccttcctcatccgcgacccctcctcctccgccgccgccgccgacgccgccccgcggttccgcctccgctggttcacccccgtcgccgaggtgaatctctgcggccacgcgacgctggcatccgcccacttcctcttcaccaccgtcctcgcgaagcagcagcacgccgccgccgccatggtcgagttcgtgacgaggtccggcatcctgaccgccaagaaggttcctgctccgccgcctccggcgaacgatggcggcgtcccgggtgaggagaagttgttcatcgagctggatttccccatgatcgatctcgtggagtacgattccgcggagacgctgtcgattccggagactctgaatggcgcccgagtcgtcagtgtttggaaatcatcaaccgccggtgacctcatcgtggaactttcttccggaaaagaggttgctgatattatccctaacattaatgaaattaaaaaatgtgatggtagaggagttattgttacgggaccagcacctgctggatctgattatgacttcttttcacgattcttctgcccaaaatttgggatagatgaggatcctgtgtgtggaagcgcacattgtgttctggcaccttactggggtggaaagctggggaaacaaaaacttacggcgtttcaggcttcgccaaggagtggaacattgtacttggagctggacggcgagaacaggagagtccggatccagggagaagctgtcactgtgatggccgggactctcttggcgtagcatctctctctgtcagagtgtctggcgatctgcttgctcttgtatgcttgagagttcagcggagaaattgttgttgttcgacgcgtaccgcgaacgattgtaattgatgttatatttgggaataaaaggatctgcaatgtttatgaagc

SEQ ID NO: 25643 - DNA, 3858 bp, Oryza sativa
  ref <308>: DATABASE ACCESSION NUMBER: AK101085
  ref <309>: DATABASE ENTRY DATE: 2002-08-28
gatctcctcctcatcacttcccactctcccccttctgtctctctactttctctctctaccgccgctctcgcagcaggccaggttctctctaatggtcgtgaggcagtgagctcgctcgtacatggattccttgtgggcagcgatagcggcactgtttgtggcggcggcggtggtggtgaggggggcggcggcggccgacgacgcccagctgctcgaggagttcaggcaggcggtgccgaaccaggcggcgctcaaggggtggagcggcggcgacggcgcgtgcaggttcccgggggccgggtgccggaacgggaggctcacgtcgctgtcgctcgccggcgtgccgctcaatgccgagttccgcgccgtcgcggccaccctgctgcagctcggcagcgtcgaggtgctgagcctccgcggcgccaacgtcagcggcgcgctctcggcggctggcggcgcgaggtgcgggagcaagctgcaggcgctcgatttgtccgggaatgccgcgctccggggctccgtcgccgacgtggcggccctggccagcgcctgcggcggcctcaagacgctgaatctctccggcgatgcggttggtgcggcgaaggtcggtggcggtggtggcccgggctttgccgggctggactcgcttgatttgtccaacaacaagatcaccgacgatagcgacctccggtggatggtggatgccggagtcggggcagtacggtggttggaccttgccctgaacaggatctccggtgtcccggagttcaccaactgctccgggcttcagtaccttgacctctccggcaacctcatcgtcggtgaggtgcccggcggggcactttccgactgccgcggtctgaaagtgctcaacctctccttcaaccacctcgccggcgtgttccctccggacatcgccggcctcacgtcgctcaacgccctcaacctctccaacaacaacttctccggcgagctccccggcgaggctttcgcaaagctgcagcagcttacggcgctctccctctccttcaaccacttcaacggctccatcccggacaccgtagcctcgctgccggagctccagcagctcgacctcagctccaacaccttctccggcaccatcccgtcgtccctctgccaagatcccaactccaagctccatctgctgtaccttcagaacaactacctcaccggcggcatcccagacgccgtctccaactgcaccagcctcgtctccctcgacctcagcctcaactacatcaatgggtccatcccggcatccctcggcgaccttggcaacctgcaggacctcatcctgtggcagaacgagctggagggcgagataccggcgtccctgtcgcgcattcagggcctcgagcatctcatcctcgactacaacgggctcacgggtagcatcccgccggagctagccaagtgcaccaagctgaactggatttctttggcgagcaaccggctgtccgggccaatcccttcatggcttgggaagctcagctacttggctatcttgaagctcagcaacaattccttctcggggcctataccgccagagctcggtgactgccagagcttggtgtggctggacctgaatagcaatcagctgaatggatcaatacccaaagagctggccaaacagtctgggaagatgaatgttggcctcatagttggacggccttacgtttatcttcgcaacgacgagctgagcagcgagtgccgtggcaaggggagcttgctggagtttaccagcatccgacctgatgacctcagtcggatgccgagcaagaagctgtgcaacttcacaagaatgtatgtggggagcacggagtacaccttcaacaagaatggttcgatgatatttctcgatttgtcatataatcagctggactcggcgattcctggcgagctgggggacatgttctacctcatgatcatgaatcttgggcacaacctactgtcaggtaccatcccatcgcggctagcagaggccaagaagcttgcggtgcttgacctgtcgtataaccagttggaagggccaatacccaactctttctcggcactttccttgtcggagatcaatctgtcaaataatcagctgaatggaacaattccagagcttggttcccttgccacatttccgaagagccagtatgagaataacactggtttatgtggcttcccactgccaccatgtgaccatagttccccaagatcttccaatgaccaccaatcccaccggaggcaggcatcgatggcaagcagtatcgctatgggactgttattctcactgttctgtataattgtgatcatcatagccattgggagcaagcggcggaggctgaagaatgaggaggcgagtacctctcgtgatatatatattgatagcaggtcacattctgcaactatgaattctgattggaggcaaaatctctccggtacaaatcttcttagcatcaacctggctgcattcgagaagccattgcagaatctcaccctggctgatcttgttgaggccacaaatggcttccacatcgcatgccaaattgggtctggtgggtttggtgatgtctacaaggcacagctcaaggatgggaaggttgttgcaatcaagaagctaatacatgtgagcgggcagggtgaccgggagttcactgcagaaatggagaccattggcaagatcaaacaccgtaaccttgttccacttcttggctattgcaaggctggtgaggagcggttgttggtgtatgattacatgaagtttggcagcttggaggatgtgttgcatgaccgcaaaaagatcggtaaaaagctgaattgggaggcaagacggaaaatcgctgttggagcagcaaggggtttggcattcctccaccacaattgcattcctcacatcattcaccgagacatgaagtcgagcaatgtgcttatcgatgaacaactggaagcaagggtatctgatttcggtatggcgaggctgatgagcgtggtggatacacaccttagcgtgtccactcttgctggaacgccagggtatgtaccaccggagtactaccagagcttcagatgcaccaccaagggtgatgtttatagctatggtgttgtgttgctggagctgctcaccgggaaaccgccgacggactcggcagactttggcgaggacaataaccttgtggggtgggtcaagcagcacaccaaattgaagatcacggatgtcttcgaccctgagctactcaaggaggatccatccgtcgagcttgagctgctggagcatttgaaaatcgcctgtgcgtgcttggatgaccggccgtcgaggcggccgacgatgctgaaggtgatggcaatgttcaaggagatccaagctgggtcgacggtcgactcgaagacctcgtcggcggcagcgggctcgatcgttgagggaggctatggggtccttgacatgcccctcagggaagccaaggaggagaaggattagaaacaacaaccaccgacacacaggagaaacagccggcggtgagtggccaccaacgaggccagtcggcggcgaaatgcccgtagaaacaacagtcattcagaatcagatggatgccattttgaactctccacacaagcttagcaatcgcttctgatggtgctacaagataagaattttccagctgtaggttgatcagtcgaagttgttatgtacctataggagtagatcttttcttctttcttttttcgcagctttcttcgtctccctgtttgtttttcccgtcgcgtcgcagtaagagctgtgtatgtacatatataaatgttgaattttctttggcgcaaaatcaaaatccgcctaggttgctcctcgtc

SEQ ID NO: 25644 - DNA, 1935 bp, Oryza sativa
  ref <308>: DATABASE ACCESSION NUMBER: AK101086
  ref <309>: DATABASE ENTRY DATE: 2002-08-28
cgagcgcggggcaacgcgaaactcgcggagggctcccagacctaaccggcggcggtggcggcggccatgggaggagcctacaacctcaagctcctcgccgccctctccgcgctcgtcctcctcctcgccgcctcgcgccccttcctcccggggctcctggaggcggccctccgcgcccccgtcctcccgcgcgacctcctccctctcctgccctggccggtggcccagccgctgctccgccgcctcgcgctgcgcggcgccgccgacctcctcccgtccttcgtcggcgtcgcgcgggagccaggtgatggcggcgcccgcgccgccgagtggaagggcgcctgcttctacgataaccgggcgtggatggagttccacaacgggactgatgggggccttggaggtggtacgctccatctcgagacaaacaaagctcatagctggacttgcatagacctttatgtgtttgcaacaccatatcgtgttacatgggattactactttgtaggtcgtgagcatacccttgatttcaaagaatgggaaagcgaggctgaatatgaatatgtaaaacgcaaaggagtatccatattcctgatgccatctggaacaattggaacacttagagcactttgggatgttttccccctgtttacaaatactcaatggggtgagaattcaaatcttgcatttctaaagaagcatatgggtgcaaccttcgaggaacgtccgaaaccttgggtgtcagaattaaatgttgacgatatccactctggagattttttggttttatcaaaaattcgtgggcgctggggtggttttgaaaccctagagaagtgggttactggagcttatgctggccataccgcagtttgcctcagggattctgaaggaaagctttgggttggggaatctggtcatgagaatgaacagggagaagatattattgctatcttgccatgggaagaatggtgggactttgaagtaaaaaaggatgattccaatcctcagattgcattactacctttgcatccagatttgcgtgcaaaatttaatgagacagcagcttgggaatatgcaaaaagcatggatggaaaaccttatgggtaccacaatatgatttttagttggattgataccataagcgacaactatccaccgccattagatgctcatgtggttgcctctgtgatgactatgtggaacaaacttcaaccagagtatgctgccaacatgtggaaagaagcccttaacaaacggcttggaactaagggtcttgatctacctgaaatcatagtggaatcagagaagcgtgggatgacatttgacaaattgctaacagttcctgagcaagataagtgggtctatactgatggccagtctgcttcttgtgtggcttacgtccttatgatgtacaaggaggctggactctttgacccaattgccagctctatagaagttactgaattcaccataaaagatgcttacagcctcaacttttttgagaacaatatgacacggcttcccgtgtggtgcaacaaagatgacagtgtcaagctccccttctgccaaataaagggcaggtatcgaatggagttgcctggatacaacaccatgcagccgtaccctcacatgaatgaaaggtgtccttctctgcctccgaattataacagaccgcgaaattgctgatctgttacacattattacgccttgcattttgatatatgctggcttttagtctgtactttagctgtacatatcactgtagtctgtaggtatgcaattgttttctttgttgttactacgaagcaacttccgcaaataaggaagattatgattgcgtgaatgtacagtaaatctctacccttgatgctacaggtgttacactgctgtagggttcacataactttcgtcatatagtaattgacaaatacatgt

SEQ ID NO: 25645 - DNA, 2723 bp, Oryza sativa
  ref <308>: DATABASE ACCESSION NUMBER: AK101087
  ref <309>: DATABASE ENTRY DATE: 2002-08-28
ggtttaggcaaggggtgctacgcgcgggcgcttcgcctccgtcaccatctcgcgagatgatttccctcttccgccgccgccacggcctccccttctccaccctgcacacgccagccggcgacgtcgccgccacgccgccttctcctctcgacgccacggcggtgctcgagacgctctccctctacgccaacgactggcgccgcgcgctcgagttcttccactggtcagcctcccccgacggcgccaacgtgcccccgacgccggccaccgtcgcccgcgcggtcgacgtcctcgggaagcacttcgagttcccgctcgccacctccctcctcgtctcccaccacgacccggggcgcgcggacccgtccttcctccgccccgccctgcgctccctcctcaaccgcctcgccgccgccaatctcatcgacgacgccatccgcgcgttcgattccactgccggttccatcggcctgcgggatgaggcctccttccacgccctcgtcgacgcgctctgcgaccaccgccgcgttgacgaggcccaccacctatgcttcggcaaggacccgccgccattcccgccggtgacgaagacctacaacttgctcctccgggggtgggctaagacccgcgcctgggcgcgcctccgccaactctggttcgacatggatagccgcggtgttgccaaggacctccactcctactccatctacatggatgcccttgcgaagtcaggcaagccgtggaaggccttcaaggtgttcaaggagatgaagcagaagggcatggcgatcgatgttgttgcgtataatactgcaatccattcagttgggcttgcacagggagtcgatttcgctattcggttgtataggcaaatggttgatgctggttgcaagccaaatgcttccacttttaatacgattgttaaattattatgcaaggaagggaggttcaaggaagggtatgcatttgttcaacagatgcacaagtttgggattgagcccaatgtgctcacttaccattgcttcttccaatatttgagccggcctcaggaggtccttggactgtttgagaaaatgctcgagaggggttgtcggccaaggatggacacatatgtcatgctcatcaagaggtttgggcggtggggattccttaggccagtgttcattgtgtggaaggcaatggaaaagcaaggactcagcccagatgcatttgcttacaattcccttattgatgcattgctgcagaagggaatggtggacttagctagaaagtatgatgaggagatgctttcaaagggattatcacccaaaccaaggaaggaactggggactaagattccgggagcagagtctgacagtgataatgcattgagtggcgtactttaatagtttgattactgagagcagtggtattaacatgttctggttatcactaagattatgctgatcttcttttaaagataggcttctttgtgttgaaagtctgaaggagatctgatttgtggtgcacatgagtttaacattgaagtaaaagattgcatttcctctcaactattgcacagctgcccacaggaattatgatgatatccctcaataatggaatgtttgcccaagctgaggacacctgggaagtgggcactagtgtgaattcggagagctattgctcctcacagatctatatgattaccgtggtcaattgaaattacgacatgctgatatttctcaaagcagacaaccttgtctcagggggtcataaataataaattttgtgttgaactgaaatgaaatcagtgacagtggtagcacccatattgcagttacttcttggttgttatcttaccgaactaatgaatgatattaaggacaggacatcccatgccataactaaaggtaagaacaacggcatctcttgcgtacaagactcatgagtcatgacttgttcatacaaattatagttaaacatattgttttggcactgaagttaacagtcttcttgattttgatttgggtactatctacacacgtactgttgttgcattggaaacaatatatgaagtattgttcattcgacgatctttttactggcccttgatgtgatagaacttaacttgaagaccagattgaatcggaacaaaatgctcttattcctagtttcttgaactcaaaagtgatctttttcccctctagtggagttctccttgccatttctgtcactctgtccagttaggaaaatttacatgcagacggcttcgtgcctgcccaattttcttgttgcatcatttggaggaatttaacacaagtattccagggagcagaagaaagcaggcgagggagtgacatcaacagatctacagatggtggtaagatcatgactttgctaggaggatactggacactgataattaattctcggtgctgcagctaccgaagttgatggcttcgcaatctatagcttaatttttaagctgcatggggactggaggattcacgaacagttcaggagcaatgaagctacagccagcaagagaagatgcataccactagtagtacccatacttcgcctagctgcagtattcttttgtcgtttgtagtctgtaccttctgctggggctttatcatggcaacgagatgttccagtgtttagctgccgaaaacctgtcagttggaggcaggtgctcacctgcccttaatggcttaattgcgctgctttgtggagcaactctc

SEQ ID NO: 25646 - DNA, 1944 bp, Oryza sativa
  ref <308>: DATABASE ACCESSION NUMBER: AK101088
  ref <309>: DATABASE ENTRY DATE: 2002-08-28
gtagcctacccgaggctcccctctccactccccttccctcacccgcgccgcatcgcagccgctatccgcgtgggcattccgccgagcacctggcgcgcatggcgatggcttcgcaccacctcgcccagccgcccacgcgcgcggctctctcctcgcgccccacctacccgctctccagccatcaccactcctcccgtctccagctcccgctcgtcagcggggcgcggcgcagcaggctgtcccccgcggtggcgacgtccccggtcgccgccccagcgatggacgccgtggccgactgggggctgaccactctggaggaggctgacccggaggtgtacgacctcgtcgagcgcgagaagcggcggcagcgcgcgggcgtcgagctcatcgcgtcggagaacttcacctcgctcgccgtcatggaggcgctgggctcgccgctcaccaacaagtactccgagggcatgccggggtcccgctactacggaggcaacgaggtcatcgacgaggtggaggagctctgccgcgcccgcgcgctcgccgccttccacctcgaccccgaggcctggggcgtcaacgtgcagccctactccggctcgccggcgaacttcgccgcctacaccgggctgctccaaccccacgagcggatcatggggctcgatttgccgtccggcggccacctcacgcacggctactacaccgccggcggcaaaaagatctccgccacgtccatctacttcgagagcctgccgtacaaggtgagctccgagacaggatacgtcgattatgataagctggaggagaaggccatggattttcggcccaagctcatcatctgcggcgggagcgcgtacccgcgggattgggattacgccaggttcagggccatcgcggataagtgcggcgccatgttgctctgcgacatggctcacatcagtggcctagttgccgcgcaggaggctgcaaatccttttcaatattctgatgtggttaccaccaccacccacaagagtctccgagggccaagatctggtatgatcttctacaggaagggcctgaagcctcccaagaaaggccagcctgagggcgctctgtatgactacgaggacaggatcaacttcgcagtgtttccgtcgctccaagggggccctcacaaccaccaaattgctgcgctagcggttggtttgaagcagactatgtcacctggattcaagtcttatattaagcaggtcaaggccaatgctgttgcccttggtaaccatttgatgagtaagggctacaaattggttactgacggaacagagaaccatcttgttctctgggatctgcgccctcttggcttgactggtaacaaagttgagaaggtctgtgatttgtgcagcattacactgaacaaaaatgctgtctttggggatagcagtgcaatgtcacctggtggtgtccgcattggtacacctgccatgacatcaaggggtttggtagaggaggactttgtacagatcgccgagttccttcaccaggcagtgaccatctgcttggatgttcagaaggagcgtggcaagcttctcaagtacttcaacgagggcctggagaacaacaaggacattgaggacctcagggcggaggtggagaagtttgccacttcattcgagatgcctggcttcagggtatccgacatgaagtacaaggattaggcggcatcgtgcacatcgtcctctttctcttgccctgaactttggcgcccttgaaacctgattactgtggcgtgaatcgtggtgtatggattttgctgaactctgggtagtctctaaccgctttcgtctacctgagctggttgtgccattcagtcgttaaatgctggaattgtaatgatgtggtataataataataactagcatggtggtccgcgcagattgcgcggctagcatcattatattttctctc

SEQ ID NO: 25647 - DNA, 2207 bp, Oryza sativa
  ref <308>: DATABASE ACCESSION NUMBER: AK101089
  ref <309>: DATABASE ENTRY DATE: 2002-08-28
gatgcgccgccgccgccgccggtgaccccccgactcccctcccctcccatgggctgcgtccacggccgcccctccgccccctcccccgaccacccccagcagcccgaccccccgcccccgcccgccgtcgccgccgagaaggcggcggccgaggaggaggaggaggaggaggaggaggagaagaagccgccgaagccggccaggagggagaggcgcgcacggtcgtcgcggtccgccgcggaggcggcccgcctcgggctcggggggagcttcgccaacagggcgcgcggggagcaggtggcggccggctggcccgcctggctctccgccgtcgtcggcgaggccatcgacggctggacccctcgccgcgccgactccttcgagaagatcgacaaggtacgagctccccccgccctcgcgctcgccattgtcgcgagctgagctcatcaacagcgcgcggtgttgtcggtggcgcagatcgggcaggggacgtacagcaacgtgtacaaggcgcaggacacggcgacgggcaagatcgtggcgctcaagaaggtgcggttcgacaacctggagcccgagagcgtccgcttcatggcccgcgagatcctcatcctccgccgcctccaccaccccaacgtcgtcaagctcgagggcctcgtcacctcccgcatgtcctgcagcctctacctcgtcttcgagtacatggagcacgacctcgccggcctcgccgccagccccgacatcagcttcaccgagccacaggttaagtgctacatgcaccagctgctgtccgggctggagcattgccacaacaatggagtgctgcaccgcgacatcaaggggtcgaacctgctgttggataacaatggcatgctgaagatcgcagatttcggcctggcgtcgttgttcgatcccaacaagaatcagccgatgacgagcagggtggtgacgctgtggtaccgcccaccggagttgcttttgggctccacggattatggggtgggcgttgacctgtggagcgcggggtgtattctagccgagttgttggctgggaggcctattatgccaggccgtactgaggtggaacagctgcataaaatttttaagctgtgcggctcccccacagaagaatattggaaaaagtccaagctacctcatgcaacaatatttaagcctcaacaaccatacaaaaggcgaatatcagagacttacaaagattttccacagtcagcactgcgattgattgaaacactgctcgcaattgatccagctgatcgtttaacagcgacttctgcattaagaagtgatttctttacaactgaaccttatgcatgtgaaccatcaagtctcccagcatatcctccaagcaaagaaatggatgcaaaacgaagagatgaagaagccagacgtttgagagctgctggcggtaggactaatgatggagctaagaagacaaagacgcgcgatcgacctagggcagtaccggctccagaggcaaatgctgaacttcaaataaatatcgataaaaggagattagtaacacatgcaaatgcaaaaagcaagagtgaaaagtttcctcctccgcatcaggatggtgcggtctctttggtttctacaaatcacatggacccgttatacgaaccccaagatccctcttcgtttagcactgtatttacacaagagaaaagctctgttcctacttggtccggtcctttggctgatctctctgcagttgggaaacagaaatggaaacacaagtttggccgctcatcaaaacaaccatccactgcccgtgctcggtaaggaaaaggaactgaagagtaatatttatagacagagtcttcagttatggagaaaatactcctcagcagctaccatgcgctgtttcgcaaacgaggcatgcgatgataacttgatttcttcttgacttattgtcattggattatttttcgaacatcggttgtataggctgtggagggagctcaggtagtttacctgtgtacattaggttctgtttttcaattcttatagccctggtgcatttggtgttagattcatttgagtggaagcttagatctctagcatttcaggacatccccttccattgtaacacctttcttcaattgcaacctgtgtaatcattcctcatcgatccaaagcaaatcttgtgttttgattggtctgttgcatggtgacctgaattttcc

SEQ ID NO: 25648 - DNA, 2660 bp, Oryza sativa
  ref <308>: DATABASE ACCESSION NUMBER: AK101090
  ref <309>: DATABASE ENTRY DATE: 2002-08-28
ttggagtgataattgattgataaaccctactgcttctcgccgccgccgccgacgaggacgccggtgggatggggggcgggccgaggacgttcccgggcgggctgtcgaagtggcagcacaagcggatgcacgagaagctcgcgaggcacaaggagcgggggctcctccgccacgagaagcagctctacctcgcccgcctccgctccgagatccgcgcctcccgcctgcccgccgccggcgcctcccctcccgacgacggcgacgggcccacctcctcgcgcgcccacatccgcgccctcgccgaccgcttcctcttgcccggcgccgaggatctctggaacgaagacgacgggcccatccaccgcgccgaccggccgcggccgccgaggaggatcgtctccgttggcgggaatggcggcgaccgccgtaagttggactctacaaagcaggagctaccgaggggtgggaaggagccgcgtctggctgcgttcaatcctaggagggatttccagacggccgcgccctggtggtggcaatggagctcgtcttccgccattccttcgcgaacaaaggaggcatccttctgtttcttcggtcccaagagatcctactcagtgatgcctctgttccaggcgcatcaggagtccagtggtacatcgatggtgccgctgattgctagaggtcttgccagtgctcggattgctccctcgcagttgaatggagagaggttctactcgttcgcagcagggcgatttggcaggaaatttaggccagactcctcagatgaggatgatgaggatatatcaactgcgaagaaggatatgaggtttgcgaggtttggagcatccagtgaggaggaatcaggatacgatgaattggaggcgagaagtgccatcaggaagaaatggagcagtgctgctttgaggaactgtgatatgaagaaggagaggagagcgctcaagtcctatgaggaagaaaacaacgatctcgctggtagcttccgagagctgcgagaggagataaagaacagggaagtgttgggtgctgagcggaggcgttacgagtcgaggggcgaatctttgtttaccaataaaagatttgaggaatgtggtatctctcccctaacagtaaaagcactcactgatgctggatatgtacagactaccgttgtgcaggaaacagcacttcctatgtgtcttgaaggcaaagatgttcttgtcaaggctaaaactggaactggcaaaagtgcagcttttctgctccctgcaattgaatcagtcttgaatgctatgaagagccatacaaatcatcgagtgtctccaatattttcgcttatcctttgccctacaagagagcttgccatccagctcacagctgaggcaaatgttctgttgaagtaccatcaaggaattggtgttcaatctcttattggtggcactagattcaagctagatcaaagacgtttagaatctgatccatgccagattttagttgctacacctggtagactgctcgatcacattgagaacaaatcttcattctctgttcgcttgatgggattgaagttgcttgtattggatgaagctgatcatttgctagatttgggtttccgtacagacattgaaaagattgttgatagtttgccacgtcaaagacagacactactattttctgctacaatcccaaaggaggttcgaagggtttcacagctagttttaaaaagggatcatgtttttgttgatacagtgggcttgggagctgttgaaactcctactaaggtggagcagttgtatctcgttatgccacatgagctgcattttcatatggtttatcgccttctccgagaacatattgatcaggaagtggactataaggtgattgttttctgcacaactgccatggtgactgaatttatgtatataatgcttcgagatttgaagctaaatgtccgagaaatccattcaagaaagcctcagctctatagaactcggatatcagaagaatttcgagattctagtcgcttgattctggtgacctcagatgtttcaacacgtggagtgaattatccaggtgtcaccttagtcattcaggttggtgttccttcagatagagagcactacatccatcgacttggaaggaccggaagagaaggtaaatctggtaaagggattcttttgttgcgccatgggaagagtatttcttaaatgagatacatgatctcccggtgcagaagtctcaaacaccaaacattgacgaggagatgaaacgaaaggttgatggttcaataaagatagttgatatgagcatcaaggaggcagcatatcacgcatggcttggctactacaattcaataggtgatgttggaagagacaagaccatgcttgttgacctagcgaacaggttctgtaaatccatcggtttggaaaagcctccagcactgtacaggaaaactgctctgaagatgggccttaaggatgtacctgggattcgaatcaggaaatagcaattgcatttctttccttttcttttactgaaagatggcagatagattgagtgagagagtagtagtatctgtgctgaacaattatggagtaatatatatttttaaaatttctgaaaggaggcaaagccctccgtataggatgtgtcaaattaaagcc

SEQ ID NO: 25649 - DNA, 2214 bp, Oryza sativa
  ref <308>: DATABASE ACCESSION NUMBER: AK101091
  ref <309>: DATABASE ENTRY DATE: 2002-08-28
gggtggatacggcgggtacactctgcaagcctgtgaacccagtagtccagcagtactcaccatggccgcgctgcgactgccaagagcgccgaccaccgcggcgctcgccgccggcgtcccccaccggttcccggcaccggagggggagcctccgccgccgcgcggccccaacagggcgcacctcaacgcgctgctcacgtcgtacggccgccgcggccgcctccgcgacgcccagctcctgttcgaccaaatgcccagccgcgacgtcatctcctggaccgccctcctcaccgcctacgccgacgggggagacctcgcctccgcgcgcctcgtcttcgacgacatgccccgccgcaacgccccgtcctggaacgcgctgctctccgtctacctccgcgcggcgcgcccgcgggctgcccacgcgctcttctacaagatgccggccaagaacgcggtgtcctacggtgccatcatctcggggctcgccaaggcggagatgctgcatgaggcggagttggtgtatgaggagatgccatggcagtggcgtgacccagtagggtcgaatgcgctgatggctgggtacttgagggtcggggagcttgccatggcactgagggtgttcgagggaatgacggtgagggatgtcatttcctggagcgccatggtcgatggcctctgtaaacatgggagtgtgtcagaggcgaggagggtgtttgacgccatgccagagcggaatgtggtgtcttggacttcgatgattcggggatatgtgaaacgtgggatgtgcagagatggtctcctcctgttcctgaatatgagaagagaaggtgttcaggttaacacaacgacactctcagttgcgctggatgcttgtgctgcggccagtcttgccagagaagggattcagattcacaatttgattatatcaatgggatttgagctggatattttcttgggtgattcaataatcataatgtattctcgttttggttggatggttgatgcaaaaagggcgttcgactgcatgcagcagaaagacatagtatcatggaactcactgatcacaggttacgttcagcatgacatggttgaagaagcacatgtgctgttcaagttgatgcatcagaaggatgctgtttcttggacatcaatggttgttgggtttgctaacaggggttggatgagggaatctgttgaacttttcgagcaaatgccagtaaaagacgaggtcgcttggactgcgatcatttctagttttatcacaaatggggactatctaagtgcagtgcggtggttttgccgcatgtcacaagaaggatgcaaacctaacacaatagctttcagttgtctgctgagtgctttggctagcctggcaatgttgaatcagggaaggcaagctcatgcatattcgatcaacatgggatgggtgtttgactctgccgttcacacttctttggtatcgatgtatgcaaaatgtggaaggttggctgaggcttatcatgttttctcaagcattagcaacccaagccttattgctattaattctatgattacagcatttgtgcaacatggtttcgttgaagatgcgctgaaactatttaccaaaatgcaaaatgctggatacaagcctaatcatgttacatttttaggaattctgactggttgcgcacgtgctggttttgttcaacaaggttacaactactttgaatcaatgagaccagtttatggtgtagagccaaaccctgagcactacacatgtatggttgatcttttaggtcgtgcaggcctccttgctgaagcactggaaatgattaactcaatgccccagaatgatcattctgatgcatgggcagctttgctcagtgctagtagtctccattctaatctcgcttttgcaaaaatagcagcacagaagcttcttgagaaggatccttacgatgcaacggcttacacagtcctgtcaaggatgttctcctcagcagggatggaggatgaagaaatgctaaaagttgtacagctatccaacttggccagtaagaggcctggttatagccttattatgcaggataaggccactgaaatataacacatactgagaaccttctagttgactagttctagatctctgaccgatgaaaacaagaatgatcatgttacatggcactgctaaatgagaattaggatggcataaaaaagatatcacatgacttgtac

SEQ ID NO: 25650 - DNA, 2085 bp, Oryza sativa
  ref <308>: DATABASE ACCESSION NUMBER: AK101092
  ref <309>: DATABASE ENTRY DATE: 2002-08-28
gttcagcagcgcatgcactagcagcttagctactgcgcgcgtaccagagagagatcatcagctcaagtagctaagctagctataatctgctagctagctcgatcagacacttaattacctgctaggtggtggtcgatcgaagaagaagaagatgagtgagcttgcgtcggcgcccaaggtggcgcttggatcgatcgcgttcgcggtgttctggatgatggcggtgttcccgtcggtgccgttcctgccgatcgggcggacggcggggtcgctgctgagcgcggtgctgatggtgatattccacgtgatcagccccgacgacgcgtacgcctccatcgacctcccaatcctgggcctcctcttcgccaccatggtggtgggcagctacctccggaacgccgggatgttcaagcacctggggcgtctgctggcgtggaagagccagggcgggcgcgacctcatgtgccgcgtctgcgtcgtcaccgccctcgccagcgccctcttcaccaacgacacctgctgcgtcgtcctcaccgagttcgtcctcgagctcgccgccgagcgcaacctccccgccaagcccttcctcctcgccctcgcctccagcgccaacatcggctccgccgccacccccatcggcaacccccagaacctggtcatcgccttcaatagcaagatcaccttccccaagttcctcatgggaatcctcccggccatgctcgtcgggatggccgtcaacatggtcatgctgctctgcatgtactggagggagctgggcggaggggccgagctcagcgtcgacggcaagcagatggaggcggtggaggaaggcaggtcgccggcgtcggccaagagcacgccgcagctgaacggcaacggcaacacgatgatgtcgctggagatgtcggagaacataacgaccaagcacccatggttcatgcagtgcacggaggcgcggcggaagctgttcctcaagagcttcgcgtacgtggtgacggtggggatggtggtggcctacatggtggggctcaacatgtcgtggacggccatcaccacggcgctggcgctggtggtggtcgacttccgcgacgccgagccgtgcctggacaccgtgtcctactcgctgctcgtcttcttctccgggatgttcatcaccgtcagcggcttcaacaagacgggcctcccgggagccatctgggacttcatggccccctactccaaggtcaacagcgtcggcggcatctccgtcctctccgtcatcatcctcctcctctccaacctcgcatcaaacgtaccaacggtgcttcttatgggtgatgaggtggcgaaggcggcggcgctgatatcgccggcggcggtgacgacgtcgtggctgctgctggcgtgggtgagcacggtggcggggaacctgtcgctgctggggtcggcggcgaacctgatagtgtgcgagcaggcgaggagggcgcccaggaacgcctacgacctcaccttctggcagcacatcgtcttcggcgtcccatccaccctcatcgtcaccgccgtcggcatacccctcatcggcaagatctgatctcatctcatcgacccatccaaattaattaattatgagatcgacaaacatccaagcttgctaggctcgtcgtcgtcgtcgtcgaccaccgtaccatatatatgcatgcatgccacgcacgtatatatatgctcctcaacctcaagtcaattaattaagagaatggatgaatgaatcaatgttgtgtatgatttcctttttgtttttgttttacccaccgtatatgtgctgtgtggtgtatggccggcgagcttgaaattgaattggccttgcttgcatgcatgcatggtgatcagatcagctcagctagctagctaaatcttgcttaattttatcaagtgtcaatcatgatgagaagagagggaactagatggagctagctagctagcaacacatgcagtgtgtgctaagcagtgcactctgcatgcttaaatttgcttgcttaattcaacatcgtattacatgtatgttgatatgtgcatgttcctcaaaatacatggaaaaaaaatgtttct

SEQ ID NO: 25651 - DNA, 1437 bp, Oryza sativa
  ref <308>: DATABASE ACCESSION NUMBER: AK101093
  ref <309>: DATABASE ENTRY DATE: 2002-08-28
gacagccggggggagctgctgaggactgaggtaggggaaagaagagaagagaagcaagcaacaccaacagcaacacgcaaggagtggaggactcttcaaggtctggagagtggagaggaagaggaatcctcctcagtcctcaccttcagatttcagaacacaggcaatcggccctagctgcaatccaacaagatgggcatgcctctgctgctgctgctgctgatcctcgtcgctgctggcccccaggcaggcagagctgcaaagccaatcccaaatctccagctcatgaccaaggagggcggcagttcaagaatcatccaggacgacatcataaaggcaatcaacaagcatcccaatgctggctggacggctgcacggaatccatactttgcaaactatactactgcgcaattcaaacatatccttggagtgaagccaacaccgcatagtgtgctaaatgatgtccctgtcaaaacttatccaagatcgctgatgcttccaaaggagtttgatgccaggtctgcatggtcacagtgtaacacaattgggaccatacttgatcagggtcactgtggctcgtgttgggcatttggtgctgtggagtgtctccaggatcgtttctgcattcatttcaacatgaacatttcgctatctgtcaatgacctagtggcatgctgcggtttcatgtgcggcgatggttgtgatggaggctatcctatcatggcatggcgctactttgttcggaatggtgttgttaccgatgagtgcgatccatactttgatcaggtcggttgtaagcatccaggatgcgaacctgcttatcctacgccagtgtgcgagaagaaatgcaaggtgcagaaccaagtttggctggaaaagaagcatttcagtgtcaatgcatacagagtaaattctgatccacatgacataatggcagaggtctaccaaaatggccctgtagaagttgctttcaccgtttatgaggattttgcacactacaaatcaggagtatacaagcacatcacaggtggcatgatgggtggtcatgctgtcaagttgattggatggggaaccacggatgctggcgaggattactggctgcttgcaaaccagtggaacagaggatggggcgatgatgggtacttcaagatcataaggggcacaaacgaatgtggcatcgaagaagatgttgttgctggtatgccctcgacgaagaacatggtgaggaactatgatagcgccttcggagtcggagcggccatagtttgactttaatcaatgttaatggcctcaaatacggttgggatcatgtaaatttgtcctgggtgatttctggattttgcacacacgggcaggcttctcgagactgatcggagtttaggctacttgtccagaaacacattggaataatatctgaataatagatgtattctctct

SEQ ID NO: 25652 - DNA, 2784 bp, Oryza sativa
  ref <308>: DATABASE ACCESSION NUMBER: AK101094
  ref <309>: DATABASE ENTRY DATE: 2002-08-28
gggtttttgggtcggccttgttcgagcgctccacttgctcgcgttcaaatggcggcggcggctttagggctcccggcctgcggcggtgcggctccacggcggatcgagccggcggcggtggctcccagcggaggcggcagcggtgtcggcgcagctccaccgcggatcgaggtggcggcggcggcagcttcggcttcgcggtgtgctccaccgcgggttgaggcggcggcggctgggcgtgctccttcagtcctcctcccatctccaactccccccaagactgttccttctttcggcggcggatggaggcaccggcgggcggcggctacctgcttggtggccaaccggcgaggtgctccggaggacactccaccggcagcaacggcgagggtttcggaggacacccggccacatcgccaccttcttccagctgggtttctctaactcgtgagcacaatgaggaaatgcggacacccaacgcattttttggacttggcactaacagtggtgaagatattgagatgggtgatggtgatagtgactctgaacaagttggtcctgtagatgagcatgtgaatccagtaatacaagctttaacaaggaaattcagatctgaggcttggaaagagtttgtgccgatactcattgataatgaagttggtgcaggaaaatgtaagcactgtgatacagagatccgtgcaaagcgtggagcgggaacaagttcattgaggaagcatttgacaagatgcaagaagcgaattagtgctcttaagattgtgggaaatcttgactctacacttatgtctcctaatagtgtaaggttaaagaattggagctttgatcctgaagtttctagaaaagagctcatgcgaatgattgtattacatgagttgcccttccagtttgtggagtatgatggatttagaagttttgctgctagtcttaacccctacttcaagattatttcgagaacaactataaggaatgattgcatcgctgcttttaaagagcaaaagttagcaatgaaggacatgttcaagggtgcaaattgtaggttctcattgactgcagatatgtggacttcgaaccaaacaatgggatacatgtgtgtgacatgtcatttcattgacacagattggagagtacagaagaggattataaagttctttggagtaaagacacctcatactggagtgcagatgttcaatgctatgctcagctgcattcaagattggaatatcgcagacaaaatattcagtgttactttggattatgcttcagccaatgattcaatggctaagttgttaaagtgcaatttgaaagctaagaaaactataccagcaggagggaagctacttcacaaccgatgtgcaacacatgtcatcaatctcatagccaaagatgggttgaaggttattgattctattgtttgcaacatccgtgaaagtgtgaagtacagggataattccctatctcgcaaagaaaagtttgaggagatcattgcccaagaagggatcacatgcgagttgcatcccactgtggatgtatgtactcgttggaactccacatatctaatgctcaatgcagccttccctttcatgagggcttatgcttcattggctgttcaagacaaaaattacaaatatgcaccctctcctgatcagtgggaaagatcaaccatagtctctggaattttgaaggtgctttatgatgcaactatggtggtgtctggatctttatatccaacatcaaacctttatttccatgagatgtggaaaatcaaattggtcttggacaaggaacactctaacaatgacactgaagtggcaagtatggttcaaaagatgaaggacaaatttgacaagtattggcttaagtcttacaaatatctgtgcattcctgtcatttttgacccaagattcaaattcaattttgtggaatttcggcttgggcaagcctttggtgaaaatgctaaagagaggattgacaaagttaagaagagaatgaacatgttgtttaaggagtactctgataaactcaaggatagcaatgctaacccactgcgccaagctgaacatgtgatggctatctctgaaaatgatcctatggctgattgggttcaacacatctctgaacaatgaagtgagcaagttgatactgaattggatatctacctcaaagagaatcctattcaggaatttgggaacaaatttgacattctaaattggtggaagaccaatcactcaaagtatccaactctcgcttgcatagcacaggatgtgctagcatggcctgcttcaacagttgcatctgagtccgcattcagcacaggatctagagtgatcagcgatttcagatgtagccttacaatggattcagttgaggcgcttatctgcctccaagattggtttcgagcttctgccggtcctaacataaatgtgagctcagtaaatgaaatcaactacagtgataattttgtgaacctggacctggaggattccatggatggacaggatggtggaagcttgtgaatgcccaaacaaaggatctggatattgatgaatctggacctgggtgattcaacgaacagtgcaagctagggaatgccaaatgatgcccactttgatcttggaaggctgcattttgtttgatctcaatataatgaaccggatatttgggttgttcaaatcgatttttgtgaatgatatgagtacatgcatgtacttagttttaattgaactgggtgccagtacccagtgattgatgtttgtacttttgaatgcg

SEQ ID NO: 25653 - DNA, 2971 bp, Oryza sativa
  ref <308>: DATABASE ACCESSION NUMBER: AK101095
  ref <309>: DATABASE ENTRY DATE: 2002-08-28
gggattgctctgcgaagccgagccctcacagatagagaagaaaccctcgcttcgccgcttcgccggcgcggctggccggccgccaccggcgataacctcgccgccgacgactccgcatccgcttccgccgcagtccgccgcacccggtggggaatggcttcggcggtggagcggagggagcattcccggaggtcggggcgctcgaggtcgcgctcgccggcgagggaccggggctcgccgccgcgcaggagggagaggtcgccggctgcgaggagtcggtcgcctaggaggaggtctcctgttaagtctactagctcacatagggagaggtcgcctgttcggaggaatggctcacctaggaggtctcctgttaggagtattgggaggtcgccacaaagagatagggtgaaggagcaggtcaggtcaccgaaacagtcatggtcacggtctccgtcacctgccaggaaacgggagtcttggtcgccatcgccgcagagcaaacggctgagaagggctcagagtgagcgggaaggtgcagatgctactgagggtgaccgccggaagaccaccagggagcgtgatgagggaaaggatgtgtcaagggatagaaaggctgagagggaggagggctcttttaaggacaggaaactggattgcgatgatgatagggatcactcaagagatagaaggtctgatcggtcgggtgcttcaagggagacatggtcaagccgagattatgaagggcgtgattcaaggggtagaaggtctgatggggatgatcaaaaaggcatttgcagggagcaaagggcagatcatgatgatagaaaggattctgcaagagagagaagggcagaccgggatgagagcaatggtgaatcagggagatcatctaggcgtgggcgatcagtgtctccagaagagcataggcataggggtagacatgaatcccaatcccaccagtcaccgaggtcatctagaagtgcagcacgtggtgagggacattctgattggaagaagtttaggccaggcttgccggaatatttgcctgaaatggaccgaatgtttgagggtgttgctgtggatggttccgcatcgtttgtggccactgccgaggagcctatagagtgtgatagctctgacgaagcggatggtgatgagcaagaggacgagctgacccctcttagtgttggcaacaaaaggacgagtccaagtaaaaagtccaagagtccagcagtgagggcaatggttagcaacatgagggagtacaatgaccttcaaaggagcaaaatcagcctaatgcaatccatgttgcaagttatgcaggatgtcgccgaagccaaacggaaagccgccgaagccgaaaggagagccgcggaagcccatatgatagccgccgaagctcaagccaacgctcatgagatgaagattaaaaaggtactcgagatggccggagtgtggggtcactccagaaggaagcccaaagctgttcatgggcgtggtcaacattacccagaatggtagcgcgatggatgcattcattcacacctgtccagcaggaaggatgctcatcatcaagaaatatgttgaggatgcagggcagtcgttgtcgtcatcattctcgtcgcggtcgtcgttattctcgtcattctcgtcgtggtcgttgtcagcatcccacaatcgtcgtgctcgaagacagcgcatggatgaagacttaaacaagatgatgttggacttgttggacgatgatgacgaaggtttcttccacgttatgtttcagtatgccatccacattgacaagcatttgactagagtgagtataggcaacctgccttgactgggttgtaatgggtacataataagcttggggatagaaaggcatgttataacatgtttagaatgagtccaactatgttcctcctcctgcatgacctattggttcagtcctatggcctaaaatctagtagcaaatccacctcggtagaagctcttgcgatgtttctttggatggttggcaccccacaatcagttaggcaagctgaggacagatttgagaggtccatggggactgtaagtagcttgtttaacaaagtgttgcagtctgtggtcaagcttgctgttgatgtcataaagcctgtggacccgcaattcagaacaatgcacccaagactgaggaaccgtaggttctatccctacttcaaggattgcataggggctatagatgggactcatgtcccttgcgtggtgccaaacaacaagttcatgcagtacttgtgccgcaagggcatgaccacacaaaatgtcatggctgcatgtgacttcgacatgaggtttacatttgtactatctggatgggcctggttcggtacatgacatgagagtatttgatgatgcacactcaacatacaaccatgtgtttccacatcctcctacaggaaagtattaccttgtggactccggctaccctaaccggccaggttaccttgcaccttacaagggaaccaaatatcatctacaggagtatcgagacagccctgaacctcaaggtaaggaagaaaaattcaactatgcacactcatctcttaggaatgtcattgaaagatcatttggagttttgaaaatgaagtggcgcatgttggaaaaaggtctctagttatgctcctaataaacaggccaaaatcatagttgcatgctgtgctctccataacttcattagggttagtggcatacgggataagcactttgatcgttgtgaccgtgatgagaactatgtgccctcacaagctactgccgatcagcctgagacagaagaagtgtttgatgattgcgatccgatggatgcatttcatgattccattgcactttgtttggttaaccgttcttgaaagttgtttgtaaagcacaaacatggttatgtactgtaatgcttgcgactgctgtgtatgtttgagaacattttttcggttcctattgc

SEQ ID NO: 25654 - DNA, 3085 bp, Oryza sativa
  ref <308>: DATABASE ACCESSION NUMBER: AK101096
  ref <309>: DATABASE ENTRY DATE: 2002-08-28
ggctagcatgtactactacactcctaatctctctctctttctcgagtggaatccattgatccattgtgtagtgggagagagacttctctacgcggtcacgggttccccagcggaggagaaagatagatagagagagcaaagagcaaaaaaatctctcttttttcttcttgttgtttctgcagttacctttgtcttgccttcaatgccaccgctttactgccggatctgaggaaagctcccatccttgctgagttcttgtgctgcttcttccacaattcttccttttgttgagaattttgccttccatctgcttaatcggtgacaaaggtggtgggatcttgcttctcttcctgcaagaaaaggctcgtttttttgtttcgccgtttgctgcttgctcaggcaggaggaaggcgatgctgttcttgctgatttcagtcttcttcttccgatggtcgaggtgaggtttgttgctacttcacctttcgcttcgttgcgctctgcggagagaaagaaagcaaaggtggtggaaaagaagcgaaaattttgcttgcttcctctgcaaatctgaggaattttctcgcagaaagcctgaattccctctgaattccggtgcatggaaagatcgtcccctccatttccaagaagaagaagatactagtagcagctgcagctacactctagtagtagtggctactagtactagctagcctccaatggcgtcctcaccgtctccctccccgggcaccgcaactcccgccaccgccgccgccgcgccttccaccgcgaccccaacacccgcgacgcagcccaatgccacgccggccgacccctccatcactcccccggccgcgtcccctccccttccctccgccgccacgccacccccacagcccgattccccgccgccctctccgccaccagctcctccggtcgcagtgccaccgccggccaccgtgccaccgccgcctgtacccgttgcgtctccaccaccaaccccgtcagccacattgccgccgccgtcgccaccggcttcagtgccggtgccacctacacctgctactacccctccaaagccgtcgcctgtgcagcaacccccagtggctgcatcaccacctccatcgtctccggctgatttgccgccgcctaatccgccggctcgctcagacacgccgccggtagtgcagtcacctccaccgccgcaccggagatcgccgagaacgccatgggctccaccgatggcgccgtcgccttctggaagtcctaccaagccttctccagctagtccatcaccaattgctggagatccaatcatccctacacccaataacccttcgtcgcctctggcgacgccatcagcaccaggctctggtactcctgtggtgacgccatctgcaccagtctctggccctccatcgccaggcacggctccagccacggcagctgatcgatccaacaagtcattaagtcccaacacgcaggacggcagcgtctcgtcgagcgatggtggaatgagctcaagtgcaaaggcgggcatcggtgtagtcgtcgctattcttgtgcttagcttggtaggagctgcattttggtacaagaagaaacggaggagagcaaccggttaccatgcaggatttgtgatgccatcgcctgcctcgtctccacaagtgttagggtattcaggtaaaactaactacagtgctggcagtcctgattacaaagaaacaatgtcggagttcagcatgggcaattgtcgattcttcacttacgaggaattgcaccagatcacaaatggttttgcagcgaagaacctgctaggggaaggtgggtttgggtctgtttacaagggttgcttggctgatggaagagaggttgccgttaagaaactgaaaggtggtggtgggcagggggaacgtgagttccaggctgaggtggagataatcagtcgtgtgcaccaccgccatctagtttctcttgttgggtattgcatttcgggggaccagaggttgcttgtctatgattttgtgcccaatgacacactgcaccatcatcttcatggacgtggaatgccggttttggagtggtcagctagggttaaaattgcagctggctcagctcgagggatagcatatcttcatgaagattgccatccccgaattatccaccgagatattaaatcctccaacattttactggataataactttgaagcccaggttgctgattttggccttgcaagactagctatggatgcagtcacgcatgtaactacacgggtgatgggaacttttggttatctggctccggagtatgcttcgagtggcaagttgactgagagatctgatgtattctcttttggcgttgttctcttagagcttattaccggtagaaagcctgttgacgcatcaaaaccattgggtgatgagagccttgttgagtgggctaggccattgctcacagaagcaattgagactggcaacgttggggagctgattgactccaggctggacaagaacttcaatgaagctgaaatgtttcgaatgatcgaagctgcggcagcttgcattcgacattcagcatctaggagaccccggatgagccaggtggtgcgtgttcttgatagcttagctgacgtcgatctaagcaatggtattcagcctggtaagagcgaaatgttcaatgtggcaaacacggcagaaatcaggctgtttcagcggatggcttttggtagccaagatttcacaactgatttcacccaatctagctgggatagtcgtagtagagatgttgatgcctctggttcgaggcccttgtaatcatagtctaatactcctctaattagctagggtattgttgcattggatttgtttcatctgattttgttttcttcttttttgtggccatctctgtcaactaggagtaatgtatatcatgcgtcccactaagaaaagtgtatattgattgcactgagcgtgcctgattctacaaaatctgacagacagaagatttactagtactagcccttgaaggaaccaatgaattgcctctgttggtggtgactgaacctgcatattccactctatatttcctc

SEQ ID NO: 25655 - DNA, 2808 bp, Oryza sativa
  ref <308>: DATABASE ACCESSION NUMBER: AK101097
  ref <309>: DATABASE ENTRY DATE: 2002-08-28
gagattggttttatgccgtaatcaaaccggattagtttctcgccggagagagcgagcgagagcgagagagagagagagagagagagagagagaggagaagaggagaggagagcggccgcgtggggggaatctgctcgtcgtcctcatcggcggcggcggcgttgaggcggttgcggtggttgggtggtggtgggggatggggaatcaggtgggagggaggaggaggcggaggccggcggtggaggagaggtacacgaggccgcaggggctgtacccgcacccggacatcgacctcaagaagctgcaccgcctcatcgtcgaggccaagctcgccccctgcttccccggctccgacgacccccgcgccgacctcgaggagtgtcccatctgcttcctgttctaccccagcctcaaccggtccaagtgctgcgccaagggaatctgcacggagtgttttctccagatgaggacgcccacctcgtgccggccgacgcagtgcccttactgcaaaatggcgagttacgcggttgagtaccgcggtgtcaagacgaaggaggaaaagggcactgagcagattgaggagcagagggtgatcgaggcagatccggatgcggcagcaggagctccaggacgatgctgagcggatgaagaagaagcaggctgctgctttgaccgatgtggtaacaactgcacaagtagaacattgtgatactggtggcgcatccaccacagtcaaaagcagtgggcaaggcagtgatatgctctcatctcaagtgcagcatgcggagttactgctgaagacttctgaacgcttaaagcagatgcggttcgtactgcttactgagttgtgcttgatattctgtaaaagtagctgcttattgttgcatcagtgcaatttagatcaaagtcatgacagtatctcaatgactgactaccgtttaagatctgaaatgtctatatctggtccctccaatcctcaaatagtttaagttttcgtccctcaactccaatattagccagaactcatcagtcaactatcaaaacgtctaaatatgttcttgggcatgttttccaagtggttttgagtgccgcgccatccttttttgccatgtcttttaccacatcaggcaaacccacatattagtttttttcctctttctttttaatagaaaacaaatggcgaggaaggggatgaaaataataaacctaaatggataatctgttatctaacatatccaattactttcttatttttgtgacttgtttcccatgtattcagcccaataggatgccattcaggacaaaaccactgatgtacttagccagggacattatttgtatggtgttgatagttcagggacgaattctgtccgttattggaattggagacaatattaaataacgtgcagagttgacaaaacaaatataagactttttcctgagatgtttttttattgttttgtcaatccgtcgactagataagtacaggcctttcaaatcttggttttggtgctctgacttttgcttcttcttcttttttttttttttgggggggggggggtcaattttattgatctaatgtttgttgcagcaccacagcatgtgtagtaaatgatagttatttttgtttttgacttatctagaaatcattctattatgtaagaagtataacgggcaaacatgtataatctgaaagcttatggcctctgcaaagttcagaacgttaatttgtttgtgggtgattttgatattgaaatgagtatttgttctgaaaatttcttttccacagtacacctgtttgatgacattctgctatccacttctccttccttaattaatgtgttccttttatggtgctagtatatgccacaaatgctgatttgctgggaataattactgatgaattccttaaagcgcaggaataataattttgacatggatcctgacgaagttatgcttgttgaagcactttggctttctctgcaggatcaggaagcctcgggaaatccaacctgtggtaacacagtctcatcagtacatcctccgagaagctttgaaggttccatgacaattccagctgaagcagcttcttccagtagtgcatttgcttgtgcagtcgcagctttagccgagcaacagcagatgtatggagaagcttctagcaccgctacttgccacacgtcaagatgtgacattctcagcaggtcagacagatcttttacagaggatctgagcataaacgggagtggttcctcaggcgctaggtctgaggaaccatcgagcaacaaaatgcaccaaacaagggagggtatggagtattctaatgagcggtggtcagagatggccgaggccagtagcagctttaccggctctgatcttacaacagaggctggagctgccaattcaggtggatccgacactggtgctggcagtattcctgatagtttcgaagaacagatgatgctggccatggctctttcgttggctgatgctcgggccaaggctagttctccagggctaacttggcggtagcatttggcagtgctttattctttagctgggtcgtgtttgtttgttcttgtagttccttttgtcacataaaaacataggattagagggggaacagataagaaaaaaaatctagcctggatgttgtgaatatagtgggataaaaatgcacatttgcagtcagtctttgcccttttctcatgatctttttttttctttcttcagaaagatagattctgtcaagcagaccttctgtctgcatacattgtgccttaatgacttttcagaattggtgtaaat

SEQ ID NO: 25656 - DNA, 2496 bp, Oryza sativa
  ref <308>: DATABASE ACCESSION NUMBER: AK101098
  ref <309>: DATABASE ENTRY DATE: 2002-08-28
ggtctgcgcggcgccgccgccgaatcgcgccgccgagccgaacgctctcccgtccgggatttccaaattccgttcgcgctctctctctccctatccgcggcgcagccgcgcagatggggggctcctcctgggccctggccgagaagacacaggggttcgttcctcttctcgctgcgccgctgcgcatgcaccagaaataataatttgttccgagcagtagccattagagtagttgtttgtgcaaggacccagtgtcccagtgtgaacctggccatgaactcacttgtcgcactcagaggaggtttagtggcttactggattgagatttcatacatccctttccaatctactaacgatgaagacgacgcgaaaccaatgaggacaccggtgaggcgagtctcgggacatctatggtctagtgggaatgcgccgcaaaggagtcgtcaattcgtcatgcgttgatgcacatgccgttgaatataactacaatcttcaatcatcgggtatgcattagaaatgttttgttttcattaatcattatccagcttcagctatcccgtgaagctgtacacatccttgctagttgctatcaccaataattttcgtcatgtgattgtgatccaatctgttgcgttgacgctttgatataatggcgtatatagtactatgtgattggctgaggtgtataaaatatttattagttcatctaatctcatattaattttcttgggaatgcaaccctttgcttcctttattcctctgttcccttccaagattgctctcttgttcaatttgtgtatgagttttacctttctggcttgtcattatatgtccctcttccttctaacattgggtgcgcagctcctcatatcacagagtgatcactgtaagtgttgttttgcgttctaagttctcatttctttatacatgtatttggcatggtcactctcaattctacttagttcttgtttttcttgatctagggtcatcctagttgactacaaacatggcatatggtaaaggagaacaaagagtagctacgactcagggaaaatgttggggtattttcatttgctggcttctgggaaatgggtgcctctttgggttcaacagcatgcttacaatcgaagattactacacctttctctttccgaattaccatccaacaagagttgttactctcacctatcagccattcgtcctccgcacaactgccatattcacgtatcatgaggcaaaggtcaacactaggttgcgcaatttggcgggttacacactcttcttcttgagctcatttgcagcgatcgttttggatgttgcaacttcagggagaggtggaatcacgccatttgttggcgtgtgcatcattgctgctgcctttggtgttgccgatggtcatgttcaaggtggaatgacaggtgatctctccctgatgtgcccagaatttatccagtccttctttgctggactagctgcatcaggaatgataacctctgcattgaggcttataacaaaggcggcttttgagaattccagggatggccttcgcaaaggagctatgttgttctcctcaatatcatgcttctttgagctactatgtgttctactatatgctttcatcttcccgaagctgccaatcgtgaagttttatcgttcaaaagcagcttcagaggggtctctgacagtcgctgctgatcttgctgctggtggcatccaaaatcgcgcaaatccactgtctgaagaagacccttcctgcgttgaacgtttgagtaccaagcagttgctactacagaacacagactatgcattggatttgttcttgatctatttactgacactgtccatctttccgggttttttagctgaaaacactggatcacacagcttgggctcttggtatgcacttgtcttgatcgcgagctataacgtatgggatctgatcggaagatacatacctctgattgaacaagtcaagctaaggtcccgcaaggtgatactgatcgccgtcgtctcgcggttcttgctcattcctgcattctactacactgcaaagtacagtgaccagggctggatgatcatgctaacgtcgtttctcggtttgagcaacggatatctcaccgtctgcatcctcaccgaagcacccaaagggtacaagggaccagaacaaaatgctttgggcaacttgcttgtgctttccctgttgggaggcatattttgcggggccattcttgattggctctggttgataggtaaagggtggtgaccattgatcgacttgtgtaacatattcttcaatgttttgtgcgagtgtatgggaccctggatgcaattaagctccagtcacagcttgaacagtctcttctgctgaaaattaaacctgcaaatgtatcgaaatggtgaggaggaaagcgaggaagaacatatgtaaaggcatatttttgagatgtaaaatattatgtcttgcatagttgcattacatgtctttttcccattttc

SEQ ID NO: 25657 - DNA, 2306 bp, Oryza sativa
  ref <308>: DATABASE ACCESSION NUMBER: AK101099
  ref <309>: DATABASE ENTRY DATE: 2002-08-28
gtgtgtcacctcatcaccgggagcatacaagagagaagagtggatatgcgcgttgtgaattttcgatgtttcaggcagcacatacggatgtttctcgtatttcgatcaaaatgttaaagtggggattttgatggcgtttctttttttttttttttttgtggcacagttcctcagcaagacaagcgcacggcttcacccactcacctactacctctgcgttgtttcgccccgtctgctagcgcggcgggtcgttgtcttcttcatcaacaggaggcggcaagtagccaacaagtagcaacggagtctcagatcagattagccgccacaggggaggggagaccatggacgaggccgccgccggccaacgcgccagtcctcttcttgccaagaatgatggatcaagctatggtgaagaatcacagagtttattggaagaacaggagccacaggttaaaactaaacaatctggctggagagcaccatcaatcattctgggacttgaatgcttggagagcatggctttcaatggcattgccacaaatctagttgtgtatattcgctcagttctccatggtggcatcgcttccagtgcttcaacttcttctctttggtacggtactagtttctttgtgcctatacttggagcaaccattgcagatacttactggggaaactataagacagtcttgatctcctttatcatgtatttacttggtacggtattcattactgttggagcttttctgccttctgctccagccttatgcaacacggaatcatgctcatcaatgaatgggactcaacatctagtatacttctcaggcctgtatctcactgctattggttgtggcggagtaaggtctgcgttgcttccgcttggtgcagatcaattcaacaacgatagcagtttagatatacaaaagagaaggaatttcttcagtttattctacatttgtgttatctttggtgtgattacttctggcaccatcgtagtatggattcaggaaaatgtgagctgggctataggatatggtgttgccactgcatgcatagctcttgctctgataggctttttggtgggaacaccaatatttcggcgacatgagccccatggttctccagtaaggagtgttttccaggtcattgttgcctcttttaggaacttggccttggagcttcctgctgatagctctcttctttatgaggtcaggagaaagaacacacagaagagtgaaccaaagttggctcacactgatgatttcagattcttagacaaggctgccattatgtctgatctgagcttggaccaagacagttgcacaagtccatggaggatctgtactgtaactcaagtcgaggaattgaaaatactaatccgtttacttccaatatgggcaaccgggatattcttttgtgttgggatctctcaaatgcacaccaccttcattcagcaggggactgtgatgaacaccaagattggctcactctccattccagcagcttccctgtattcatttgaagtgatatgcgtgacattctgggttttcctggtgaacaaagtcatcataccagtgaccagagcatgctttgcaaacggggcggaaatgacgcagctgcagaggatcggcatcgggcgattcctgatgatattcgccatggcgatcgccgcatttctagagatgaagaggctagagagcgtccaggggggcgatcagcccctgagcatcgcgtggcagctcccgcagtacttcgtcatcgctggggcggagtgcttcaccatcatcactcagctggagttcttccacggtcaggcgccggactccatgaagagcatgctgacggcactcgcgctgctcaccaccgccctcggcaactacttcagctcggcgatcatcaccctcatcgcgagggtgaccgggacatggcatagccctggatggataccagatgatctgaacaaagggcaccttgactactactactggtgtctcgcagccatctcagctgtaaatttcgttgtttacatctattttgccagtaaatacaagttgaagaaggctgtcatccaagtctaaagtttttgtaaagttaccaattgccaccacgtgaagtgtttatagattgtatatgttaaattatactccagttaggttttagaaggaccattatatcccaaaatagcttcaggttgatctgaggaagctacccgtatcggcaaatgtacttaattcaatttgtcaaaagaattatgtatccctaatgttgtaatttcacaatgagtagtagaatgatagttttacttgtgc

SEQ ID NO: 25658 - DNA, 2238 bp, Oryza sativa
  ref <308>: DATABASE ACCESSION NUMBER: AK101100
  ref <309>: DATABASE ENTRY DATE: 2002-08-28
gacacatcatttggccacccccacccccaccacacctccccttccatcccccatcgatctcctcccccccattcttccagaaccttccagaacctcctcccgatccctcccctcccttccccttcccttccccgcacgcgccatggtgtcgtgacgtcggcggcgggagcggaagatggacccctcctccaagtcccccgacgacgacgacctccgccccgaggcggaggcggcgaggcggccgcagccgcagccgcagccgcgggagtggcggttcgcgcaggtcttcggggaacgcgcggcgggggaggacgtgcaggaagttgacatcatctctgcaattgagtttgacaaatccggtgaccatcttgccactggagatagaggtggtcgtgtagttttatttgaaaggactgactccagggatagcgccagtcggagtgaacttgagagacaagattacccgattgccaggcatcctgaattccgttacaagactgaatttcagagtcatgaacctgagttcgactacctaaaaagtttggaaatagaggagaagattaacaagatcaagtggtgccaaacagccaacaacgccctctttctcttatctacaaatgataaaacaatcaagtattggaaggtgcaagagaggaaagtaaaacgaatttcagtgatgaatttgaatacctctcaaagttcaggcaatggcacaacttctagttcaagcagcagtagttctagagcgattcttccaaatggtggatgctcagagaagttatacaacttcccaaacaacgacctattatttcctcctggaggatgcacatcattgcgtctgcctgtggtagtcactggccaagatttgaaccttgtaccaagatgccggcgtgtatattcacatgctcatgattaccatattaattccatttcaaataatagtgacggggagacatacatatcagcagatgatctgcgaataaatctttggaacctggaaattagcaaccaaagctttaatattgttgatgtgaagcctgcaaacatggaggacctaactgaggtgatcacatgcgcggagttccacccaactcattgtaatacattagcctatagtagctcgaagggctctatcaggcttattgatctgcggcaatcagcactatgtgacaaccatgctaagttatttgaggagcatgaggcacctggatcgagatccttttttacagagataattgcatcggtttcagatataaaatttgcaagggatggaaggcacattcttagtcgtgattatatgactctcaagttatgggatataaacatggattcaggcccagttgcaactttccaagttcatgaatatttaagacctaagctctgtgatctatatgaaaatgattcaatatttgacaaatttgaatgttgtctgagtggggatggacttcgtgttgcaactggctcttacagcaatttatttcgtgtttttggttgtactcctggaagtgcggaggcaaccaccttggaagcaagcagaaatcctatgaggcgccaggttgctaatccaacaaggcctgcacggaccctgacctcattgacccgtgccgtgaggagaggtggagaaaatccgggagttgatgctaatggaaattcttacgatctttcaacaaagttgctccatcttgcatggcacccaactgagaattccatcgcgtgtgctgctgcaaatagcttgtacatgtactatgcataggtaacaggctagagagaaaattgtttttttggtttggttgacgtgaagccttctactttcacatgcaaccagggagatggtgcaaaggacattgttgtcaatttcatgactggggccaaaagaggcagtcggtttccacgagaccactcccgatgctacttgcgacagtagcaggctgctccgttccgattctttagtaaatgttaaatatatctaatcatatcaacatttttggtcccaagatatgattgtagctgccttgtagccagaatcagcagttgaaagataaagcagaagataggcgatgctgatgctaatttcaccgaaggtcacagaaaatatctgcttaacagggctgtaagatttttttttcttttctttttcatttcttcacatgtaatgccacctagccagggctaacaaccatctcttgtcatggacatccaaatctttgaacataaaattttactacagttattgtagcc

SEQ ID NO: 25659 - DNA, 1865 bp, Oryza sativa
  ref <308>: DATABASE ACCESSION NUMBER: AK101101
  ref <309>: DATABASE ENTRY DATE: 2002-08-28
ggctgagaaagccaggcaggaggaggcgcagcagcactagccgcggtataaaacatccaagcgctcctccatcgtcgccaccgctccggtttgcctcccgcgcgagccctcgtcgacgccgccggtatattgctgaaggaagaagagcaccaacctatttatcatgtcaggaggatcttcaccaaggtcaagacgaagcagctttaattctttatcaagagatctcgaactcccttcagagcaaggttgtctctctgttattgtcctcggggcttctggagacctagccaagaagaaaactttcccggcactcttccatctttttgcacagggatttatacaatcaggtgaagtgcatatatttgggtatgcgagatcaaacctttctgatgatgggttaagggaacgcattcgtggatacctcaaaggagcctcagaagaacatctctcagactttttgcaacatataaaatatgtcagtggttcctatgacagcggagaaggatttgagaaattgaacaaggaaatttcagagtatgagaagtcaaacaaatcagaaagccctcgcaggctcttctatttggcattgcctccatctgtctacccttcagtctgcaaaatgatcagaacatattgcatgaatccatctggatggactagagtcattgttgagaagccatttggaaaggacttggactctgcagaagaattaagtgcccaacttggggagctatttgacgaaaaccaactctacagaattgatcactacttgggaaaagagttggtccaaaacctgcttgtgcttcgttttgccaaccgcttgttcttgcctctttggaaccgtgacaatattgataatatacagattgtattcagggaggactttgggactgacgggcgtggtggatattttgatcaatatggaatcattcgtgacatcatccagaaccatttgttacaggttttctgtttggttgcaatggaaaagcctgtctctcttaagcctgagcacattagagatgagaaagtcaaggttctgcagtccgtgaaccctataaagcatgatgaggttgtccttggacaatacgaggggtacaaggatgaccctacagtgccagatgactcaaacaccccaacttttgcatctgtcgtgcttcgggtacacaatgaaagatgggagggtgttcctttcattcttaaagctggtaaagcactaagctcaaggaaagcagaagtccgtgtgcagttcaaagatgttcctggtgacatctttaaatgtaaaaggcaaggaagaaatgagtttgtcatacgccttcagccatcagaagccatgtacatgaaacttactgtcaaaaaacctggattggagatggccaccgagcagagtgaacttgatctgtcatacgggatgcggtaccaaaacgtcaaaattccagaggcatacgagcgtctcatattggatacgatacgaggagaccaacagcacttcgttcgccgagatgagctgaaggctgcttggcagatcttcactcccctgctgcacgacatcgacgaaggcaaggtgaagtctattccataccagcctggcagccgaggccccaaggaagccgatgaactgagcgagagggttgggtatatgcagacccacggttacatatggataccacccacccttgcatagacagacagacagacagacagtagtattgtttagctaggaagagtgcctctaaactgttattattgcggatatattcgtttcatattttcacgataacgcctgactagtgactacctggcgttgtaataatgtgttgcttcgtaagtataactgctattttgaaataaaagtgcatgtttcgacc

SEQ ID NO: 25660 - DNA, 2529 bp, Oryza sativa
  ref <308>: DATABASE ACCESSION NUMBER: AK101102
  ref <309>: DATABASE ENTRY DATE: 2002-08-28
tgaggagaaattgggagagaaaaaagaaacccacactagtgaagggagagaggggggatcgaaaccctagggcggcgagctcggcggcgatggcggcggcggcggcgccggagtcgtacatcgggagcgtgataagcctcacgtcgaagagcgagatccggtacgagggcgtcctctacaccatcaacaccgaggagtccagcatcgggctcaggaacgttcgctcatttggaactgaaggtcgtaagaaggatggtcaacagattccagccagtgacaagatatatgaatacatactatttagaggaagtgatataaaggatttacaagtcaaatcctctccaccagctcagcctactactttacacaacgatccagcgattatccagtcacattatccttgtcctgcctctacgagcttaccgcctcctgcaagcacagcagctgatcctgcctcacacaatggtcagtcaggaattcagatgcctccaccattgccccaatttcaacctggggccagtttaccatcatggaactcatcacctatgccatcatctgcaaatggcgctcctgctagcacaacaacagctgatcctggctcacacaatggtcagtcaggaattcagatgccaccaccgttgccccaatatcaacctggggccagtttaccgtcatggaactcatcacctatgccatcatctgcaaatggtgctggccttactatgccaccaatgtactggccaggattttatacaccaccaagtgggtttcctcatttgcaacaaccgccctttcttcgtccaccacatggcttgacaattccacaggccttgcagcagcccatacagtatcctggacttaatgcacctttaccaccttttcctagaatgccagagtttgctttaccacaacctggtagtggtaataacttgacccagaatctaggtgtatccacatcaatgccggtccctgccttatcaagtactccagcaactgaatcatctgcaaaccagcttccaaatatgctgtcatctgtttctgctagtgtattctctctgggtttaactcccccatctgttaatccgccagtctctacaattgaatcgactatgtcccaatcgcaaggcatctctcctctgatgaacaataagccagtctcacttcctcttgactctactgtaccatctgccagcagtaataagcctatgaatatacctgtgccaacctatctaccttcctctcagccaccattggctaatattgcagcaagtgcagccactgttgcagaaccagttacattggtcactcctggccaacttctaccaaccatttcatctacagtcctttcggctgatgccttggaaacagcttcagctatgattccatcccctaaggctgcctcctctatggtctcatcctctcaggctgccttggctgcatcctctcaggttacttcctctgtagtttcaccctcagaggatcaatttgcttcctcacctgttccatcacatcaacagctggagcaaaacaatgaagataggcacaccaagaaacgtgaatggaaggctaaacaacactctgttgctccatccaacaaggaacccctgttgccagcacctaagcctactcttcagaagcctgttggagcttcctcatacattcaatacaacaatagaggccgaggaagaggaagaggccgaggaagaggaattgggcaatcacgtcctataaccaagtttacagaggacttcgatttcatggcaatgaatgagaagtttaacaaagatgaagtatggggccatctcggtaaaagcaaaggacagttgaacgatgatcctaatgagtatgaagatgatgttctagaagatgatatttctcctgggaagccagaagttaagcctgtatatgtcaaagatgacttctttgattcactgtcatgcaataccattgataatggaggggggaatggaagaatcaaattctcggagcagagaaaaatagacacagagacttttggtgattctgcaaggcatcggcccatgggcatgcgtggaggagggaggggtccccgtggtggaccccgtggacgtggttactatgggagggggtatggatatatgggaagggggcgcggctactcctacccaaaccaccaatcttagtaaggagggctatgcttttccattccgatgagcagatgaatggtggttgaatggtgatgaagaaggaagagcttttatggctatatttgtagtgtaatctcgcaggtatctcaggtcccggcttgttggcacgaacgggcctcaacaacaaagcaatcaatttgataaattaagaaattctcacaacgagttttctgtagagcttttacctgctttcctgaatccctgtcaatgttgatgctcgttgctctccctgaggatgctgatgggatataaactaaaaactattttgtgattcagcgaatgattatatccagtgttaattttggtactgtgggagcatatatgttagttctatcaaattgtc

SEQ ID NO: 25661 - DNA, 2356 bp, Oryza sativa
  ref <308>: DATABASE ACCESSION NUMBER: AK101103
  ref <309>: DATABASE ENTRY DATE: 2002-08-28
gacaaagccccaaacaaccgcgtccgcgtccgcctccgcctcctcctcctcctccgccgccgccgcatccgcatccgccggcggcggaatcgcctcgcatccgtttcctcctccgctcccactcttctccagctgccccccaatcatcgccgcccccgaacaatccgttcatccaccaggcaggcagtccagtccacgcgcaatctcggacgagcacccacatctttgactcgggtgattgattccgccatcagatctaggcgagagccatgaacggcggcgacgcggcggcggcggcggcgacgccgagccaccggcggctgccggacttcctccagagcgtgaacctcaagtacgtgaagctggggtaccactacctcatcacccacctcctcacgctcttgctgctgccgctcatggccgtcatcgtcctcgaggccggccgcaccgaccccgacgatctccgccagctctggctccacctccagtacaacctagtctccgtcctcgtcctctccgccgtcctcgtcttcggcgccaccgtctacgtcctcacccgcccacgccccgtctacctcgtcgacttcgcctgctacaagccgcccgacaagctcaaggtccgcttcgacgagttcctccaccactccaagctgtgcggattctccgacgactgcctcgagttccagcgcaagatcctcgagcggtctggcctcagcgaggagacctacgtccccgaggccatgcacctcatcccgccggaaccaaccatggcgaatgcccgcgccgaggcggagtctgtcatgttcggggcgctcgacaagctgttcaagttcaccggcgtcaagcccaaggacgtcggcgtgctcgtcgtcaactgcagcctgttcaacccgacgccgtccctctccgccatgatcgtgaacaagtacaagctgagggggaacatcaagagcttcaacctcggcgggatggggtgcagcgccggcgtcatcgccgttgacctcgcgcgcgacatgctgcaggtgcaccgcaacacctacgccgtggtggtcagcacggagaacatcacccagaattggtacttcggcaaccgcaagtcgatgctgatccccaactgcctgttccgcgtcggcggcgcggcggtgctgctctccaaccgcggcgccgaccgccgccgcgccaagtacgccctcaagcacgtcgtgcgcacgcacaagggcgcggacaacaaggccttcaactgcgtgtaccaggagcaggacgacgaggggaagaccggcgtgtcgctgtccaaggacctcatggccatcgccggcggcgcgctcaagaccaacatcaccacgctcggcccgctcgtcctgcccttcagcgagcagctcctcttcttcgccacgctcgttgccaagaagctcttcaacgccaagatcaagccctacatcccggacttcaagctcgcgttcgagcacttctgcatccacgccggtggccgcgccgtgatcgacgagctggagaagaacctccagctgcagccggtccacgtcgaggcctctcgcatgacgctccaccgcttcggcaacacgtcgagcagctccatctggtacgagctcgcctacatggaggccaagggccgggtccgccgcggccaccgcatctggcagatcgcgttcggcagcgggttcaagtgcaacagcgccgtctggcacgctctccgcaacgtcaatccgtcgccggagagcccctgggaggattgcattgaccgctacccggtggagctcgtcgacggcttcgccacccacaacaacacgcagcaataacaccatccatccatccatccatccttctcctccattggtgcaacaaacacaaacgtttatcatcatggatcaaaccaaaaatcctcaaaagattggttagtgagaatgacataatggcacttgcttttataggacatgattgcattggaagaatctccagactttgctgctgccaactctgctctctactctgtgatcacactggtctgtacttcatggatcatcaggtaagttttacagagtagcagcagagctttgctgacgaggtcatcggtaggccttcctattgttgtattatgtacactacactttgttgtctctttagccattgcttccgattgtcatttactccactagatactgccatagtggtccagaggaaaggtcgaattttgttttccttttcttttcttcttctatttcttttatttttttcccttcttttttgtcacatgggattgatgttagtggcaagggcgttttgatcctgccaacctatgatgaacggatcgatgtgctgtgtatttgtcatgttcaattgg

SEQ ID NO: 25662 - DNA, 2419 bp, Oryza sativa
  ref <308>: DATABASE ACCESSION NUMBER: AK101104
  ref <309>: DATABASE ENTRY DATE: 2002-08-28
gggatctcatctcatctcggccggtcttcaatccccaaacccccccgccccgccggagtcccccctgctccgacgagcctcgccgcgccgcgccgatggctgtggagggccgccgccgcgtgccgctgccgctgccgccgccgacgaggcgggggaagcagcagcagcagcaggggggggggagggcgaggagggtgcaggccggggacgcgctcccgctgccgatccggcacacgaacctcatcttctcggcgctgttcgcggcgtcgctggcctacctgatgcggcggtggcgggagaagatccgcacgtcgacgccgctccacgtggtggggctcgccgagatcctcgccatctgcggcctcgtcgcctcgctcatctacctcctcagcttcttcggcatcgcgttcgtgcagtccgtcgtctccaacagcgacgatgaggaggaggaggaggacttcctgatcgactcccgcgccgcgggccccgtcgccgcgcaggctacccctccgccggcgccggcgccgttctcgctgctggggagcgcctgcgccgccccgaagaaaatgccggaggaggacgaggaaatcgtggccgaggtcgtggcggggaagatcccgtcgtacgtgctggagaccaggctgggcgactgccgccgcgccgccgggatccggcgcgaggcgctgcggcggaccacggggagggagatcaggggcctccccctcgacggcttcgactacgcctccatcctcggccagtgctgcgagctccccgtgggctacgtgcagctgccggtgggcgtcgccggcccgctcgtgctcgacggcgagcggttctacgtcccgatggccaccaccgagggctgcctcgtcgccagcacgaaccgcgggtgcaaggccatcgccgagtctggcggtgccaccagcgtcgtgctccaggacgggatgacgcgcgcccccgtcgcccgcttcccctccgcgcgccgcgccgccgagctcaagggcttcttggagaacccggccaacttcgatactcttgccatggtcttcaatagatcgagcagattcgctaggctgcagagagtgaagtgcgcggtggccgggaggaacctctacatgcggttcagctgcagcacaggggatgccatggggatgaacatggtgtccaagggcgtccagaacgtgctggactaccttcaggatgacttccctgacatggatgtcatcagcatatcaggtaacttctgttctgacaaaaagtcagctgctgtaaattggattgagggacgtggaaagtctgtggtttgtgaggcagtaatcaaagaggaagttgtgaaaaaggttctcaagaccaacgttcagtcactagtagaattgaacgtcatcaagaaccttgctggttcagctgttgctggagctttgggtggcttcaatgcccatgctagcaacattgtaacagccatctttattgccaccggtcaggatcctgcacagaatgtggaaagctcccagtgcatcacaatgttggaagctgtaaatgatggcaaagatcttcatatctctgttactatgccatcaattgaggtgggcacggttggtggaggcacacagctggcctcacagtctgcttgcttggacctacttggcgtgaagggcgcaaacagggaatccccaggatcaaatgcgaggctcctggccgccgttgtggctggcgctgtccttgctggggagttgtccctcatctctgctcaagctgcaggccatttggtccagagccacatgaaatacaacagatccagcaaagatatgtccaaggtcgcctcttgagcgtatcatttggatcattgccgaggaaatggacaaaaccccgtaatgttaactactgtctaattgtcttcttgtacccgctggagagagactggaagtggacacccaagagcttcacatgctgattccatgtggcatgctcgaggtaaaaaaaaaaaaggaagaaaaaaaagagacaaacccatcaggctaacgggtgtctactcagtagagttgagtggccatatttaccaggcggaggatgccgttggtggtgtatgtggcctattcgtttattgatgtttattattgctcttctacaaagtcgctaactccggacgatgggcattcttctatcactgggttctgtgtccaaagcaagcttgcattacagttcacaacccttccttgggcgcgtcgtcggcagctgctggatctttctgtcagttactgcctcgagatgcttgtattacagtttcagctttgtaactagccaattagttttttcgtctaatcttttttattttaatcttgccctggtgatagtcggtgatgttcctgtaaaaaaatgttgtggttcagggtggttatttataattcgtgttggtggtgat

SEQ ID NO: 25663 - DNA, 2264 bp, Oryza sativa
  ref <308>: DATABASE ACCESSION NUMBER: AK101105
  ref <309>: DATABASE ENTRY DATE: 2002-08-28
gggagtggacaaatctccgaaccacaaattccaattcaaaaactttttccccgagtagcctcgccgtcgccgtcgccggagatggaggcggcgcgggagtcaatggcggcgctcgtcgacgccggcctctacgactgcgcccagacgctcgggtgctttcttgtgtcttcatcacctgcgagcagcgaggctggtatgtccatgaaggtggaaagcttggtactgcatggtgatgctttgcatggagagaaagaatttcgcagggcactgagtgcctacaaacaagctatgcaatacagcaaaaacattcctaggcaagcaacaagtaatactagaagctcagtaactgccactggccggtctccttctccaaattcttcaagtcttgcaccactcaatgaaaatgaggtgaaatttaaaattgcactttgctattctgctctacgtgagcatcgtgaagcacttcaagagatggaagggattccttctaaagcgaggactctaaaaatgaatctgatgttagggaagctatatcggatatccagaaataatcgtgcagctgctgtatgttataaagagtgcctgaggcaatgcccttatgtttttgaggctattacagctttggctgaaatggggctttcttcaaaggagttctctttgatattctcacaagcaccaaatcgaggaggcaaggctccaggtgactctttagatgcacagcgttggtggaaccgctatgttgaggcccaatgttgcattgcttcacatgattataaaggtggccttgacatatatctagacttaatgcagcgattcccgaacaatgtgcacatcttgctggaaattgctaaggttgaagccatcataggtaggaatgatgaagctatcatgaactttgaaaaggctcggttaattgatccaaacatcatgacatatatggatgagtatgcaattctccttaagtcaaaatctgactacacaaagcttaacaagttggtacatgatatgctgcatattgaccctgcaagaccagaaacatgtcttgctcttgcagcattgtgggaaagaaaagatgaaagaaaagctttgacatatgctgaaaagagtctccgagttgatgatagacatataactggatatatcatgaagggaaatcttcatcttttgttgaatcgacctgatttggcagtcacagacttcaggggagctcaagaacttagggccgatcttcgctcttatcaaggattggtacgtgcttatctagcgctctctaaatgcaaagatgcattattcactgcacgtgaagcaatgaaggttatgcatcagtctgcaaaagctctcaaattagttggtgatgtgcatgctatcagttccagtgggagagagaaggctaggaagttctatgaatccgccattcgtcttgaacctggatttctgggagctgcattggctttggctgatctgcatgtcgctgaaggacgaaataaggatgcagtattgctgcttgaaagatatctaagacagtggacagatgattctctacacatcaagttggctcaagtttttgcagcaacgaatatgctttctgatgcactttcccactaccaatctgctctaaggataaacccacataatgaggccgcaaagaaaggattggaacgcttagagaagcaaatgaagggagtagacccggacgcgcctgaagaggacgaagagaacgaagctgacgatgtcgacggtgatcaagacgacgctgaactactgtagaaaaaacctgatcaactcacatcaacccaaggcaccacctcttaccaagcgtcaactgcgaaagaggaccaaatctgcagccgctgccacagcaggagagcccctcaattgccatatatcaactagcaacttggaaggcacggcaactggaagacgagtgacgacgacgggtgcctctcccttaccgcgagtaagttttcttgctaacgcgaaacctcgtcgtagagttgcaatgctcaccgtaggtttatttttctaatgctggggaaatgtgaactgaacttgttggtttcaagtcaaactttattactacctctgtcctaacatatagcaacttagtacccaacagtccaaattcctggtatctaggatgtctcatttgatattagggtgctatattttgagacggggtagtagttaatttgctctccatgtattattgttttttacattattgtgttatatatcatggcgacaaaaaaggggctgcaagtcgt

SEQ ID NO: 25664 - DNA, 1847 bp, Oryza sativa
  ref <308>: DATABASE ACCESSION NUMBER: AK101106
  ref <309>: DATABASE ENTRY DATE: 2002-08-28
tgtcttcttcttcctcccttctccttttcttctcctcacctccccacagcctcctcctcccttcctccccacctctgaattcatcgctcctcctccttcgcttctgcaattcagaagcttcggaatcagaggggggcaaaggcgccgcctttggcttggtttctttctttcttggggttgatcttgggtgagttctttctcgaggaaattcgagcaaaaacgagggaggattcgagtgattgtgttcttggatagatacatgttcttgggagagaggcttgttttcatgtgttttcttggaggatttgctgtgtgaaggaaatcacccttttttcattttccattttgttgatgagctggggctgattttttggagggttggcgttaaagactccgcctttgactgttcttggtgtgtggatttttttttacagctttcttgaagcaatttggttgtctcctgggagtgttggttggtggttggattcttgtgtttgttttgttcgagtagttgggagagtggttttatggggagaatttaggtgcttttatgaggaattcaggtcaaattaggcgcctttggttcttgatttcccaggaggttttgatttgatttggtttttccttttgaaatttggtgagagagcttccttcaatcctctacttgttttgatggttggaggtgataggggacacatttgattctcctttgtagacaaaccacaaacttagagttggatttgatcctttcttgggaggatttggagtgaaatagtccagtttagtatttgggagaaaaatatttggtccttcagtgctttcttttggagaattaagtctgttcatccaagaatttgagggggaagaaggcggcactttctacaggattggaagtcgctaatggcacaacctgacattccagcatttgggaactgggacaccactggcaacacaccatacaaacagaagtttgagaatgcccgcaaaaacaagaaagcgggcatttcttcccatcccaacgatccaaggaggcaccctgaacctccatccaagtcacctttgcatccagcatacacacctgatgctcaggggcagagtccaatgaatccacagcatggaagaaggcaggaagctgatccccatcgacggcattcgctttctcagcagcgagaggtaggcggtagcatcggtagcgcaccgagaagcccatacaggatggttcatggctccgcttcaccagcgcagccgaacaacccatcgaagccgaagcacaggtcatctggaatgcagactccagagaggagggcttcatcggagggacatggccagcatactcctaggaggagcagggacaagcagggtggccgaggctatgatgcacctgaagatgatgtagctgttccaccgtttggtgagtgggatgagggtaatgcagcatcaggcgaaaaatttactggtatcttcaacagggtgagggatgataaattatcgccaaacacttctaccaggcaaccggacactaatcgcagccaggaaaacaaagtgaaacagacatgcccttgctgtatactttgagacaacgggggataagatcacagatattgctggagaggttccttagctacttgttgatcagattgctacattgtgaattttcaattttcatcgaactctgttcatgtattgttttccacgtttattgttgtcggtgtgagtatgtatctgtaattgaattttccagtcatctagtttctatgattattcgaaacatatatagggtgccgtttggctctgggaagcatggagtgagaaattttccttgctgataataaaatgtttccagaatt

SEQ ID NO: 25665 - DNA, 2456 bp, Oryza sativa
  ref <308>: DATABASE ACCESSION NUMBER: AK101107
  ref <309>: DATABASE ENTRY DATE: 2002-08-28
gagtcatcgagcctacaatggagccggtggccgtcgtggcggtgccgttcccggcgcagggccacctcaaccagctcctgcacctgtcgctgcagctcgcctcgcgcggcggggtggacgtgcactacgcggcgcccgcggctcacgtccgccaggcccgcgagcgggtgcagggcggggacgacgcggcgctccgctccgtccggttccacgacctcggcatctccacgtacgcctcaccgcctcccgaccccgccgccgcctcgcccttcccctcccacctcatgcccctctgggaagcctacaccgccggcgcgcccgccccgctcgcggctctcctcgacaagctctccgcctcctaccgccacgtcgtcgtcgtgtacgaccgcatcaacgacttcgccgcacaggaggcggcgcggctgcgcaacggcgaggcgttcgtcatgtactgcttggccgtgtcgatgctcgctaggaggattgctccccaggagcaccaacggatcctgcgcgagaacggcctcaccaacatcaccgtggaagactgtgcaacggaggagttcgtggattacatcagacggacgagggcgaccaaggagatgtcgcctcccagaggtatcctgaccaacacgtgtcgcgcgctcgagggcgagttcatcgacgtcgtcgcggggaacctggccgccgacggcaagaaggttttcgccgtcggaccgttgaacccactgctgcacgggaacgcgtcgaagcagggcgaccagcggcagcgccacgagtgcctggactggctcgacaagcagccccctgcgtcggtgctgtacgtctccttcggcacgacatcgtcgctgcgagcggagcaaatcgaagagctcgcatcggcgctgcgcggcagcaatcagcggttcatctgggtgttgcgggacgccgaccgcggagacatattcgcggaggactccggcgagatcatcagccgccacgcgaagctgctgcgcgagttcacgcagcacaacgaagggagtacggggctggtgatcaccgggtgggcgccgcagctggagatcctggcgcacgacgccacggcggcgttcatgagccactgcggctggaactccaccatggagagcctgagccacgggtagctgattcttgcctggcccatgcactgcgaccagccatgggacgccgagctcctctgcaagtacctcaaggccggcgtcctcgtgcggccatgggagaagcacaacgaggtcacgccggcgaaggacatccaggaagccatcgaggagggccatgctttctaacggaggagtagccatgcgacaacgtgcacgggagttcggagatgccatccgcgcctccgtggccgccgccggctcgtcggtcgtcgcgcaaagacctggatgacttcgttgcttacatcacgaggtaatcacgtaccgagattgccacgttggaattgatgattctgttctggtaatccaattggctttgccattgggccaggccaccatcttatatctcaaggcccatctggccacgtcgccattccggccataggagcagcagcaggcttccatgtcagccactgctcgatcaatttagtggccctgtttagttgggggcagatcatgaagtaaacttactgaggccttgtttagttggggaaaatttttgggtttgtttgtcacatcggatatacggtatatatttaaagtattaaacgtaatctagtaacaaaacaaattacatattccgtaaggaaactgcgagacaaatttattaagcctaattaataggggtgaaaacgaaacggatattatccgctccgaatccgtccgaagtgaggatatggtaagggtttttagatatccggccggatgcggatgcggatgcggatatggtatcggttatatccggcggatatggattatccgctattttaagcggattatccgataaacgttttggcggataatccgaatttcacagcccatgtaacctctcaatttggcccatttgacacgagcattttcatcgtgtaaacattcagcccatccacgtccaccttatccatcaatctatctaggagttcagtccgtgactccgtcggcgtcgtgtcaaccaattttttcatcgagacttctcttcttccattcctcccacgccgccgcctgacttctccacccagcgccaccgccgccacctgccttctccaccccggcgccgcggcctaccttctccaccccaaagtcacctggttgtctccgtctcggcgccggcgacgcctcctgccatctccagcaccaactctgtcgtatgtgttattatcagaattgaagtctacttctctagatcatctccttctgaccttagctgcatatgtgttattatgtcatatgcaatatgcaacttattagtagtactgtatgagaattggacatcatttgtggacc

SEQ ID NO: 25666 - DNA, 2072 bp, Oryza sativa
  ref <308>: DATABASE ACCESSION NUMBER: AK101108
  ref <309>: DATABASE ENTRY DATE: 2002-08-28
gactctgtgcaacaccgtgcggtagcagagcaagagcagcaaaaaaaaaaaccaccacgcctcgttcagtcactcgcacgctcgctcgatcacccggccgccgcgaagcgtcgaccgaagtgtatcgcacatttcgaaagttcttcgcgggcaacagaaagcagtttgtggtgtgcattgccgatttgccattgcgttgggttcatttcttccatcggcaatgctggcggcgtcgttgagagtcgaggcggtggcggtggttgctgcggctgtgctggtgctgctgctctcgccggctgcggtggtggtggtggccgggcagcatgattacggcgacgcgctccataagagcatactgttctttgagggacagcgctccggcaggcttcctcccgaccagcgtctccgctggcgccgcgactccggcctccacgacggcgccgccgccagcgtggacttgaccggagggtactacgacgccggcgacaacgtgaagttcgggttcccgatggcgttcacggcgacgctgatgtcgtgggggctgatcgacttcgggcggagcttcgggccgcacaaggaggaggcgaggaaggcggtgcggtgggcgacggactacctgatgaaggcgacggcgaagcccaacaccgtgtacgtgcaggtcggcgacgccttccgcgaccactcgtgctgggagcgccccgaggacatggacacgccccgcaccgtctacaaggtcgacccctcccaccccggctccgacgtcgccgccgagaccgccgccgccctcgccgccggctccatcgtcttccgcgacgccgaccccgcctactccaagcgcctcctcgaccgcgccatcgccgtgttcgagttcgcggacaagtaccggggcccctacagcagcagcctccacgacgcggtgtgcccctgctactgcgacttctccgggtacaaggacgagctgctctggggcgcggcgtggctgcacaaggcgtcgcgccgccgcgagtaccgcgagtacatcaagaagaacgaggtggtgctcggcgccagcgagtccatcaacgagttcggctgggacaacaagcacgccggcatcaacgtcctcatctccaaggaggttctgatggggaaggacgagtacttccagtcgttccgtgtcaacgccgacaacttcatgtgcagcctcctcccgggcatctctaatcacccccagatccagtactccccaggtgggctgctgttcaaggttgggggcagcaacatgcagcacgtgacatcgctgtcgttcctgctgctcgcctactccaactacctgagccacgccggcgcgcgggtgtcgtgcggcgcgggcggctcggcgtcgccgacgcagctccgccgcgtggccaagcgccaggtggactacatcctcggcgacaacccgctgcggatgtcgtacatggtgggctacggcgccaggttcccgcggcggatccaccaccgcgggagctccctcccgtccgtcgccgcgcacccggcgcggatcgggtgcaagggcggcgccgcctactacgccagcgcggcgcccaaccccaacctgctggtgggcgccgtcgtgggcgggcccagcgacgccacggacgcgttccccgacgcgcgcgccgtgttccagcagtcggagcccaccacgtacatcaacgcgccgctcatgggcctcctcgcctacttctccgcccacccaaacccagccgagtgggccgacgactagaacaacccgccaaagtatatcagctatacgggcctgggctattgtttgttttgtcagggccgaatcgggtgattattgcctggttgattgatactacttgtgtaaccaaatatagttaacttcctctacaaaaccccaacaaagtatagttaactgcagccacctcctttcatgcgaaaaatatcggccaggaggaatgcataggctttattaggctgctactcctactagcaatgttgtaacagtactgtagacatagttacacttgtactgctatggttcagcgagtggattatatataaagtgcaccaccgacgtttcctct

SEQ ID NO: 25667 - DNA, 2144 bp, Oryza sativa
  ref <308>: DATABASE ACCESSION NUMBER: AK101109
  ref <309>: DATABASE ENTRY DATE: 2002-08-28
cctcccccttaaaccctcgcctctcccacctcccgccgcttccccctctcgctacgccgccgccgccgtcgaagcttgacagccggagtcctccgccgagccgagccgcgctagcagcctgcggctcccctccccccatccctcccccggccatggcgcctcgtccgcggaagcgggtctcgcggcccaagccacgcgccacctcccgcggccgcggcggcggggatgaggaccccttcttcgagtccgagcccaagcggcgccgcgggggcggccgcgacgaggacatcgagagcgaggacagcgacctggagggcgtggcagcggctgctgctggtggcgtcggcgacgatggggaggaggaggaggaggaggaggaggagcaggagacggcgggggagaagaagatgcggatcgcgaaggagcttctcaagaaggtgacggacgcggcgaggaggaggagggaggatgacgaggacgaggacgagggcgaggaagccggccggaggcgggtcgccgatatcctcctcaagaggcaattcgaggagagtggcaggaagcggatggagctcgccgacaggatattacaaccagatcctgaggatggctttaagatgctcgtgaagcaccgacaaccagttactgctgttgttttatccaaggacagtgataagggattttcagcatcaaaggatggagtcattgtgcattgggatgttgaaactggaaaaagtgagaagtatttatggccaagtgaaaatgtcttggtttctcatcatgctaagccacctctatcagctaaaagaagtaagcaagtattagctctagctgttagtgcagatggtcgttacttggcaagcggaggtttggatcgtcacatccatttatgggatgttcggtcacgggagcacatacaggcatttagtggtcatcgaggagcaatatcttgtctttcctttggaccagactcatcggagctattctctggttcttttgaccgtaaaataatgcagtggaatgcagaagacagaacgtacatgaactgcctatttggccatcagaacgaagtcttgacaatggatgcacttagtaaagataggcttttgactgtagcacgggaccgaacaatgcatctttggaagataccagaagaatcacaactactgttccgtgctcctgctactgcatcattggagtgttgctgctttattgatgacaaggaatttttaactggatctgatgatggaagtgttgagctttggagcattatgagaaagaagcctactcacataataagaaatgctcatccagtattccgtaacaaccttaattcgcttgaaaataatgttgaggaaaatggcatacataaacctgaaagtgtctcatcagcccaatcatgggttagtgctattgctgcaagaagaggttctgatcttgctgcatcaggagcagcaaatggttcagttcgtctttgggctattgaacctgattctaagggcattcggccattatttagtttgagactggatggatttgttaattctctcgccatcccgaaatctggacgctttattgttgctggtgtgggccaggagcctcgtcttggaagatggggccgtgtccgatcagctcaaaatggagttgtaatccatccaatccgactaaaagaagagagcgaggacttgtagggtagtagtagatggttgatgccgaaaaaccccttaaatgttgttaagtcacacaaaggacaaatcccttccaccttgcattttttgcaaccattcccaccgatgaaattcgatacaagaggctgaacgggttaccttcacaagcaatgggaatttggagggggtgttacagaccatttgagctgaagaattgagatgtattctgtagaggaagtcccgtcaggcaattttgtagcattgcttccttaagtttaaagacagattttttttatgtatcaaacaagtaggataaggcggttttgaaaattggcctttgattcaaaaatgccttgatcaattgttctctacaattggagtggtttatatcagatagagaattgcacacgggaggattttgaggccctgaactatgtaccaatactttattgatctaatcccttaaaactatgcaactgt

SEQ ID NO: 25668 - DNA, 2375 bp, Oryza sativa
  ref <308>: DATABASE ACCESSION NUMBER: AK101110
  ref <309>: DATABASE ENTRY DATE: 2002-08-28
ggtaagcgtggattaatctaatctcctcgtcgatgtgatcttacggccaattggataaaaacgcctctggagaattttatgctcgcttggccactaatggagttgttagtgacagggcagctgctcctctgcttcctgctggactgagccgcagaggaggaagaaacgatggggggcgatcctactcgttgcgttgcagagttggagatgaaaacagatagctgtgtgattgacatcccttcattggcgaaagaactgagggtcgaactctccagcttcaagtcgtcgacggcgcgggtcgtcggcggcgccgcgcctccgccgtgcatcatcgtcgacaaggttggtgagtccacccgcatccacgacccgcacgagtacgtgccgcagtacgtctccatcgggccgtaccaccgcgccgccgacctcgccggagaggccatcaaggtgaagtacctcggcgacgtcctctcggcggcggcggcgagctccaccgcgccgatgacgctcgaggactgcctctccgagctggcgcacctcgagcacagcgtgaggaggtgctacgtccattcgttcgacatcccaagcagggagttcgtgcgcatgctgctgctcgacgcctgctacatcctcgtccgcttcggcgacgtgctcacgccgcgcaccgcggcgccgccgcagccggcggcggcggcggcggaggaggtggccgtggctaacggcgtcgtgcacgcggggcaccgcgtcgtgccgaccgaggagaggagagcggccgcagacgaccagcagatggccgtcgcggtggtccgcgacgtgctctaccttgccgagaaccagatcccgttcttcgtcgtcgacaaggtccaccagctgacgttcctcgacggcgaaactccggtgttggacgccatcgcgaggtacgcgcacgacctgttgagttggacggagtactcggtcgcgacgccgacgatagtggcgccgccggcgctgcggccggagccggcgaaccttctccacctgctgcacatgcacttcacgcctaccgtgctcgcttccggcaaggtcagtcgcggcggaaggtccgtgggccggtggcgcacggcgacggagtaccactacgccggcgtgacgttcaagcgccgcccgctcagcagcggcggcggcgcgcgcagcatcctcgacgtgaaggtgagccggcgcggcggcgcgctgcaggtgccccggctgagcatcgacggcgagacgtggcggctgctccggaacctgatggcgctggagcagagcaacccgtcggcggcggggagccacgtgacggcgtactgcgtgttcatgtcgcagctggcgtgcacggcgagggacgtggagctgctgtcgcggcgcggcgtgatcgtgcacggcctgggcaacgacggcgaggtcgcgggcctcttcgcgaacctgtgcaagggcgccgtgttcgacttcgacgaggccgaccagaactacctgaggccggtgtgccaggtgctcgaccggcggttccggagtaggccgcggcggtggatggcgtcgctgaggcagaagtactttctcaacccgtggctcaccgccggcctcgtggcggccaccattgggctcgtctgcaccgtgatccaggcagtttactccgttcttagttacgtaaaacccgggaactagaaatcgggaaactattctaaactctcaataggcagtgcacgactcaatgtccagcacttggctcgccgtggcatggcaagaggtggaaacgccaagtcgtcggtgtcggatgataccgtaccgatgatcggatttcgtccagggttctgcaaaattcctcaatccgccagtgtcatcggtgatgttggaagaatgtccggaggtgcagcatatatcgaaaaatatggatatggaagcatctgatgggagaaattgattctggagattaactgtggtggatcatattagaagagagcagtggtcactggtcagcgataaaaattgagctttcctgggtgcagccgccaaggtgattttcttggggatgttttgggcctgctgctgaaatgctgacaggctgatgatctgaaatggttcggaacgtgggcatgctcatgtcatgtgtgacaatatccatgaagtcagagcttgtgttgggtgaattgtgaggtggctttattatcctccaaattgtgctagtcgaagatacttctgtttctatataaaccagttttggatggatcgggtcttctagtttatgcttcattttctatttataaaagagacaggcagtcatggtcggtgtactacatatgaatgttgaatagtacatttttctccgtgtctaatattgtaaaatatttaataaagccagttgt

SEQ ID NO: 25669 - DNA, 2023 bp, Oryza sativa
  ref <308>: DATABASE ACCESSION NUMBER: AK101111
  ref <309>: DATABASE ENTRY DATE: 2002-08-28
gaatctgctcccttcctccgattcaaaaaaaaaaaaaaatccaccgaaacctcgccaccctccgccgccgccgccatggttgcgaaccccatcctcctcctcgggcctccgatcgccgtcccagatggaggcggcgcagccgccgcggtccaggtgacgtggctctccgggcggccgctcacctcgggcgacccctgcctcgacttcttcttccagatcgtccccggcgacaccgaggtcgccagggtcggcgatctcctcgacgccgcgtgggtgcgcgacccgctcacggcgctcaagctcgtgtgccacctccgcgccgtgcgggggctcggcaaggccgaccgggagggattctacgccgccgcgctctggatgcacgaccaccacccccgcacgctcgccgccaacctcgccgccttcgccgagttcggctgcttcaaggacctcctcgagatcgtctaccgcgtcctccacgggccccgcgacgaacacaaggaggaggaggaggagggcgatgaccagaccgagtccgaggatggccgccgccgccgcccccgcctccgcttcaagcgccgctgcatcgaccatgccgaggcggcgaaggccaggctgcagaaggaggcgcagctcgcgcagtccgtgctctcgcggtacggctcggacgtcagcttccgcttcctctacgacggcgtcgccgacacgttcgccgagctgctcaagtccgacgtcgagcacatgcgcgccggcgagaacgccaagatcgggctcgcggccaagtggtgcccgtctctccgctcgtcgtacgaccgggcgaccctgctctgcgaggccatcgcccgccgcatgttcccgcgcgagtcgagccaggagtacctcttcctctccgacgagcactacgcctaccgcgtccgcaaccggctccggcgcgaggtgctcgtgcccctgcgcaaggtcctcgagctcccggaggtgtacatgaccgcgggcaagtgggaacagatgccctacgcgcgcgtgccgtccgtggcgatgcggcagtacaagggggcgttcgagaagcacgacaagtcgggcgtcgcaggcttcctggacgaggtgcgcaccgggcacgcgcggctgcatgtcggcgccgcaatgccgcacgagctggtggccgctgcactcaagggcgagcacgacgaggccgccgagctccagtggcgccgcatggtgtccgcgctggcggcgggcgggcggctgagcaactgcatcgcggtgtgcgggctgtcgtcgggaggcgacgtggcgaagccaccgggcgcggcggccgtcgcgctggggctgctgatctcggagctgagccaggatccatggaaggggcgggtgatcaccttcgacgcgacgcagcagctgcacaaggtgtgcggcgcgacgctggtggggaagctccggtcgctggcggcgcccgtgcgcgccgcccccaagggcagcagcctgaacctgcagggcgtgttcgaccgcatcctgaccgtcgcgacctacggcgggctggccaaggacatgatggtgaggagggtgttcgtgctgagcgacatggagctgaacgccagcgcgtggcgggtgcaggacgagctgaaaaccatcaggtccaagttcacggcggaggggttcacggcgccggaggtggtgttctggaacgtgggcgcgccggcgtcggcgccggtggtggctaccgaggcgaacgcggcggtggtgagcggctactccaagaacctggtgaggctcttcctggagtgggacggccaactcacgccggccgccgtcatggctgatgccatctccggcccggagtacgactcgctcgaggtggtggactgaccgaatccatcctctgcttccgtatgataagagacgatcagtagtagcttgtgtgagtgagatctagtgagtgttttctgcactttgaatggaatgagtttgctggatgcttaatttggttgatctaatgaatgaaatctagtgagatatcacgccttggccg

SEQ ID NO: 25670 - DNA, 3016 bp, Oryza sativa
  ref <308>: DATABASE ACCESSION NUMBER: AK101112
  ref <309>: DATABASE ENTRY DATE: 2002-08-28
ccgtctccctcttcctcgacgagcgccacgacctcgtcatcctcgtcgtcaacaccatacagaaggacctcaggtccgacaactacctcgtcgtctgcgccgcgctcaccgccgcctgccgcctcatcggggaggaggccatcccggccgtgctgccccaggtcgtcgagctgctcgcgcatcccaaggaggccgtgcggaagaaggccgtcatggcgctccaccgattctaccagcgatccccctcatccgtctctcaccttgtctccaacttccgcaagaggctctgtgataatgatcctggggtcatgggtgcaactttatgccccctctatgacctgattttggaagatccaaattcgtacaaggatttggttgttagttttgttaacatcctcaaacaagttgcagagaggaggcttccaacttcctatgattaccaccaaatgcctgcaccatttattcagattaaactattgaaaatacttgcggtgctgggtagcggtgataagcaggcaagtggaaatatgtacatggtcttgggtgacatattcaggaagggtgacactgcaagcaacattggcaatgcaatattgtatgagtgcatatgctgtatttcatccatattcccgaacgctaagatgcttgatgctgcagctgaaacaacatcaaagtttctgaagagtgatagccataatcttaagtacatgggcattgatgctcttggccggttaattaaaataaatccagatatcgcagaagagcaccagctggctgttattgattgcttagaggatcctgatgacactttgaaacgcaagaccttcgagcttctttacaagatgacaaaatcaacaaatgttgaagtgattgttgatcgaatgattgagtatatgattaacatcactgatcaccattacaagacagaaattgcatctcgttgtgttgagatggcagaacaatttgcacctagcaatcagtggttcatccagaccatgaacaaagtctttgagcatgctggagatcttgtcaacatccgagttgcacataatttaatgcgacttattgctgaaggctttggagaggaggatgaaggtgctgatagccaactaagatcgtcagctgtagattcctatctacggattgttggggagccaaagcttccttcttcgtttctgcagataatatgctgggttttgggagaatatggaacagcagatgggaaatattcagcttcatatattattgggaagctgtatgatgtggcagaggcccacccaactgatgacactgtcagggcttatgcaatctccgcaattttgaagatctttgcgtttgaaatcgctcttggaaggaagatcgatatgctacccgagtgccaatcgttgatagatgaattgtcagcttcgcattcaacagacttgcagcagcgtgcatatgagctacaggctttgctaggtttggacaaacaggctgttgagaatgtaatgccagccgatgcaagctgcgaagatattgagatcgacagaaacctctcgtttctaaatggttatgtgcagcaagccattgaaaatggtgctgcaccctacattcctgagagtgaacgctcaggagtggtaagtgttggcaactacaaggcccaggatcaacaagagacatctgcccatgctcttagattcgaggcctatgagctacctccagcagcttcacaggccagtatttccccaactactgacctggttccagttccagaaccaagctactataaggaagatcaccaaatgtcaagatcccagccatcaggcgattctctttctggtgaatttggtctcaaacttcgtcttgatggagttcagaagaaatgggggagaccagcctattcctcctcatctacgccttcaagttcaacatctagtcaacaagcaaccaatggaggcgttagttctgaggtgggagggtcaacaagttcacaggctcgggaatccacatatggttccaagagacagcaggccactgaagtttcagcggaaaagcaacggttggctgcttcactctttggtaaagctgataggaagacccaggctgggcgaaagacagcaaaggagagttcctcaactgagaaagtagctactgctaatgcaacaccgcagccagccaaagagcaagtaatcccttctgccccaccacctgatcttctggatctgggagagccagtttcatcaagtcctccattagctgatcctttcacacagttagaaggtcttctcggaccagcatcagcctctcctgtggtttctgaaaccccagcttcgagcacttcgaaaacaccagatcttatgtcaatcttttcggatgatgtacaaactggagtgaccagtggatccacagaaccatcactcggggtaaatgtggtcgctgcaaagaagggccctagccttcaagatgccttgcagaaggacgcagcggcccggcaagttggtgtgacgccgacagggaacaaccctattctattcaaggacttgttaggctagaatatacagcatatgttcagcgtgctcaaattgggtaagtggagtttgcctccaagatggtcttgattgcctgatcggtgaaccagtaatgaatgatgctgttcgatcagcacagggcacatgagggcatgaggtaaatttggttttgattcacaggacacgaccttttaccctcccaattgggagaaggtaggtttgggatgagatgtggatggttgcgggtctttttcctgttgcgtttttcacatggtaatttcttgtcgagacttagtgtacatgtgtttattacatgatgtgtaatttgtacatgatgagaccgtggtccagaagcgtgtgccggcgctttttttcggttcatctggcagggagtatatgttttgagatttacccacattggatatacagtagctgctgggcactagaaactcggttgccacttcctctgaaactggctggaataataaaatgtaagttttttcttcccc

SEQ ID NO: 25671 - DNA, 3233 bp, Oryza sativa
  ref <308>: DATABASE ACCESSION NUMBER: AK101113
  ref <309>: DATABASE ENTRY DATE: 2002-08-28
ggccgtcctctccgacgcggagagggcgcgcgaccgcgacgcggccgtggaccggtgggtgcgggagctcagggacgccatgtacgacgccgacgacatcctcgacgagtgccaggccgccgcggggggcgaggccgcgacgcccgttgccatggcgggctgctgctgctgcttccgcggcgtccgcgtccctgccctctcctgcttccgcgaccccgtccgggcacgcgagatcgggaagagggtcagggcgctcaaccggaggctggacggcatcgagaggaggagctcccgcttcggcttcgtctcccagactaggatcatctcctcgtctccctccccttgctgctctcggcgccagattcaggcgacggccgccgcaccgcgctaggcctcatccgatccgacgtcgtcggggagaagatcgcggaagacacgaggatgctcgccgacatccttgtcagtaagacgacggacctggacgacgccggcggcggctgcaatctcatccccaccattgccgtcaccggcgccggcggcataggcaagaccaccctcgccaggatggtcttcggcgacgccacggtccaagagagcttcgacgccaggatctggctgttcgtcggccgggacgccgacgaggtcacgatgctgcgcagcgccatcgcccatgccgccggggcggccagctgcgagggcctcgccgtcgccggggacaaggacctgctggagcgcgccctgcagcgcgcggtgacgcacaggaaggtcctgctggtgatggatgacgtgtggagcgacgcggcgtggaacgagctgctcagggtcccgcttagccatggcgccccggggagccggatcctggtgaccacgagaaacgatggcgttgctcacaggatgaaggtgaggtacctccaccgtgttgacaagctgcggcgacaggatgcttggtccttgctcaagaagcagatagttttgaacaagagtgatgaagctgaattggatgagttggaggatattgggatgcaaattgtggacaggtgtgatggtttaccgctcgcgattaagatgattgggggcctcttacttagtaagagcagaacaagaggtgcctggatggaggtttctagacattctgcatggtgtaaacatgaagtgaatgatgaaattaacaaagtggtctgcttgagctatggagagttgccttctcatttgaagcaatgctttgtgtactgctcacttttcccacgaggtgaggtgatcgaatcaagaaccattgtccgaatgtggatcgctgaagggttcgtgcaagatagcacgggttcaggattgccagaggctgtagcagctcagtactacaaagagttagtcttaaggaaccttttggacccaagtgatgggtactatgatcaactaggatgcaccgtgcatgatgttgtccggtcttttgcccaacatgtagcgaaggacgagggattgtccattaacgagatgcagaaacagaccataggtgatgcacttggtactctgaagtttcgtcggctctgtatttcaaacaagcaagtcgagtgggatgctttacagaggcaagtatcactaaggacgttgatactattcaggagcatcgttactaagcacaagaatttcttgaataatctttcttgccttcgggtgctacatcttgaggatgcaaatctgatagtactaccagactccatctgtcaccttaagcatttgagatacctaggtctcaaaggcacatacatatctgcactccctaacctcatagggaatttgaggtttctacagcacattgatctctgtggttgcataaatgtgtctgaacttcctgaaagcattgttcgactgcggaagctaagatcactggacatcagacacacaatggtatcttcagttcctaggggtttcggaaagctagaaaatttggttgagatgttggggttcccaaccgatttggatgacagtacacatgattggtgtagcttggaagagctaggatctttgccaaatctcagtgcactacatttggaggttctggaaaaggcaacacttggccaaatggcagcaagatcaaagctcagcagcaagcagaatctcacacaactggagctgagatgcactagcaggatcagcgcaaacggcaccgtgcaaggtggtatcagcgaggaggattgcgagagaatcgagaacgtttttgagcatctccgccctccaccttcaattgaccgtcttacgattgcaggttactttggacatcggctaccgcagtggatggccacggcgaccgcctttcggagcttgaggcggctggtgctagaagactacgcgtgctgcgaccggctgcccggtggcttgggccaactcccttaccttgactacctctggattgagcatgcaccatccattgagcatgtcagtcatgatttcatcctccctccggtaggcattgctgtcgatggcaacgcaccatcgacgacgacaacaacaactaagactgaaggtgcaggcattgcgtttcccaagctgaagcggctgggtttccaggggatgttgagatgggcatcgtgggactgggacgagcatgtccaagcaatgcctgctctggagtcgctcacagtggagaacagcaaactgaatcgtctccctccggggcttgtgtaccacaccagagcactgaaagctttggtgctgacgaacgccgtgagccttgaatccgtagagaacttgcattcgctggttgaactttacctggctgacaacccaaagctagagatggttgtaaactgctcgagcttgacgaagattgagatcctcagatgcccagagctgaaggcgtttgacaggttgcctgcagtccggagcatcgtttgggaggacttggatgctgacacgctcccggggtacttacaggaggcaaaggtaaagaggttacacataaactgcaacttgagcttgctcaacctgatatccttgcaggatgccagctctgaagagtggaggagcgtccggcatgtgcaacaattgaaggttttcgggttcaaaccacagagcgaaacgtctgaatgttacttcctttataccaaagagccatatcacgtcgaaacaaacatctccaaagcctgaacttctgctagatgtatttgtcatttgtcttgaaaaagaatgttgtattactatctgtttcctctactttgttattctcatttctgatttgc

SEQ ID NO: 25672 - DNA, 2664 bp, Oryza sativa
  ref <308>: DATABASE ACCESSION NUMBER: AK101114
  ref <309>: DATABASE ENTRY DATE: 2002-08-28
gtccctcctcctcctcctctgccgccgccgccggcgatggggaagcgcgcgcgccacggcggctccggcaggtcccactccccctacttcgagtcccagctccgccgcctcatcaccgacggcggactctcctcctcctccgccgaggacgtcgccatcgccctccgctcccgcttccccgagttccgccgccacaagctcgaccccttcacctccgccgtccgccgcgccctcaactccatcccctccgactcccactccgactccgccgacgactcccacgcctccactccctcccaacgccgccgccggcgcccccggccacgacgcccatgccaccgcctcatcctccacctccctctccgacgacgccgcgcacccactgcctccccccatctacgacgtcaccaagtccatgctccgcacccagtacgcctcccagactcccaagcgagacaccggcagcaaccagcagctggaaatcgagatcgccgccgagaagccccgccgattaatcacctccgatggcggcgccggcggcgaggccaagccggagtccgctccacctagcgaaggaggcgatagagggggcaaggggcccacgttttcggatcttggggggatggagtcggtgatagagcagctaatgatggaggtggtggtgcccctatgccatccggaggtgccgcgctggcttggggttaagcctgtgggctgggctgctgctgcacgggccaccaggctgcggcaagaccacgctcgctcatgccatcgccaatgagaccggcgtgccattctacaagatatcggcgccggaggttgtgtccggggtctctggggcttctgaggaaaacatcagaagcctgtttaagaaggcgtacaggactgctccatcaattgtatttatagatgagatagatgcgattgcatccaagagggagaatctgcaacgggaaatggaacgacggatagttacacagttaatgacatgcatggatgaataccaccaacaaattggctctggtagcggtgatgtgggttcagagtcagctgaaaagaaacctggctatgttattgtcattggagctacaaatagacctgacgctgttgaccaagcacttcgtaggccaggaaggtttgatcgagagatctctcttggtgttccagatgagtatgcacggaaaaagatacttatgatgcttacccggaatcttcgactggaaggtcagttggacttgttgaagatagcaagggccacatcaagctttgttggtgcggacttgaaggcattggtggataaagcggggaatctagcaatgaagagaataattgatagaagaagagctcagttttgtcaggagcatgatgaaaacagcaagcacgactggtggagacaaccttgggatgcaaatgagatagagggcctgagtattacaatggatgattttgaggaagcaaccaagatggttcaaccatctttgagaagagaaggattttcttctatccctgatgtcacatgggatgacgttggaggccttgattcgctaaggaaagagtttgaccgctacattatccgatgtatcaagcaacctgaagaatataagacatttggattgaatatgcaagctggctttttgctgtttggaccacccggttgtgggaaaacactgatagcaaaagcagttgcgcatgaggcaggggcaaattttattcatattaaggggccagagctgttgaacaagtatgttggtgagagtgaatcagaagttaggaaaattttcatccgtgcacaaactaatacaccatgcatcctgttttttgacgaggtagatgctttgacaacaaaaagagggaaagaggggggatgggttgttgaacgtctcctgaaccacttgcttattgaacttgatggtgctggtgaacggaaaggtgtttttgttattggagctacaaacagaattgatgtgatagatgatgcagcacttcgacctggtagatttggcaagaaacattatgtacctttacctggtgctgatgagcgggtttcgatattgagagccctcgctcggaacaaaccgatctcctccagtgttgatttgggtgcactggcacgtagagaggaatgcaaaaatctcactggtgctgacctagcatcaatggtgaatgaagcagccatggcagcattggaagagaggctggagttcctggagaatggggaatcgtcaatgagctcatcatctgcgattgagctccctcattttgaacgtgctctagcaaaaatgcagccatcagtatctgaacagcaaaggagacactacgaggcgttgtgcaagaaatactccgcaagctgatatatattgcgccatgcttacagagatccatgtcctctgagttgcttgcagggaaaatacaggtttcgcttgcaaccaattttggttttgccctttttttttgttcccctttgagtaggccttgtggcaattttgtgcgaccgaaacatagatggttgagtgagtagtagtatgaatatgcgagaaaaatagttgttttttttttcttttcacttattgtaccattcatcatcttgtattgtaatacaaacttcatattggttatgagattgcataatcatccaattaagcccctactatgctccaagttgcc

SEQ ID NO: 25673 - DNA, 2823 bp, Oryza sativa
  ref <308>: DATABASE ACCESSION NUMBER: AK101115
  ref <309>: DATABASE ENTRY DATE: 2002-08-28
ggcctgaagggacactccccaccctcccttcccgccaccatggcggccgccgccgccgccgccgccgccgcctcaaccgcgtcctccatctccgctcttgtcgccgccggccgtctcttcgccgccctcgacgccctccccccgtcatactcctcctcccaggtcccttccgcggtctacgcctccctcctccgcctagccacctcccaccggtcactcgccgccgcccgccgcattgccacccaccttgcatcctccactgcaccctccacctcccattcctttaccgccacctccaccttcctcttcaaccgcgccgtcgagtcgctcgccgcttgcggcagcctcaccgacgcgcggaagctgttcgacgcaatgccgcgccgggatggtggttcttggaacgccatcatctcggcttactcccgtggggaggaacccactgaagcgatttcccttttctctgccatgaactcctgtggcgttcgccccaaggacgtcactctggcatcggtgctcgggtgttgcgccgagtgcctggacctccatggtgcccggcagctccatggccatatcgccaagagggactttcagtcaaatgtgattcttggcacggcactggttgacgtgtatgggaagtgctttgccctttcagaggcaaggagggcatttgatggcatcccaaaacccaatgacatctcgtggaatgtcattattcggcgctatcttcttgctgggatgggggatatggcaattgacatgttctttcggatggtctgggcaggagttagtccacttgtttatactgtctcacaagcacttcttgcttgccgagataatggtgcgcttgaagagggaaggcgcatacatacttttgtgctccgacatgggtatgagcagcacgtgcatgtgaggagctctgttgtggatatgtatgcgaagtgtggtgccattgatttagcccagaggctcttcgacttggcaccagtgaaggatatcgtaatgtctacttcaattgtgtcaggattggcttcctgcgggaggattactgatgcaaagcgggtgtttgaagggatggaagaacacaatttagtgtcctggaacgctatgttaactggttatgtcagatccatggatctgactagtgccttgcaattgttccagcagatgaggcaggagacgaaggagcttgatgctgttactctcggctgtgtgctcaatgcttgtactgggcttcttgatcttgggaaaggtgaggaggtccacactttcgctttcaagagtggttttattggttatcctttcctgaagaatgctctcttgaggatgtattccaaatgtggatgcttaaggagtgccgaacggcttcttctatttgagatgggatcagaaagagacagttactcctggaactcgcttatctcaggttatgaacgccactccatgagtgaagcagctctgcttgcactcagtgagatgcattatgaggcgacacctaaccaatcgacgttcagctcagcactggcagcctgtgccaacatatttctccttaatcacgggaagcagattcatgcatacatgatcaggaacggttatgtgattgatgatatactgcaaagtgcacttattgacatgtactccaagtgtagattgtttgattactccatgaggatctttgaggcaggaccatctcaagatgtcatcctctggaattcgatgatctttggatgtgcttataatggcaaaggcgagtatgggcttgaattgttctttgaaatgagcaagcaggggattacaccagactctgtcactttcctcggtgcactggtttcatgtataagcgaagggcacgtcgggttgggacggagttatttcacccagatgactgatgaatataacatcgtgcctcgcattgagcactatgaatgcatgattgagctgttgggcaagcatggctacatggttgagcttgaggattttataggtcacatgccattcgagccaacaactgcgatgtggttaaggatctttgactgctgcagggaatacgggaacagaaagttaggggagagggctgcccagtgcatcaatgacagcaatcccctgacaccagttcgatttgagattgctccagactacaaatactgtgatgatgacagcgatgagtcaatgtcagtgagctgggagggttaaaactagtagtaagaattatagctggccctctgatttcggtcaaattgacaaagagagggccaaagtgctaatggacaagctgaatcaatgggatgaactcataaaataatttttcagcttcctttaagctgatagtgtccatgttgacaggactctgcttagataagctgaaacaatcgttgtggggtatcaggagttgaagaccccaagctccctccgtgcttgaatttgaacacgatttggtaaaattcttgtgttctcgtggccgagaattacctactgctgacttccagaattttggggtgttgctttctgattgtaaacttattccatgagggagctatcaacaagcaaatggcaaggtctagtggagctttgctactactgcctccattctaaaatataagaagttttagggttaaacacatgtattaaaaaagttggtagaattaaacggaaggatgttgtgattaattgaaaagaagagataggaaggggattttaatggtggaatgttgtgattggtcaacaagggaatgtaggtgaagaggttgttatatttttgcgacaaatttcaagtactagaagttgagtacttgtttatgtaatatatgaatgccactttgctcc

SEQ ID NO: 25674 - DNA, 2830 bp, Oryza sativa
  ref <308>: DATABASE ACCESSION NUMBER: AK101116
  ref <309>: DATABASE ENTRY DATE: 2002-08-28
tgggcgagatcaccgccccccaccgtcccggagcgccggcgtgcggcgagcctcgagggcgacgccgcctctcctcacgagccacgaccgtgatgctctgaggccgaggccgaggccgacgccgacgaggaggacgagccgaacggcccgaaccatccgccgcccgctcgcgttcaggggtaggaggggttggggggaagagtagtgaatagtgatcaacaaccagcctccatgggaagccccccgcggcgagccaatgcgctgggctgcctgccacggcggttgtgcatgtccatggcatgtccattgaaattttgctcagtcttcctcttcgataggagagcatggcctcctgcttattccctcgtagtcctcccatgcaccgatgaagtgattgagcgagtcatctgttacattgggggtggttaagtggtttgctgggttgggttgcattgcagccctgcggcctcgaaggaaggcacttcagatgttcgatgaaatgcttcacctgtagcctcctgcctggcactttttcaggcgcgatgtcctgagagaaggaaaaatacagtgcgccggataattatcgtatcttgcttactgcattcttggcagttgggctgcacagtggtgactctataagtcaacaatcgtctgtggttggttctgttgggggcaacatctataatctattgcatagaatagccaatgatctttcacttgtcatctttctttatttagctggggccactttgcgaggaaaaaaaaagtataccatatgtctatatatacctcctatgatggaatggaagtatgcaatgaagaagtagtaatcaagtgcaagaagacgctaattcatctgtagctgatggtggttggaggctttgtggactggaggggaaacccgatagacagaaaggtacatggaggagtcagagctgcatggtttatgttctttctgtcagtggtaacaaacatggaaaatattccaaacatgctgaatttggttacatatctccatggaaccatgcatatgggagtttcaagctctgcaaccacagttactaacttcattggtgccacatctggatttgctttattaggagctttcctctcagactcgtacatcactcgctctagaaccatactactctttggtccgttggagtttctggctcttggattgctcgctctgcaagcctacctcccctcactccatccaccaccttgcaatattgaagcagagctaagcaactgcgaagaggttcatggcttcaacaccgtcatattgcacataggcttgtacacctgggcattcagtgaaggctgtatccgtgcttgcacgccatcacttgagcagatcagtttgaccatgaagatccctctgaatcccgccaacaatccagtttcttcaactggttcacctttggaatctccttaggaggatttataggattgattctaatagtgtggctcgagaactacaaggggtgggacattggatttggcgtgtgtgcactgctaattcttcttgggttgctcatagttgccactggcctccctttctaccgtaatcaagtaccagaaggaagccctctaactcggatactgcaggttcttgtggttgcattcaagaacaggaaatatgaacttcccgagaaacttgaggaagcacaagaaaaccgtaatggactggattctattgaagtaccacgtcctacaaattttctgaaatttcttgacaaagcctccatcaaccatggtgaagatggagcctggtcagtttgcagcacaatgaaagtggaggagacaaagattgttcttcgaatgcttcccctcttcatcagctccatgatcggttatatctcaaaccctctgctcctcactttcactgtgcaacaaggtagcatgacaaacacaaggctgggcaagatacatatctcccccgcgacgctctttgtgatccccatcacattccagatgctaatgctcgccgtctatgatcgcttccttgttccgttcatgcgcaagcgcacaggatatgcctgcggtatcactcacctgcaacgtgttggcttaggctttgcctccatgatagttgcatcggccgttgcagcagtcgtcgagagaaagaggaaggaggcagctgtgcagatgtccctcttctggcttgcacctcagttcttcttgcttggcgtgtcagacgttacatcgttcgtcgggctgcttgagttcttcaacagcgaagcaccaaaggatatgaagtccattggcacggcgctgttctggtgcgagctgggtctcgcttcatggatgggcacgttcctggtggagctggtgaacaaggctacgaggcatggacaccatagagggtggctcgagggtacaagcttgaacaacagccaccttgacttgttttactgggtggttgctgttatcgggctgcttggcttcttgaattacctgtactgggcgaagaagtatgcctaccggcacaatccacgcatggtcaccccatcagctgatcaggactcaccgtgatagatttgattgctcttgaagcaccatttacttcacagatgcaaagcaaaaggtaaccatgtactgatgtaagttgtatcatgctgtttgtgttcagttgattggctggacttggtcgttgatcatttcgactcaaatgtacattttgtaccattccgacccaaatgtgtgtaaaagtggtcgttttctgtggcaaaatatatcattcagagacaactccaatacaactgtatgtctatgaccgtacaaaattttactaatgcccaattatatctcttcctactttcctggt

SEQ ID NO: 25675 - DNA, 2272 bp, Oryza sativa
  ref <308>: DATABASE ACCESSION NUMBER: AK101117
  ref <309>: DATABASE ENTRY DATE: 2002-08-28
gattccgcctgaaccccacacccggattccgccgtcagccaaaaccctcgccgccgccgccggctgcatgcgtggtacctcggcaccggagaactcccctgtcctcctggccgtccgcgcgtagcctccgctctccgacgcagcgcccgcccgcccgcccgcccgcccgagcaccggcggcccttcgtttctccggcacctccgccgccgcgcgacgtcggagggatcgcaacaggaggccagaacacaagaattctgctggattagggttgttgctctcctccaagtggcatccaacggaacagtaaatgaaattagagctgaacaagatatctcttgggtgtattcttatttatctgttgggaacttcaaccaaataggttctcagaattggcttcaaagttcaaacccatgtgctttctgctcgtttgacatacccactatatacatttcacaccattccactcatttgcaatggggcctcacccacctagtagttattcagataaaaaaacttgccaaaatgtcccaccagaaaaacccagctccacgagtttctgccatccacaatttccgcagcacttactttcacatccagcatatgcaatgaatttccctttcccgccgtttcctcactatcctccatactcgcaaaatttccaatatgctgttccaccacaatatgctccatactcattaccgccacctgatggagctatgccatcaccatatgtaccagctacagttatgccatccaaggcaccctctgatcaaggcaccccacattcagtaactggtccaggacaacaagatgatgacgatgctgaacctgagaggactgctaggcgactagcatggacagaagaggaagacattagattgataagcacttggttgattaactacaagactgacaagtactgggataaggttgcagcagaatacaacagtgcaacccccggagctcggagaagggaagtgaagcatttgaagaaccgctggcagaggatgatcaataaggtggcacatttcaatgattgttggtgccgggtcatggcaaaatatcctagtggccagtcagagggcatgcaacagatggacaaaacttggctgatgtataataaggaagcacatgtgatgtatctcgaagaagcgaagcataagttcacctttggccattgctggaacgctgtttgggaccaacccaagtggaaagaatacatctcttctttctccgcaaaaagagtgatgcgatctgagtccggtggttacgtgtcatcttcggaagactctgaagatatgcaagaaggaaaatgcttagtggatcctctggacatgcttcccaagaaccatgaagatatgacagaagtccagccgtctgtctcaaatcaaaagaagcaattagaactattgacagctgatgcgtcgtggcctattgaatttcagcttgggaggcaccaattgatgactggaacatcaaaattgaacgaacatcagcagggggtggcagtgagggatgaaatgcttgaaaaagaatcgggcccacaagattttgaggtgctagacaatgagagagtggcaagggaagatgaacctaaaaaagaaacacagcctcatcaaggtttcaaggcgcgaaaggtcaatcggaaacgtaaaggcaaggcatcatcttcttcatgtgaggtgcaggaagacatcaaacatgcattatatcttcagaccatgcttaacaatgatcgtgagaaaatgtcagaggtacagctccgcctctcgaaagagcagcttgaattggccagaataaagcaggatgaagcgaatgtaaagaaagaaacagcactttacatgaaatacacagagctgttgctggcagacacttcaaggtttgatgagtttcagaaggcagagtatgagaaagcattgaagcatataggagggatactatttagcaaggatgtcaattagtgccctcgcaacaatttatcttaagcatgcatttctgtgcaaatatcatcccaacaactagtaatagatcgttttgttctacttaactgaaggattgcctccactaacacctgtgtctgtgttaggtttaatcatctctagcaagatttaacagagattagtactgattgaatcgtggaagtgatggatcaatatgtatttagctattagtggcttatctaatttgcaactgacctgtgcaaagaatgaactagtggcttgtcttggagtgatggttgaaggcaaattgcaaatacttgaaagttaaccc

SEQ ID NO: 25676 - DNA, 2691 bp, Oryza sativa
  ref <308>: DATABASE ACCESSION NUMBER: AK101118
  ref <309>: DATABASE ENTRY DATE: 2002-08-28
gtcgaaccgcggtgaaccggggcatctcgtcggcatatttcgcggcccgaacctagggtttcgtcacgtccccgtcccccggcgatggggccgaccgcgccgccgccggacgccggcggcggggagccggaggcgtggtacggcagcatccagtacctggtcaacatctccgcggtgggggccgcctcctgcgtgctcctcttcctcctcgtcaagctccgcttcgaccaccgccgcatcccggggccctccgcgctcgccgccaagctcctcgccgtctaccacgccaccgcgccgcagatcgcgctccactgcggggccgacgccgcccagttcctcctcttcgagcgcgcctccttcctcgtgctcgccgccgtggccgccgccgccgtcgccgccgccctcccgctcaacctcctcgccggggacgccgccatcgccgaccagttcgccgccaccaccatctcccacatccccaagtcatccccgctcctctggctccatctcctcctcaccgccgccgtcgtcgccatcgcccatctcggcatctcccgcatggaggacgcccttcgcatcacccgcttccgcgacggcaacggcaaccccagcgaccccaactccagctcggttgccgtcttcaccatcatgatccagggcattcccaagacgctcgccgcagacaagaccccgctcaaggattactttgagcacaagtaccctggaaaggtgtaccgggtcatcgtgcccttcgatctctgcacgctggagtatctagctgaggagtgggggaaggtgcggaacaggatttcttggctggaggcaaggatggatgcccgcaacctatttgatgaatttgctcagggtggaagacattcagaagagcattggattgtgaggagatgcaaagagctgtgggtgatgacagcagagaggttcgggtttactgacgaggaaatgctaaggaggttgcagacaaagaaacttgtcctcggtagcaggttatcggattataaggatgggcgtgctcccggtgctggcatagcctttgtggtttttaaggacgtgtatacagcaaacaaggctgtgagagatttccggatggaaaggaagaagacaccaatagggaggttcttcccggtgatggagctccagcttgagagaagccgttggactgtggaaagggcaccaccggcatcagatatctactggaaccatctagggctgagcaagacctcactaggattgcggcgtattgcagtcaacacctgcctcattctgatgctcttgttcttcagttcaccattggcaataattagtgggatgcaaagtgcagcgcggatcatcaatgtgtaggctatggataacgccaaatcatggcttgtctggctccaaagctctagctggttctggaccattatctttcagtttcttcccaacgtcctcatttttgtgagcatgtatattatcatcccatcagtgctgtcttacttctccaagtttgagtgtcatctgacagtgtcgggagagcagagggctgcattgttgaagatggtttgcttcttccttgttaatctcattctactgcgtgcgctggtggaatcatcgcttgaaagttggatactcagtatgggccggtgctacctagacagtgttgattgcaagcagattgaacaatacttaagcccctcttttttgtcaagatcttcactctcctccctggcattcttgatcacatgcacctttctaggaatatcctttgatctgttggctccaatcccttggataaagcatgtaatgaagaaatttagaaagaatgatatggtccagttggtccctgaagaaaatgaggactaccaactgatgcatgatggcgaagaaacaaataatttgagagcgcctctaatgtctgagagagaagacagtggcattctgaatggtattgaggagcatgatctttcattgtacccgataaacaggagcttccatatgccaaagcagacatttgactttgcacaatactatgcatttgacattacaatattcgcgctcacaatgatctactcactgtttgctcctctgacagttcctgtcggcgcagtatactttggctaccgataccttgtggacgagtacaatttcctgtttatctacagagttagagggtttcctgcaggcaatgatgggaagctgatggacatggtgatctgcatcatgcaattctgcgttattttcttccttgttgcaatgttactattctttgcagtccaaggtgatcctatgaagctacaggcaatatgtactcttagtttgttagtcttttataaattgctgccctctagaagtgatcgcttccagccatccttgttggaagggatgcagacagttaatagctttgtagatggtccaacagattatgaagttttttcacaacctgacctggattggagcctgtatcaatcctgaagaaaatttcaaggtcaatacacacttgtttagttatttcttatctctttcacctgagcttttcattgtaccactcttgaccttttgtacagttacataggtaactcttttggcttctagctgaatttgtttgttggaaatgaaaagcacgcactgtttagatcattaaagctgtgtatctaaaattctatgagaagaaaatacttaacattatcctacacgaacggc

SEQ ID NO: 25677 - DNA, 2758 bp, Oryza sativa
  ref <308>: DATABASE ACCESSION NUMBER: AK101119
  ref <309>: DATABASE ENTRY DATE: 2002-08-28
aaaaaaccctagcgctctctctctctctccccccaccctcccttcgcctatagctgaggcggcggctcgtcggcggcggcggcggcggaggaggaggaggaggaggaggaggcagcaatggggaagacgaaggggaagcagcggcaggacaagttctaccacctcgccaaggagcaggggtaccggagccgcgcggccttcaagctgctccagctcgacgcgcggttccgcttcctgccgacggcgcgcgcggtgctcgacctctgcgcggcgcccgggggatgggtccaggtggccgtcaaccacgcgcccgtgggggccttcgtcgtcggcgtcgacctcgtccccatccgccccttccgcggcgcgcactccctcacggaggacatcaccaccaccaagtgccgcgccgccgtgcggaggctcatggactccaacggcgtcgccgcgttcgacgtcgtgctccacgacgggtcccccaacgtcggtggcgcgtgggcgcaggaggccaccgcgcaatcgtcgctcgtcatcgacgccgtgcgcctcgccaccatgttcctcgcccccaagggtgccttcatcactaaggttttcaggtctcaggattacaacgctattatgtactgtcttaaacagttatttgagaaggttgaagtcactaaacctactgcaagtcgttctacgtctgcagaaatttatattatctgtctgagatataaagctcctgcaaagattcagccagaacttttggatataaagcatttgttcagtgtggatccagatcctaaaaaggttagggatcctctcaagccggacagacagaagaggaaccgtgatggatacgaagaaggaaatacaacattgcgaaaagttggtctggcttcagattttatatggtctgagggccaaacgcccctagagtttcttggttcttttaatgcaatttcatttgatgacccagcatctcttcctatcaagaaccatgagcttactacagatgagataaaagctctttgtaaggatttgtatgtactggacaaaaacagcttcaagcatatcttgaaatggcggatacgcatacggaaagcactatcatcttctgaagtcactaaaaaaactgatgatactgcggtggaagtcaatgtcaaggatgatgaccaacttctacaggaaatggaagaattgacgagtgtcattgatagaaagaagaagagagaaaagaagcgtcaatcaaagcgccgtgcaaaggataaagcacgcaaagcaacaggaatgcaaatagatgctacaggagataattacggcgatcctgatttgttttctataagtgctatcaagggcggaaaagaactccaagctattgaatcggctgagcttaatgtagaagatgcccaaggagatagtgagaatgaggatattcaaactcgtgaatactctgatgaggaaatggattctgacgaagaacagcagaggtatgatgcccaacttgaggaaatgcttgatgaagcttatgagcgttatgtaactaaaaagggtggtgaagtgaaacaagaacgcaagcgtgcaaaacgagtaaatactgatgctgatgaagaattattagagggaggtgaagatgacggtgacgatgttgacatggatcaaggttctgatgaagagcaagatcaagagaccaatccccttttattatccctagatgcagagaaaccaacaaaagaacagatgatggagcagtggttcagccaggatgtattcacagaagcaggaacaggtgtggttgagcagagtgatagtgaagatgaaagagagcagctaactaggattgcaaaaaagaaggcggattctggaaagaaggaaaagtctgctaaagcaaaacacttgcaacaggacgattttgggattgtgccagcagaaccagtccgaactgaagatgactcatcttcatcttctgatgagtctgatgaactagatgaggacctcgacgatgacacaaaagctgaagtactagcctatgcaaggaagatgttgaggaagaaacagagagagcagatacttgacgacgcttacaacaagtacatgtttgacgacgagggtttacctaaatggtttgctgaggatgaaaagaggcataaccagcctatgaagcctgtaacaaaagaggaggtagctgccatgagggctcagttcaaggagatcgatgctcggccagccaagaaggtcgctgaggctaaggctcggaagaagcgcgtcgccatgaagaagctggataaggcgcgccagaagggcagatgccatcgcagatcaaaacgacataaacgagcagtcaaagaggaagatgatcgacaggatttacaagaaggcgattccaaagaagccccagaaggagtacgttgtcgcaaagaagggcgttcaggtgagggctggcaaagggaagatactggtggataagcgtatgaagaaggacaagagggccagcaaagtgaagggtggcaaaggagctaagggcaaggggaagaagggcggcggccagaaaggcggtatgcgagggaaagctgggaggaaagcccaaaactgagtagcaatagagcatgactgaattttctactgaatttttgttcagtggctctactgctcaatttttgtttacttataacttaccgaattcatatgtacggaatttttaaatgcgtgaattatcagttgtctcgtcagattatattttcagtcccatcgttttttaagcctacaactgatt

SEQ ID NO: 25678 - DNA, 2350 bp, Oryza sativa
  ref <308>: DATABASE ACCESSION NUMBER: AK101120
  ref <309>: DATABASE ENTRY DATE: 2002-08-28
ggctgcctgctttgcccacgaaaagacaacccaacccggcgagtcgtagcagagtagagagagaaagaggaggaggaggaaaaaaaataaaattaaggcagttcgttcgttccccacttttgcctgctccaatcgccgccccccgccccgccgcctcgtcgcccgcccgagatccgctccgcgttgcctcccgccgccgccgagatagaggcatcgttcccagcattgggttccacggagaattgccaatttggatatctgatccaattgttagttggattgaccgtttcagagtgcctgcagttggctgctggattggtcaatataagaaaaccgttggtttcggagatgatgccattgtgagtggaaatggattccgcgagaagttggttccagaagttccagccgagggacaaatcgaagagtccagcggtggctgccagtcatggaaaggatccaggaaagccaccaattgatgacgcgccatctagtgcaacaaaacagagggttgccgcggcaaaacagtacattgagaatcattacaagaccaagatgaagtccctgcaagataggaaagaaaggcgctggatgttggagaggaaactacaggatgcagaggttcctgtagaagagcaaaataatattctaaagcatttggagaaaaaggagaccgaatatatgcggttgcagagacataagatgggggttgaagattttgaacttttgacaattattggaagaggtgcatttggcgaggtgcgtctttgtagagagaaggcgtctaagaatgtatatgcaatgaaaaagcttaagaaatctgagatgcttcgtaggggccaggttgagcatgtcaaagctgaaagaaaccttcttgcagaagttgatagtgcttttatagtcaagctctactattcttttcaagatgaagaatacttgtatctcatcatggagtaccttcctggtggtgacatgatgactttgcttatgcgcaaggacacactgacagaagatgaggccagattttacattgcagaaaccgtattagcaatagaatctattcacaagcacagctacattcaccgggatatcaaaccagacaatctattgttagatcgcagtggtcacttgaagctttctgactttggattgtgtaaacctttggatagcagtaattttccaaatttgaatgagccagattatacatctacaaagggcaccaagcctttacctgatagtagcagccggttaagctcttctgctctaaagcgcacacagcaggagcaattgtcgcattggcaaaagaaccgacgaatgctggcatattcaacggttggtactcctgattacattgctccagaggttctgctgaagaaaggatatggaatggaatgtgactggtggtcccttggtgcaattatgtatgaaatgcttgttggttatcctccattctattcggaggatccaatgtcaacctgcagaaagattgtaaactggagaagtcacttgaaattccctgaagaggcaaagctttctcctgaagctaaggatctcatcagcaaacttctatgtaatgttgagcagagacttggaacaaaaggagcccatgagataaaagcacatccatggtttagaggtctcccatgggaaagattgtatcagatgaaagctgctttcataccagaagttaacagcgagttggatactcagaattttgagaaatttgaggagaccggagcacaaattcaaagttcatctaagtcaggtccatggagaaagatgcttccgtccaaggatgcaaactttgttggctatacatataagaattttgaaattgtaaatgatgatgaggttgcaggaattgctgagttgaagaagaagagttccaagtcaaagcggccaactatcaagacattatttgagagcatggatgaagatgagcctgttcaaggaagtttcttaaatatgttgccccataaggaggggcaaccttcatctcactccaccattccaccagaacaataccaacctcgacataaataggataaggaggttttcaaaagtaaaacacagataattaaaacaagaaaaaaattggttccttttgatcttgtttcccgtccaagctttgtaaattctaaccgatgctttctcttctcaaattcttcatacaaaaatccctcctctgtccaaagagtggtgtttgctgtacgcggcgatgtttgtttggttcgccgtgtgtttgggttacagcttcggtgatgatgggtctcaggttacagctagtgtatacttgctaccatttctgacgggcatgtgtattgcaattaaattcacccctcttttgttctgc

SEQ ID NO: 25679 - DNA, 2359 bp, Oryza sativa
  ref <308>: DATABASE ACCESSION NUMBER: AK101121
  ref <309>: DATABASE ENTRY DATE: 2002-08-28
gggggttgtcgaggcggcggaggttgcggcggggatggacgcggaggggttgctggcgtcggcggcgatcaacctgggcctggcgctggtggcgctctcgctcttctccttgctcaagaagcagcccggcaacgcgccggtgtaccttgcgcggcggatggccgccggtggcggtgggggcgggctgccgctcggccacgggcggttgaccccgtcgttccggtggatccgcgccgcgctccggctctccgaggacgacgtgctgcggcgccacggcctcgacgcgctcgtcgtcgtccgcctcttcaaattcgggatcaagtgcttcgctgtttgctcaatcgttggattgttcatccttgcaccaacaaattattcctgtgaaggtctacaagacaccaaaaggtcaaattcaatggaacttttcacggtatccaatgtggcaaggggttctaacaggctttgggtgcattttgcatgcctctgcttcatatcattctatgtggtgtatttgcttcataaggagcacaaagaaatgtccagcagaagaattgcacatttgaagtatcacaggaaacggcctgaccaatataccattttagttcgaggaattccactatgcccagatcatggaacttatgggtgttatgctgaccacttcttctcaaagcactaccgaacataccaatcgtatcacatagtacacgacattggaaacatcaaggcacttcagaagttggcatcctcccttgaggacaagataaagaggaaaagagaaaccagaagatgtaacttttggaagtggatctggtttaagttgacattagaagcgatagatactcgcaaactggaagaaaaactgaagaacgtccatcactctatccgcctcctacagtgtgaaaatatgcttaaacggaaggaattaccggttgcttttgtctcattcaaatcacagctggatgctgcccaagctgccgaaatgcaacagcatgtcaatcctctgtccttggtgacaacatatgctcctgaaccacctgatgcactatggacaaatctggctattcctttctgccgtattgctatatacaaacttggtgtcttcattgctgcgtttctgctaatagtgttcttctccatccctgtcacagctgtgcaagggatagtacaatttgagaaaattaaaatatggtttccaccggctagagctgtggaacttataccaggtttgaattctgtcgtaactgggtatcttccaagcatgatcttgaatggctttatctacttgattcccttcgcgatgcttggcatggcatcatttgagggatgcattgcaaaaagtcagaaggaaatcaaggcctgcaacatggtattttacttcttgttagggaatgttttctttttgagcattctttctggttctctactccaccagataggagaatcctttacacatccaaaagacatacctagccgtctggcccgtgctgtttctgcacagtcagatttcttcatcacatacattttgaccgacggcatgtcagggttttccttggaggttcttcagtttggtttgcttacatggcatttcttcaaggcacattcaattggacatagtgagcagccatatctttatggcttcccttactacagagttgtgcccatcgtttcccttgcagtattgattgggttggtctatgctgttgttgcgcctcttctacttccaattcttgttatctactttttgcttggttacgcagtgtacatcaacaagatggaagatgtatatgagattacatatgatacttgtggacaatattggcccaatattcatcgctacatcttcctttcggtcacactcatgcaaattacaatgctgaagtcgaaaccgggggcttcattcgccacggttcccttgcttgtgtcaaccattttgttcaatgagtactgcaaggttcggtttcttccaaccttccttcatcgaccggttcaggttgccaaggagaatgacgaccttaatgaagctgaggggatgagaggtgacctggaccatgccattagcgcctataagccaccatggatgcgcccgacgaacttctctccagattgtagttcggtacaacctttgatccgttctgtatagtagtgttggtgacaccgctagcttggtattggttttagtcctgttacataataagaaccaggcaaattttcgtgtgaagtttggctgttggcagatataagctcgcatataacaatggcatatgctttttatgtgctcaaggagtcgttttacatgtaattaccacgctttggctcagtttactcggtgaaaattacaaattcaaacaattttcctctc

SEQ ID NO: 25680 - DNA, 2451 bp, Oryza sativa
  ref <308>: DATABASE ACCESSION NUMBER: AK101122
  ref <309>: DATABASE ENTRY DATE: 2002-08-28
gggaaaaacaaaaacaaatcaaaaccctaacacatcccagcggcctcctccgccatgccatcgccgccgccgccgccgcagccgtcgccgccggagctgccgatctcggagcacgaggacgagatcatggctgcggtggaggcgaacccagtggtggtggtgatcggtgagaccggctcggggaagagcacccagctctcccagatactccaccgccgcggctacacccgccgtggtgccatagccgtcacccagccccgtcgcgtcgccaccgtctcggtttccaggagagtagcacaggagctcagtgttccccttggtgatgaagttggttatgccatccgatttgaagatagaacttcagagaaaacctgcataaagtacctgacagatggtgttcttctgcgcgaaagcctttcagaccctgagttgaagcagtattcagtaattattctggatgaagctcacgagcgcagtttaaacactgatattcttctaggtttaatgaaacgattaattaaggatcgagcttcagatttgaaagttctgatcacttctgctactcttgatggtttgaaagtgtcaaagttcttctctggatgtcctgtgttgaatatccctggaaccttattccctgtggagaagttttacagcacagaacatccaacgaattatatagaatcttctctgagaaccgctatagatattcatgttaaggaatcccctggtgatgtcttaatattcatgacaggaaaggatgacattgataagatggtatcaaaattggaggaaagaattcaaaatctagaggaaggttcttgtatggatgctcttgtccttccacttcacggttctttgccacctgaacaacaggtccgggtatttgctccagcacctccaaattgtcgacgcttcattgttgcaacaaatgtagctgaaacatctcttactgtggatggtgttgtgtttgtgattgattgtggttatgtaaagcaacgccagtataacccatcgtctggaatgtattcacttgacgtagttcagattagcagagtgcaggctgaccagcgagctgggcgagctggaagaactcggcctgggaagtgctataggttatacccaatttccatttatcaaaaggagtttctcgaggctacaatcccagaaatccagcgttcttctcttgccggaagtgttttgtatctaaaatcgttagatctacctgatatcaacatactgaagtttgatttccttgacccaccatctcgtgaatcattagaagatgctttgaggcaattatacctcatcgatgcaattgatgaaaatgggcaaataacagatgtaggacgaattatggcagagctccctcttgagccttctctttcaaggactttgattgaagcaaacgaattgggatgtctatctcaggcattgactgttgctgcagttctgtcagctgaaatcacattccggtcaactagaagcaaagacatggagggaaagaggaaaaggcaagagcttcctgatggttctggttggggcgaccatatacagttgcttcagatatttaaaagttgggatcgaacaggctatgatccaagatggtgctcagatcatgagttgcaggtgagaggcatgaaattcagcaaagatgtgagaaaccaattaagtcagattattcaaaaaattgcaaaaggttcaacagatgtgcaagcaaagaaagagcggaagagtgaccctgattatagaaaattaaggagagctctatgtgttggatatggtaaccagctcgctgagaggatgctgcatcacaatggttatcatacggttggatacagggcacaactagtgcaggtgcatccattttccgtactggaaggtgatgaatacgggaaactgccggtatatgttgtctaccatgagttaataaatactactcgtcctttcatgagaaatgttagtgccgtggatcagtcttgggttaaacctatattgaagaagcttgaaagattggacatgaacaaattaagtggtggttccagcggatcgaaagatccagaacctctagaggataaacaagtaagctccccaaagaaagcaatggatgttaaacaatctgacgtggacagtaaaatacaggcagctcgcgagcgctacctggctcgaaaaggcaagaaatgacagtatgtgcttaaccaagctattctttggagggtaggtcccatacgtaatgagaggaacagggagtgataacatgacaatcttcagtatcatatttccctacctcttattacttaccatagcagaagtactgtaggtacaagcagagacatttatgtgagtctaaatttcatcatatccatccatttgtcaagcttgagaactttgtaaccgtttaaaggcctgtttggctggtgtcttggtgccatatgcctgaggattttgcatgcc

SEQ ID NO: 25681 - DNA, 3202 bp, Oryza sativa
  ref <308>: DATABASE ACCESSION NUMBER: AK101123
  ref <309>: DATABASE ENTRY DATE: 2002-08-28
gaaattgcgcaggctagaaactcggtcgatgctagcacgcaaggacctgactcgtcttcagcaaaattgtcatcagagcctgatggttcttctgcagataggccccggcatttcgttgagcttgctagagctatgaagattagtcaagacactcatgagtctctggccacagatgctgctaattatctttgttctcagattcagaaccttcttgcacctatttatcctgctgtgaaccaagggggtccttgggaagagaggtatgcaatgattaggttagctcagaagctgcagaaatccaagagaaataagcgatggagaaagagaaaaagaaagcatgttgcagagcttttccagaaggagcatgcagattatgacagaattgatcaggaagctgatgaatggagggctaggcaaatagccaaggacatggcgcagcgcaaggtggaaaacatgaagcagattgccaagaaaaaagcaaatgaggaaagaaagcgtctagaatctgaggtaaagttaatgcttacattgtggtgtggaaatcctgcttgtctgtggacatctgcgtggaaattgtgagcgctatgtttcattaattcattttcatacactgctgaattactatacattgtgataccttgagttatgaattttgttaagttgtagtaagcattaagttacaccattttttatctttgaccttatctgattttctacgaatttaggaaactctataagcttgcttctaaaatttcttaaagtcttgtatatttgtgtttgatatgctgcaacccaacatcttcaattacaccacctacctacctgttttctttcattcagaattattgtgcaatcagtttgtgaattcttgagtggttatttcagtatgttatatttagattccaaactattaatattctctgtagaaattgtaaattcaagagcggcaaatacaatagtcttgttttctagaaaactaattttctcaatacaaatcttctattttcagcttgagcttgccctaatggtcgagaaactacaggagcttcgctctatgagagttcaaaaaatgaagaaacaaggtcattttctgccagaagaagatgataaatatcttgagcgtgttaaggctgcagttgaggaagaggagcgccaagctgcaagtgctgctcggactgatgctgccaaggatgctattctgaccgcggaagagtcgaggaaggctgtgcagtgttcaaattcaagagaagatgattctgatcaagccaaaagtgcaccaacactggaacaaaaccagagagatccaggaataagcggcagaaatcatcatgcaagccaaaaaacagagcatgaacttcataaagatgacagcaaagggcatgggcattatgattctgtttccagtctgccttttgagttctaccattattatcatggaagcagctacgacatgggaacactcattgaggtccgcaggatgtgggattcctttattagagctggaggaagccgaatacctgggcactgggttcagccaccccctccagctgatgaagtatgggcatcctatttagtgcagcccaactgtccaagtaactccacttagctgtaatgaatttaatcttcttctgcctaaccactggaagttttcaaggttatcacaaggcaagtaggtgtttgagttgctactttttccccttcatgtcaactattaatgcagaaatttgatttaatatgtagccaattgcattgatgaaaattaaattgactaagcaaagttcaattgcttgcactatgaaccctcagttaaacacttaattatcttatggtttcacatgagttatccaatataaggccctgtgagtttcttcaccagcataaacactaaaaaaaatattacgaagaaattgtgttccggtctatgctttttccaggatgtctttttgcacatccatgatacgctccacttatggtctgaaaattttaatcaattttgttgactgtggggcaagattgatactgtcagtgacccagtcctgaacttctgataagtgataaccacttctgcagtcttgagtcaccattgtagttcaaatgtgttgctttgtaagttctatgtaatcaagtactaaacattggaaacaccattaaacttctttgccttctctaaagagaacttattgtagttcatgccaaggaccaaattggatgtatacaattcagccttgcgaactcgttttatattcggaatcaagaaaaaatgaagaaaaatgctagaatgggcatcccttttctgataatggtatgcagacatggtggaggcttttctatgtgatgattactggccacaggtccttttctgatctgttgagtagttcatgacaactaccagatcgtgactcaaaatcaatgggattttacatattagatcaaccagtgttgttcctatccactgctctaattgttacgaatgcatggagacatcatgttatacttatgtaccaatctgttcttatggtgttgaactgaacgtacaaaactgttgtaggctgttgcttagactgtaagctatatattcaacaggctggtgatataccttgaataaatgttaggaatcgtttgcccccttcctaatgatattccatagtaacctgcatcatgaatcaccacctgagaaatgaatagcttagcatatgagctataatgtttcagcatttgatcaaactcccagttcagcccaagattatcttgaaatctaaaacactgttgtatgaaaattacatattcataacataaccttagtattaattatagttatagtgtttattcagttagtaccacaataccagttaaattttaccctatatatctctttaatatgaggttttcattgaatatttatctacgatgcaatcggtcctgagagcactttaaaaaaatatatatgttctactttgtttaaagtttctgagaagctttgtgtttgttggatcagataccctggtgaagatttaaaccgaggaatgttttggattcaattttctgagtaagataggactaagaagtggaccggcaaatctagacttggaactgtatctagcaatagtcaacagatacgagcaaataacttcataacatgatagcttagatgaatagcggatttgttctttagcttatcatttcaatacattttattcatact

SEQ ID NO: 25682 - DNA, 2111 bp, Oryza sativa
  ref <308>: DATABASE ACCESSION NUMBER: AK101124
  ref <309>: DATABASE ENTRY DATE: 2002-08-28
gggcgcgcgccaccaccgcgacagtttcccgcgcttttttttttttttgcccctctctccggcgaccggcgctagggtttcctccattcggcggggcggtggtggggcgcgctcgccggagatggcggggtacgagagggagaagaagcggctgctcgacctggccgctgactccggcttcgagcgcgacctcgccgccgactgcctcgacaggatcgtccgcctctacggagagggcggacaaggttttattaccgtggagaactgtggagacgatttccttggcgcattggctgatgcaacaaacaataatgatgattgggatgatctcaatgctatagagaatgaagcttgtggcaatttgaatggcatgatgaagcacggtgtaattgatgataaagaagttgaggtgagaactcctttgttcagacaggcagaatcctctgctcgacagactcgcatcaatctggactccttcgggttctcctcagatgatgactttgaaacgttggagtcccattgtgatcgttcagtcagtacccagaagaaggtgaacagaggaaacaatagatgtgagtcatccacttcaacttcaaacagagaaactctaagttatcagcagctgtatagcctagatgacatcaattttgcaaacgttgtcatctttggcaacaaaagctttaggcccctgcagtatgaggcctgtagggctgcagtaagcaacatggacacctttgtgcttatgccaacaggtggtggaaagagcttgtgttatcagctacctgcaacactgcacccaggtgttacggttgttgtatgccctctactgtcacttattgaggatcaaattgtggcattaaacttcaagtttgctataccagcagcatttttgaactctcagcagacaccttcacagtcatctgcagtaatccaagagcttagaagtggtaaaccgtcattcaaactcctctacgtcactcctgaaagaatggctggaaacagctcatttattgggatcctcataggtttacaccagaggggtttactggcgagatttgtgattgatgaagcccattgtgtaagtcaatggggacatgacttccgcccagattaccgaggcctgggatgcctcaaacagaacttccctcgagtaccaattatggctttaacagctacagcgactgcatctgtctgcaaggacgtactaagtaccttgaggatccctaatgcaacggtactcaagaggagctttgacagaacaaacctggattatgaggtgatcggcaagacaaaaactccacagaagcagctgggtgatctcctaaaagagcgtttcatgaacatgtctggtatcgtgtactgtctgtccaaaaatgaatgtgctgacactgccaagttcttgagggagaagtacaagataaaatgcgcacattaccacgctggcttggctgctcgtcaacgatccaatgtacaaggaaaatggcacagcggagaggtcaaagtcatttgtgcgaccatagcatttggcatgggaatagacaaacctgatgtgcgctttgttatccacaacaccatgtcaaaatcgatagaaagctactatcaggagtcagggagagcaggaagagacaatcttccggcacattgcattgtgttatatcagaaaaaggacctcggtcgaattgtatgcatgctgaggaattcagggaacttcaagagtgagagcttcaaggttgcaatggagcaagcaaagaaaatgcaaacatattgcgagctgaagacagaatgccggaggcaaactcttcttggccacttcggtgagcagtatgacaggcaaaggtgcaaacatggttgtagcccttgcgacaactgcataaagattccctcttgagagaacctcttccaaacctactgctgtgtgctgacatctatggtcttggtagaaggtcacttcctgagagccattcttacttatgatttggccttagcaccggaagtactgcctgaatgaaagcaaatgctgtccttgttgtaagatgcttgacatttttatcctgcagacattgcgcacgagagaaatcattactatttgcatgagaagtcttcattacatt

SEQ ID NO: 25683 - DNA, 1742 bp, Oryza sativa
  ref <308>: DATABASE ACCESSION NUMBER: AK101125
  ref <309>: DATABASE ENTRY DATE: 2002-08-28
gaatctgttcgttctcaaatacttgccacctcgcccggtcgccctgtcccgggggcgacgcgggcggcgaacaagccacgccgcccgcccttctcctcccctccccagcctcgccgccgcccgagccgccgccggcaaagccgggcggctgcaaggacggcggcggcggggctctctctccctcgctcgcggctaagacggtcgggacgtcggcacggcacgagctcagggcatggcgtcggcgccgaccagatccggtgccgtggcatccagatccggtgcggtggtggccggatccggtcccccagtgacgggaggcggcgtcctggcagctcggcggcgaggtttggtggtgggtttgggcggcggcgacctggcgcgaccaggcggcggcgacctggcgggagacgctgccggagctgcctccagtaccgagcacggaggcgtggccagacgacggatgcggcggtggaggtgccgcgagagccggtggtgacgccggcgatgcgggaggaggcaacgacgcctctagccagatctggctggcggtggttgcggctgccaacggcggcaatgacggcggtggcggctgtggcggcatcgactgcggcggctggctggcgaggcagcggccgtggtggtcgaggcgtcgtggaggcggtcgcgcggcctcgtgggtggcgaggcctgccatgcaggtgtcgtggaggccggcgacgtgtggctgtcgtggaggccagcgtcgtccggcagcgggagggcgtcatggagaccggcggcggtgtggagtcgcggtcggcgacatggagctcgcgggcggcgacagcgggtgctggtggctgtaggctgcgacagcggacagcttgtggtgatggccgtggcgatcgtggacgtggctgcggcggaggaggtgaggatggtgatggcgaggtggctgggcgttcggcagcagcggctgcggtggcggagaccacggtcaccggaggcatggcggcttcggacggctagccgagggcgtggcagacggttgcatctggccagcgtggcatcgtttggaggaggggtcggagaccggcttggcgcagaggcgcagccgatggcagcggaggccggctcggggcaagaggcgcgggcggcggagatggaggccggcttggtgcgagaggcgcagccgatggagggaggccggattggcgcgagaggtgtgtccggtggaggaggccggcttggcgcgagaggcgcggccggcggtggacgaggcgacctcggtgtgaggaagagctgccgatgggtgtagcgcggtcttcgacgcacgaaggctggccggcgggggacgccggtgcaggggtcccacatgtcggcagagcttgagtggtggtggagcatcggtgcgtcagccgtggattcgcaggatgccgggcgtaagcctagtcttggctccttgagccccgacggacggcggcaacggttttccgtcgcttctcttcttgaaggcgtcgttttggcatcccctagggggcgatcttcgtctatgttcctttgttggtctagcggcggtcggtcacgctaagcggcggccgattcggtgctagccttctcccgggttgtgtgttggcgctgtcgatgtgtgggtggtggtatatttttttcctttttcctggttacgaccatccaaggttgtaatcttataatttttttctgctctatcattataatttcgcaccgtctcgtgcgagtcgttc

SEQ ID NO: 25684 - DNA, 1947 bp, Oryza sativa
  ref <308>: DATABASE ACCESSION NUMBER: AK101126
  ref <309>: DATABASE ENTRY DATE: 2002-08-28
ggacgattcaaaaatccctcttctcctgtccgcttcctctccggccgccgccgctagggtttggtttccgccgcctcctccggctggtcccgtcccgcccgccgccgcctctgctctccttgttccggtcagcaccctgaaagttgcacaataaccctgagcagtcttcaccaaggaaacgggctgtctgcttgtctgatgtgctattcttgttctggtatataaatcggctgctatttaggacacttcttgattgaaaatgccaacaagaaaaaaaggccttgcaagaaatgccaccactgagcatatcaatcccccaaatagccgaaaatcaagcagatcaactcaggctgcagctgctgaacataaagtcaatgatctgatcacttcttcctccaaaaagcagatcggtggaggccttctgaagaaaaatcgagctcttaggggtgggaaaaaattgaattctatttatgattctgctggtactggaaatgatgtcgcgggcgtgccaagtagcagtttcttcaatcacaagcaatctcatgaaaatgatgaagatcgttcatgtgattccatattttctcccagttttcacaatcagaaggaagatgttactgactgcttgagcgaaggcttagtacatgaagaagtcatacatgagcctgttcagaatgctgaatatgttaccaatagcatatcatgcaatacttttgatggtttgagcaaacactcttatgatattcatatgcaatcggcatgtggaagcacgctcgaaggtgatgaattcagtgaattgggcagcctttctcctgaagtgtctgctatatatcttgcaatgcagcactcaaagctagagtgtattgatgaacaaagccaagattctacctcaacagatgggtgtgctgatcctgatgaaactgtagagcttgattattttgatccgtatgccttcataaaagatttgcctgatttatctttggtggttcccaagtttcaacctgttcttcttccaaagcaaactcggagctgtcctagaactacccttgtccttgatctggatgagacactggtgcactctactcttgagccctgtgaagattctgacttcacattcccagttcattttaatctcagagagcacacaatctatgtgcgttgccgtccatatctgaaagagttcttggagacagtagcaagcatgtttgagatcatcattttcacagctagtcaaagtatttatgcagaacagctacttaatattcttgatcctaaaaggaggttgttccgccatcgagtttaccgcgagtcctgtctctttgtggagggaaactacttaaaggatctatcagttcttggacgtgacttggctcgtgtggtcattgttgataattcacaacaggcctttgggttccaattagacaacggcgtccctattgaaagttggtttgatgatcgtaatgacagagaactcctaacattacttccatttttgcaaagtttggttggggtggaagatgtccggccatgtattgcaaggaagttcaaccttcgtgagaaggttgccactgcaccttctctctctatgcacttttagatgatcaaatcattttctgggatatagagaaataaattgaagtggcagttgtactctatagagaaggaaaacatgggcagttgtgtgaattgctggagaggacccaaggtggtgaattatctgtatctttgccctggtgtaatcctgtgtacttggaacccataaaatcgtgtaaaatatgctctgttgtactaatatttatacctgaagaactagggaatcctgtgttagcattaagttaaaatactctacatgagagttggcatggccttcttgttgtgcattgcagatagaactgctcagcacacaatagattatcctcttggtccagtgagtctgtaattgtcgaaagt

SEQ ID NO: 25685 - DNA, 2957 bp, Oryza sativa
  ref <308>: DATABASE ACCESSION NUMBER: AK101127
  ref <309>: DATABASE ENTRY DATE: 2002-08-28
gaacaacttccttcccgtacaagccagtgcccgagccacgcccccgccgcacttcgcccctcgccgcctagcttgctccatcctccgcgcccgcgcagctgcgctcgccgtcgccgtcgctgcctagcttcctccagcctccgcatctgcgctctatttgtaccgcattctcggaggaggagcaggaggcgaggagccgccgagtagaggagagggggaggcgaagtcggtgctctcgccgggggttgacggtggaactccgggcgagcgatcgagccggcgaaatggacgaggaagaggaggaggagatgtccgagagggaggtcgactcccaggttcatatggcttgtgtaatgcaaggacgcagagttggaatagcatactatgattcaagtatgcaccagctttttgtattggaaatctgggaagacataactgaagattttcctttgattgatcttgtgaaatatcaatccaaaccgagcacaatatacacaagtactaaaacagatgaggcacttttgttggcgttacaacgaaatgattgtaatgatgaggcccctgctgtgaagctcatgaaaagctcaaccttcagctatgagcaagcctggcacagattaatgtacttgaaagtcgcagctatggacgaagggttaagtgtaaaagaaaggatctgttttcttaattccatgatggatcttggaagtgacgttcaagttcgtgctgctggaggtcttcttgctatattagacaacgagaggcttcttgatacccttgatcagatggaaggtggagcatccattgctattgattctgtggcacagatatcattggacaagttcctgaaacttgatgcaacagctcacgaggcgctacagatttttcaagtagataaacaccccagttacatgggaattggaagggctaaagaagggttctcagtttttggtatgctcaataagtgcgtcactcctatgggaaaacatctcttgaggacatggtttttacgtcctataatcgatattgatgtcataaataatcgcctcaatacaatatcattctttctttgctgtgaagatgtaatgtctgcactgcgtgggactttgaagtctgtcagagatattccccacatgctcaagaaattcaactctccaagttcattctgtacaagcagtgactggcatgcatttctgaagtgcatttgctctcttctgcatataaacaagatttttgaagtaggaatatcagagcatttggcaatcaaattacaacatatgaacattgacttggttggaaaggccaattcttccattacagaagagctggattatgtatcagatctggtagttggtgtgattgatgtgcaacggggtaaagaaaaaggctacgacacactggtgaaagacggattatgtgaggagttagacgaactgaggatggtctatgaagaattgcctgattttttggagcaggtgtcagccaatgaaattgcctccttccctttctcatttgaatgcagaaaagctcctctaatcgtctatgtacaccaaataggatatttaatgtgttttttcgatgagaagataagtgatgccttgttgataggacttccagattttgaatttgcgttttctgaggaaggagaggagagaaggttctactatcatactcaaaagacgagagaacttgacaatcttctgggcgatatttaccataaaattcttgacatggagagagcaattataagggatttagtgtgtcgtgtttgccagtttatacctcaactgacgaaagcagtaaactttgcagcagaacttgattgcatattatcgttggcaattgttgctcgccaaaacaattatgtgaggcccatcttaactgaggattccatacttgagatacagaatggcagacatgctttgcaggaaatgactgttgataccttcgttccaaatgacactaaaatccgcagttcaggacgaatcaacataataactggacctaactactcagggaaaagcatttacatcaagcaggtggctttggtggtttttcttgctcatattggaagctttgttcctgctgattctgccattgttggattgacagataggattttctgtgcaatgggcagcaaatccatgacaagtgaacagtcaacttttatgattgatttacatcaagttggaacaatgctcaggcacgcaacatcgagatccctatgcttattggatgaattcggaaaaggcactctaacagaagatggtattggtctgcttggaggaactatcagccattttacagactacgattgtcctccaaaggtccttttgtcaacacatctgacacagattttcacagaaagctacctgccgcagtctgaacatatcaaatgttataccatgagtgttctgaatcctgatgaacaaacagacaacgaagatgtcatattcctttatcgacttgtacctgggcaagcgctcttgagctttggactacactgtgcacagcttgctggtgttccgagtgaagttgttcagagagctgttactgttttgggggacatccactcaaagagacctataaggcgcatggtctgggagaagttagcagcaaaggaccaacaataccaggatgcagtgactaaactgttggccttcgacccacacaaaggtgatctggtcaacttcttccaggaagtttttccgtcctagctgtagaccaggctgcatggaacctacaaaacaaatgatgtaaaagagttgcttaaaacatggaattggcagatcatacgcgacctgctccaggaacctacaaaacaaatgctgaacctcacttgatcagtggcgttgggacattgtgtacatatttgcttggcaatgagaaatcaaattttgcgtcttttctgtttggatgagacttgtcatcgccattaaacgaatattctgtagtttcgt

SEQ ID NO: 25686 - DNA, 2006 bp, Oryza sativa
  ref <308>: DATABASE ACCESSION NUMBER: AK101128
  ref <309>: DATABASE ENTRY DATE: 2002-08-28
ggtgattgattcgattgattgccgcatccacagttcttttcctttttgtgagtttctttttcttcacctccacttcttccagtacggaaaagagtgagagcactgcaagcaaaaaagaagagaggaggagatttgttagcgcctaattttagcagcagcaaagctcggattcccctcccatggcggatggcggggcgacaggaataggcggaggatagggagagattgtcggaggagaagtagggagaggttggtttacatgcgagcaggaggaagaagaaggaggtggcggggcaccggccgggcgatgtagaggaggccgcggcggcggcggcggcggcggtggtggcggtggtggtggagcagagacggcgaaggcttcatcttcatcttcttcttcttcttcgtcctcgcggtgagatttactttcacattccgaagtttgctacacttcccaggagtagagaatatccgagacacctctcatctatgcttatcagagtctcatctatttcctgtctttgtcatagacagatattctcatggctagaacctctccttttccacctctaactagacggaaaatcgcttccctcaagttgctgataccatgtgttctagttctttcagtggctgttattgttgttacgcagtatttccataatatctcttaccttctgcggccactgtgggacacaccacctaagccatttatccgcatcccacactactatgcccccaacatctccatgccgcagctctgtcagctccatggttggggtatcctccccacccctcgccgtgtctttgacgccgtcctcttcagtaatgaacttgatattctagaaattcgctacggtgagctccttccgtatgttgacaggtttgtcatccttgaagctaatgccacattcactggcatcccgaagtcactctctttcttggaaaatatcaatcgctttgcattcgctggctccaagattgtgtatgacatgcttcctgtcatggaaatggatcccggttctcaccgtcagcccttccatgttgaggccggccaccgtcgtgcgcttaatatgctgctgcgaagatcaggcattgctgtgggggatgtattgatcatggctgatgctgatgagatccctagccctgagacggtgcagttgctcaagtggtgtgatggaataccgcaagtcatgcatctcgagctgaagaactatatgtactcctttgaatttcctatagactacaacagctggagggccacagcacatgtgttcactgagcatacattgtaccgccactcccgtcagagcaaccttctgctggctgatgcaggctggcattgtagcttctgcttcaaggacatcaaggagtttgctttcaagatgaaggcatatagccacgcagaccgggtgaagcaggacagcttcctaaatccagacagaatccagagggtcatatgtaatggggaggacctgtttgacatgctgcctgaagagtacacattcaaggatctcttcaagaagatgggacccataccaaagtcaggatctgctgttcatctgccttcctatttgatcaagaacgcagacaagttcagattcttgctccctggtggatgcttgagaccaggctaaatcagagatggtctttaactttgctagccaacagtacaacttttagacgtgatactgttgcttctgctgaaacagacgaattttgttgatgacacaatacttttagatagcgtggtaggattttgatgttgtaggcagtaagtgagttttcaccttgtatttgtagtgatgagcaactcaacactagaatttacaggaagaaatattaaaggtagaatggctgaatggcaacaagaaattgcctcattcttggttcactgtggccattttcgcaaacagttggggattgtttgttggctattgagaaatgcaaaatgtcctcgatgaactgtgccatctgttgcactgttcatatgagcgttaattggt

SEQ ID NO: 25687 - DNA, 1262 bp, Oryza sativa
  ref <308>: DATABASE ACCESSION NUMBER: AK101129
  ref <309>: DATABASE ENTRY DATE: 2002-08-28
gagtggtggcgctcgcatttttttttcagctccgcggaaggaacgaaacccaacccaagcgaggcaaaagcggcggcggcggaggaggagaggagcaatggaaaggggggggcgggtgaggaagccgcacacctcgacgggggacctgctcacgtggtcggcgagggggcccgacgccgccgccgccgcggcctcgccggtcgcctcctcccgccccagcctcaagccggccggggggatcacgccggcgatgttcggcgcgccggtgagcgagaaggaggcggaggatctgagcaagagtgaacgaaaattttgctcgggctcaaagttaaaagaaatgactggaagtgggatattcgctgagaatagtgaaaatgatgattcagaggcttcaaatcctgcaaacaaaacttctgtaaggatgtatcagcaaactgtaactggaataagccaaatctcattcagtgctgatggaagtgtttctccaaagaagccatcgtcattacctgaggtggctaagcagcgagagcttagtggtacactggagactgatgctgaggctaaaatgaataagcagcattctgaagccaagagcaaggagctcagtgggagtgatatttttggtcctcctccagagatccctgcaaggccattggctgctcgcaatatggagctgcaaggaaatctagattttgcacttccacaaccgagaagcgtccacacatcagtgaaagtatccaatcctgctggaggtccaagcaacatcacgttcagtgaggagcctgtagtcaagacgtcaaagaaaatccataaccagaagttccaagagttgacaggcaacaacatcttcaaagaggacgctacccctgcatcagctgagaaatctctgagctcagcaaagctgaaggagatgagcggcagtgacatctttgctgatggagcggcagctccccgagactatctcggcggtgtccgcaagccccctggtggcgagagcagcattgcactgatctaatcgccgcaggctgccctaatctggactggctacttttaccctcatcgctgaagtccgtggcatgtgctcttcctggaccctggttcttgatcatggttgagagctgatatcttggccctgatatcatctagagtcagcagaatctgactcagcttatgtgttgtaaacttgacttaatctcatctgtcttatggtacttatgtattaatctccttggactgagactgaaataagttttattggttcg

SEQ ID NO: 25688 - DNA, 2217 bp, Oryza sativa
  ref <308>: DATABASE ACCESSION NUMBER: AK101130
  ref <309>: DATABASE ENTRY DATE: 2002-08-28
ggaatcggcgccgcctccgcatccattcgacggcgagctctcgccggcggaggtgtggcctctgaacggcggatgggggaggctcgccgcggcggcgcggagagagcgagggaggcttcgcggccttgccgctctggtggtactagcttgttattgagcgagtggtgagtaggtggtggtggtggggatgaaggcgctgcggcgatccagcacctcgtcgtcgtcgtcggcgtcgtcttcgcccagggcgccgtcctcgccgccgccgtgggtccagctccggtccctcctcgtcgcctcctcctcgtcctcctcctcgtcgtcgtccttggcggcgtcggggaattcggcatcccccgccgcggcggcggcggcggcctccgcctcgttctcgccggcgtcgtactcgccgcactctgatagaggtggaactaaatctccgtggtctcgaaggaaaagaaaacggccactttcttgtcggcattggaaccatctattttcgtcagatgggaagcttcgtgatggaggaaggaagtttctaaagaaagtccgcggtggaggagttgaaccagaaatcagggctaaagtttggccctttctacttggagtatatgatttgaatagtactgaagcagaaaggaatgtcatacaaacaaataaaaggaatgattatgaaaagctgaggcgtaagtgtcatcacgttttgcattcctacaagggaagtgggctgaatgttataaatgaagcagccgcctgtgagtatcatagttgcaatgaagaatcagagccgcttaatttggaaagtgtcaatacgaggtcttctccgtcacccaagggattgaaatctttaagatgtgggataagccgacaagagaatgccactgaaggcatagatgaagatacaagtgagttaacttatgtagatccatatttggcagaatcggaatcttctgattctgggacttctgatgaagaggaccttgataggatgtccgtctctgccaatacggaagtgaaccgtgatcaaggtcctaaatttgtcaggagtgcctcatccaagtcaggcttttttaggaataacaaaactccagaggatttcgcgacatggcaacgcattatacgcttggatgctatccggacagaccctgaatgggctttattatcacataaccgagctgaagtgtccaaggagaaagcactgcagtacgcaagatctgttggattgaaagattatgaccatttagagccttacatgatttatcatgctgctcggttagttgcagtgcttgaggcatatgcgctgtttgatccagagattggctactgccaaggtatgagtgacctcttgtcacctataattgtcgtgatggaggaagatcatgaagcattttggtgttttgtgggcttcatgaggaaagcgaggcacaacttcaggctcgatgaggttggaataagaaggcagctgaagatcgtctcccagatcatcaagcgcaaggactcgcacctctaccgacaccttcagaaactgcaggctgaggactgcttctttgtatacagaatggtggtggttctcttcagaagggagctcacttttgagcagaccctgtgtctgtgggaggtgatgtgggctgatcaagcagccattcgagctgggattggaagatccacatggtcaaagataaggctgcatgcccatccaactgatgatttgttgctctatgccattgctgcctgtgtcctacagaagaggaagctcataattgagaggtatagcagcatggatgagatactcagggagtgcaacagcatggctgggcagctcgacgtctggaggcttctagatgatgcacatgacttggtggttaacctccatgacaaaatctgatgcatctgcattctttggcagatcgattgttagaatttagagttacaaaataccgtgcaaacctcggcgaattcctgaggtgtgctttcaccgaaaggtgatctttttttttacctgttgttttgtcaacccggcataaagaactcgttccgggcataggagaatgcggtacttagcaaagctgatttgctatatacctcaccaaggcactggcaatgtaaaccgtacattgtttgccgggaaaattttgtttttgcctttaatgtgtattattggcaaaaacaacattatccctttaaatcttttataggaaaacaagtttcttttacctg

SEQ ID NO: 25689 - DNA, 2093 bp, Oryza sativa
  ref <308>: DATABASE ACCESSION NUMBER: AK101131
  ref <309>: DATABASE ENTRY DATE: 2002-08-28
gtgtatagctatggcagcttaggccgtacctctctaggaatatagatatactccctccatcccataatataagggattctagggtctgtccagattcgttgtactaggatgtgtcacatccacccaaattctcttatattatgggatggagggagtaggtagatatgtgaatgagctcaaattagttatttgttatttttgaaagcttttaaatttgcatggaatcaaactgtgaagcaaataagataaaaacaatgctttagcaatgaagcaatcgtcaaatgtagtatagataaaatatgtacctggaattaaaaacataccccacacagtgtcgggtgtattgtaaaacttacaaaatttttagaacttattctcaatgagtaaaaattctccaagcctgtgcttgtctagattaaaatacaaaaccttctttatttatttcctctccgcggccttggcccaaatatatttcctgaaaccaaactctactagtcagtgattgtcttcgatctcttgcctggataccatgcatagaatgaactctcatctttccctttttgtctgttaagtgattattattattattattattattattattattattattattattattattattattattattattattattattattattattatcaactttccttatttgagatttaaaacaacaaaactaggacttctgaagaaagaaatagaagataaaaagttgaacttcctaattgtgatattcttagtaaagaaagtgaaacctgttgaaacgcattttttttatataatctcagtatcaaactgaataatgtattagaatttcacatgcaaaaatcaaaactgaaatcaacagaaaaattaattgtttcatggttttaagtatttatttaaggactggactgaaacccaacgaaatggaagctttgcagaattggagcatgaaaatataaaaggaaaagaaatgctggtataacttgatcatcaaggaatgagtgatgaaccttatcgaagcaaacaacttaattagttaattccagaacttcatgatgaaaaaagtgaaactgttattttccatccatgattaaaatttgtatgatgttgggttatatcttttctgatttcactcacacatcacgcattgacaatatcgttgtattcttcactgataatttaccatataaaatctttgtacatgtacagatagagtaaattatcttttttttgcatgataattatggtgattaattgtgtacaaaataatatatttcaactcattctggtgttaaattatacataaattaatatatttataattacttttaactataggcaaggttgtaaatttttggagcatggggcatgtgacctgtgagggcatgtgcctactcttttcgtgttttagttttattcactatgctccatgctctgctgttttttctttaaagttctttctaatccatttataatttgtcacatatactggataaattgcttgcgcatctaattcttttatcttctgtttttttagatagcatagaccagagtgccatggcacttctagcacggtgtgactaagtagttccagatcttgatggtacaacttggcttctttttgcttgggacaaagatcatgccaccgtagctgcattcacactgtgttgcccccttcatcacctactagcaagtggctcttcttgaagacttcatagtgatggcgatgttcgtccctagcatattcgcctgccttgttgcgctatcggctcaaagctagccaccagagagttgtcagcgatcgctccatgagtgaggaggagattactggccctaatgttcatcgccaccgtcattttgtttgtgtcggtggtactcgtagggttcttctactactatcttattgagttgagggtgtttgtcttcgattgtctatttatggcgaccagacttacagtgtacatcgcgtatgcgttatttagagcttgatgtgtcttggtctactaggacatgttcagtactgtactcttttcagactagaggttctacatttggagagatgcagaaaatgctagcagccatgtttggtg

SEQ ID NO: 25690 - DNA, 1840 bp, Oryza sativa
  ref <308>: DATABASE ACCESSION NUMBER: AK101132
  ref <309>: DATABASE ENTRY DATE: 2002-08-28
gcccgaccccgcatttcaaatttcctcctccgcctcctcctcctcgtctccggccaccgttaaatacctcgccgccgaccaccaccaccgcggcggccctgaccccaccctgcgagccctagccatggacggcgacgacgaggatatgcgcgacgtctcgtccacgtcgtcctcctcctgcggcggaggggagggcgcggggttcgaggaggggatgggggaggggatgatggtgatggaggtgaggtggttcgaggtggacctggagtacgagttcgacgcgcccaggtggttcgacctcgccgtggaggagtcgccggtggaggcggcggcggcgcagctgtggttcgcctccgcgcccagctacccgccctctcccttaattgccaagatgttggctgaagatcttgggttgcaaagtttaagaagcactgtggatatagatgcagcacattgctctaaatcctctcatgaatgttccaatggtgctgaacaaacgatccatcggccacatataccaaatgaaggaaggataccttgccatcaagtttcagcgaacgagcgaaaacatggcgttcgaactattggaaaaggaactatcccaaagaggtctacactgatgaagcctacagccagtcaattagccaggcaaaacagacaaattgaagtgaagaactccacacagagtaaaaagtcggttggggtgagaagtgatagaagtaccatgagctccaatgactgcacctaccaagctgctaaaaggcagagactagaaagagggcatctcaacaaggttgtttcaactaatcaacctgagttgatccataagaatcatgcaaagaatgttatgactagtagctctgatcatgccattgctgtaccaaaattgaagattacaattcccagagaacctgaattggcaacaaagctaagagcagagaggtcaaggatactcagagcagtgccaactaattcaaagcagctaaacaaacaggcggcacaatccatttctatgacacaagcgtcatcgattagaaaggttgtgcaaccttctgggcgcaatgatcatcagcatgcaagtgttccacatcgcggtattgggtcaaatgtgccagtgtgtactgctaatcgtccaaggcatcttgacaacatttgcaaaacgccggatgagtgcagagatgacctgtttaaatttaaagctcgaccagtggataaaaagatactaggaagcaaaggagatattggtgtatttcaaaatgccaaaaggagcacaacagttcctaaggaatttaagttgtcaactggtaggaagggtaagcaggctccattatctgaactcttcaacaagctcactttaactactgaagcacgccgtgctttagatcaccggactgctgatcttccaaattatattaccaccaaggactgcaaagagaacatgattggtaacatgcaaagctagctatggtagatccagtcagtcaagacatacaaaacataggaattcttctctttgacaattcctggttcagattccttttctccacctgaacaaaggctaagcgtctgttttggacagtaggatctcgacttcatttgagttttgacaaagatggagcgatacattattttgacttgaaggcaccgaccaaggcaccgtcccggccatccccggcaacctcccgtctccgctgccgtgcagctgaacataattccgtacctgctcgcggccatggcggagatcgatttgtacagagaaactaaccatgacgccggtgtgtactccagatctgtaacttgttgccaatcatcatccagcaaagttgcttgcttgcttccc

SEQ ID NO: 25691 - DNA, 1874 bp, Oryza sativa
  ref <308>: DATABASE ACCESSION NUMBER: AK101133
  ref <309>: DATABASE ENTRY DATE: 2002-08-28
ggctcctctcgccgttttggtcggggttttagcgagcgcgtgggaggccggaggcgacgacgacgaccgcgccgccgtcggagaagaaggccgcggaagcaccagtaccagcacccgtatatgtcttctagccccttctccgatctggtggtagtcgtgctcctcgtctgcgccgtcgtcgccgcagccgtcctcctccccctcgtctgcgcccgccgatctatgcaccagaggctccacggctggaacaagtccacgtcgatgctcagggacgggttcggggtcaagtattccgggttcctccacataaggccgtgtggtttctgtcgaggagattgacggattcgatcgattcgtgttcgtctccgtcaaatttttgcacaagagaaaaaaaaagtttcccccttttagagtttttccccttcagttttgtcagttttggtgaggaattttagagttcttttccggcaagagttagaagaagagagaaatggccccttccaagcagcagcagatgctcctcaagaaggtgatggcgaagaagcccaagacgaagaggctatccgggtttggccttaaaccctctgctgctttctccaggccccatgtgccgtcggcggcggcctccctgcagccaagccgtcgcgtccgcgtcgtgttcgaggaccctgacgcgacggactccgactctgacgacgacgaggacgccggcgccgcctcaaagaagcgctactttgagctcttcattggcaagccagcttcgtcgacgaagcaggcctctccggcgtccaccgtcgctgcctacgccaacatcggcaaggttgggagcacctgctaccgtggtgtgcgcctccggaagtggggcaagtgggcggcggagatccgcaaccccttcaccggccatagggagtggcttggcacctttgacactgctgatgcggcctccgccgcctaccagtctgcctcccgcaacttcgccgaagagaagcgccgccgtggtgtggcctcctctgcctcacctgctagttcggcgacccctactccgactgcgtcctcgtcgtcctcgacttctgccgcgccattcgcccacccttcgccgtcgtctgtgctcgaagccaccaagccagctccaaagccagagtcgccgccgctgccggagcaagctgcaactcccctcctggtggaggctgccaacgagaccgccgagctgccggatgacccagagttctacaaggatatactgcgcggtctacagctgccggacattgacccgatggatttccgagctgggctggatgctctggatatctccgatgtgccggcttacatgaatggcgaacaagacgtactcttcactgaggacatgctgcttggagacttcgctgaagaagatgacctcgacctcgacgacatcggtgatgacttctgcgaggatttcccagagatacccagcggctacgacttcggccgtggtgatatgttccggcaggtggatttctgcgtgtgaattaagagcttgctaaagttattcatgttggtgtgatgggcctgtgagtgtgggtgcttgggaggagatttcttgggttttttccccgagcaaaatcaatctgctcgtgcccttgagatttcagttccgcccataagaactccaacgcacatttagcattcggagagtaattttgttaggttaaaagtatggtaagttataggtggtatgttatgtttttctttttcttttctcaatgttatctggtacctaagtttgtcaagaaaatcatagtggacaagtcaagtatttggggctgtcgtctctgttatggaaagaaaaataagttttgattacattacatatcttttgctctcgagatctggcc

SEQ ID NO: 25692 - DNA, 1570 bp, Oryza sativa
  ref <308>: DATABASE ACCESSION NUMBER: AK101134
  ref <309>: DATABASE ENTRY DATE: 2002-08-28
gttttcctcctcctcccccaaaacccactcctcctccccatcgccgccgccgccgacgagggagatggcgacgctcctccggcgatccgtcggccccgcgcgccagctcctcctccgcccgcgcccgctcccgctcccccacgccgcctcctccacccgctccttctcccgctactactcccgcgacgacgtctcgaggtacgaggcgctgagcacgccggtgaactggggggtgagcatcgtgccggagaagaaggcgttcgtggtggagcggttcggcaagtacgtcaagacgctcggctccgggatccacgtgctcgtccccctcgtcgaccgcatcgcctacgtccactcgctcaaggaggaggccatccccatccccgaccagtccgccatcaccaaggacaacgtctccatccagatcgacggcgtcctctacgtcaagattgttgatccctaccttgcttcctatggtgtggagaatccaatttttgcagtcatacagcttgcccaaacaactatgagaagtgagcttggaaagattacgctagacaagacttttgaggagagggatacactaaatgagcaaattgtgaggtccattaatgaggctgcaactgattggggactgaaatgcctccgttatgagatcagggatatatctccgccacgtggtgttaaggtggctatggagatgcaagcagaagcagaaaggaaaaagcgtgcccaaatccttgaatcagaaggtgctatgttggatcaggcaaatcgcgcagggtgaggctgaagcaattcttgcaaagtctgaagcaactgctcgaggaatcagattggtctctgaggccatgaggaccaagggcagcactgaggctgcgaacctgagagttgctgaacaatacatgaaggcatttgctaatctggccaaaaagagcaacacgattctccttccaagtgacgctggcaacccatcatccctcatcgcccagtctctccagatatacaagcacatctgccagaccaacagcttgaagagtgggaagtacctcacagatgctctagaggagacggaaccggaggaagaagagttggactctactgacctaccttctctgagcagcgggatgccgtcccccgacgtgccagatgaccatgacaagactttctccctgcagcgccgcaacaaggacaagcactgagtgagtccccctgttcgagtacctgaaggagaggagaccctttttttggcccactgtttttctacgagcatggaactgtaattgaaagcacactagcttagtagcggtagaggtttttgagtttcgacactgttgatctgggaaacgttttgaggatggtaggaaattaacaagacattggcttctggtagccgattgggagtaagtttagcgaccagaaagatttttgtccctgctaaggatggtttgggatagctctgattttcgttcttaatctgtttcagcagcaagtctgtttctgtaaatgcatggattatcagtcgttcatgaaacaagttcaccatgacggcaatggctcatggccgctttgattc

SEQ ID NO: 25693 - DNA, 2551 bp, Oryza sativa
  ref <308>: DATABASE ACCESSION NUMBER: AK101135
  ref <309>: DATABASE ENTRY DATE: 2002-08-28
gattctcaccttctccgatctctcatccttcccatggtggggacgacggaggtggagggcatcgaggcgctcgtccgccgcctcaggctgtaccagccgcctccctccccgtacgacggcgcctcgaccacggcggccggcggcggcggcgagctgttccggccgcggagggccgccgtgctggtctgcctcttccgccgccgcggaggcgacggcgagctccgcgtcatcctcaccaagcgatcctcctccctctccacccactccggtgagctcgcttccttccttccttcctcctccctcgcatcgccttcgcgtggtgtggtgtggtgtgggggggtccgttgggcgatcgggcgcgagtgcgatcgatcggattcttgcgggtaagctcggagatttgtcggcagcggggctcgccattgcggtccatgcgagcggtaggttggggaatgtggggggaggggggcgggcattccctaggcgctttcttctttccatcggtccccaagggggattggccgttagttcttggcatttttgctaaggtcaatgaagcaaatataattgtttctgagagcatagaggagcaagagttcgtgattttttggtggattttgttcaggtattttagtggcatagatgtaagtttcttctgtttctagtgtcctctacggtgcctatagtagtttatataaaaaatattagagtaaatttcacaaaaatacaggtattttgaccaaattatcacaaaactacaactatagatttaatgtgttgtatcacaaaactacaactacagatttagcatcaaatttatcacaaaactacagttttaaggttaagtatcacaaaaatgcatatttaatattgaagtaatcacaaaactacaacttggagtttagatccctagcaccattgttatattggagctataaacattattgctttctgactaaattggttctaaacttgtagtcttgtggtaatttagttaataaacatgtagttttgtgacacttcatcataaatgtgtagttttgtgatacaccgagttaaatctgtagttttgtgataattttatcatagtattatgtcagattgaaacattttttctttttgggggtgagggggggggggtgttaatatatagttcacaaatatgatagggagtcactttctagtttctaccatgtgggtgattcattcatgaagttagtttacaaatgatatagttgtttctctcttgtcttgtccacttcaacattattagccaactggcttttgtggaatgttttgaacaaacaatttgtacagatgattggacttatactaggaacatcatagcatttcttacttcggtgtctacttgagaaaaacaagtagggtgcatcagaatttacaaattttaagcgacttggcctcacctcaggaattgtttgagcaacttgagatttggttctgaagtgaaatgaaacaagctgactttctgaaatacttttgaaaccaagcctgctcatatattttcttgttatagattttgagtttggggacttgagctcacaaatggtctcaagataggtttggcttacacaagagttataaattgagcttctggctctactagagagctgacttggtttgagtcagcatattcaggtgagctgatccaaatgtagtctgccctggctcattttatctaaacttgcttcaactacaccccaaagtgttgatggatgctcatagatgcccaatgctgcttctatgctttttcttaactaagtttcttgcctaaatttgagattgtcaggcgaggttgcattgccaggagggaaggctgaggaaggtgatgctgatgatgcagcaacagcactgagagaggcaaaggaggagattgggcttgatccttctttggtcactgttgttgcctctttagagcatttcttgtcaaagcatcttctggtggttgttcctattgttggcatcctctcagatatagaagcatttaagcctgttcttaatgtcgatgaggtagatgacatttttgatgtaccgctggagatgttcctcaaggatgaaaataggacatctgaggagcgcgaaaagatggggcagacattcacaattcattacttcaattatgagaaagagaaccaaaagtacttaatctggggcctgactgcacgcatcttaattcatgctgcttcagttgtataccagcgcccaccagactttcccgagcgaagagtacatttcaacctgccaaagttctgaaggggtcgttggcagtgccatggatcagcatatactaaatactgttaacttactatggagactcaattataccgattgaagagcatggcggaaaaaaaatcccaaaaaaggttgctggagaatatatattttctattctttgcaccattctttacataacacgctgatgttaacatttgttgatgctgagttatctgagtaacctccatttgctccctgttgatgtcaccaaacagttgcactaatacagttgggttttatatgtgaagtataaacc

SEQ ID NO: 25694 - DNA, 2750 bp, Oryza sativa
  ref <308>: DATABASE ACCESSION NUMBER: AK101136
  ref <309>: DATABASE ENTRY DATE: 2002-08-28
gctcctccattccctcccttcctcgcccccaaaaaccctagccgccgccgccgccatgcctgatctcccctgcgacggcgatggcgtctgcatggtctgccgcgtcgcctcccctcccgaggtcgatctcctccgttgctccacctgcgccaccccgtggcactccccctgcctctccgagccccccgcccttgccgacgccgcccaatggagttgccccgactgctccggggactccaccgacgccccgcccccggccccggcaccgctcgcccctgggagtgccggccaactcgtcgccgccatccgcgccatcgagtgcgacgccaccctctccgaccaggaaaaggcacgccgccgccaggagcttctcggcggcgccgcgcccgccggtgccgacgccgatgatgacgagggggacgacgtcctcgaggtcatcggcaagaacttcagctgcgccttctgcatgaagctgcccgaacgccccgtcaccacaccatgtggccataacttttgcttgaagtgcttccagaaatggatccacagcggaaaaaggacatgtggtaaatgccgggcacaaataccagcaaaaatggcagagcagccaagagtcaactcagcattagtttctgttatccgtatggctaaggtttcaaagaatgccaactcagctgtctctgcagctgcgtatcattacatacgaaatgatgatagacctgacaaggcttttacaactgaaagggctaagagggctggaaaagctaatgcttcaagtggccagatctttgttactatcccacccgaccattttggccccattcttgcagagaatgaccccaagagaagcattggtgttctagttggggatacatgggaagacagacttgagtgcaggcaatggggtgcccattttcctcacgtggctggtattgctggccaatccacacatggtgctcagtcggtagccctctcgggtgggtatgtcgatgatgaggaccatggggaatggtttctatatactggaagtggtggaagagatctaagtgggaacaagcgtacaaacaaggagcagtcctcagaccagaaatttgagaagctgaatgctgctcttcgtattagttgcctcaagggttaccctgtcagggttgtgcggtcccacaaagagaagcgttcttcatatgctcctgaagctggtgtgaggtatgatggagtttacaggattgaaaaatgttggaggaagattagtgttcagggtaaattcaaggtttgcaggtatctctttgtacgttgtgacaatgaaccagctccttggactagtgatatttatggtgaccgtccgaggccactccccaaagttgatgagctgaaaggtgcaacagacatatcagagaggaaaggaactccttcatgggactttgatgagaaagaaggctggaagtgggtgaagcctccaccaatcagcagaaagcctaacctatcaggggatcctgcaactgacaaggaaatccggagggttgcaaggcgtgcccagatgtctgtgactgaaaggctgctgaaagagtttggatgttccatttgcaagcaagtgatgaaggaaccactcactactccatgtgctcataacttctgcaagttgtgtttggttgggacatatggtagtcaatcgtctatgagggagagaagccggggtgggcggactctaagggcacagaagattgtgaagaagtgcccttcatgtccaactgatatttgtgacttcctagagaatccacagatcaatcgagagatgatggatttgattgagtccttgcaaagaaaggctgttgaagaaggagataccaagacaagctcagatgttagcaatggtgctgagtcatctggagatgatggaaacaacgaagctttagagaagggagaggatgatagcagcttgaaggatgatggcagcttgaaggatgatggcaaagtggtcaaggccgtggttgtaatcaaggaagaggacctgcagcctaagaagagcaaaggagaagatgagaaagaacaaggtgacaagaagatggacagtgctgatgtggtggacattgcagttgaaaagaaacaggcgacgaagcgggcttctgagaaggctgagaagaagcaggcaaggaagcgcaagggggatgctgttgccacaaatgatggtaaaaggatgaaaacaggtggtgatgctatggagacagcagcggaagaggatgctcccctgagcggcggaactcctgtgaagcgcaacagcaggaagagtagtgaggttgatgccaaaggcggtggcggtagtcctgttgtgagcagccctcgcagggtgacgaggagcaatgccaaggctagcggtgaagctgatggtagccctgcgacaaggaccaggagggctacccgcgctgaagcctgaatgaagatggatgaatggctggttggctggctgtagaggggaagaagacggagactggagccattttggggtcgtattcgtatattctatctatttagtaatttaggccgtttgccttgtgctgttgctctagctcttttgatccacaaggggtgaactggaactgccgcggtgtgcttttgggatggcttgggttgggttgttagttgaaggaatatatacttatatacagtggttgctttacctttacctgtatggatgtatgatggatgttcctcatacaactttccaattccaattactggcatggtttgccttggattct

SEQ ID NO: 25695 - DNA, 2269 bp, Oryza sativa
  ref <308>: DATABASE ACCESSION NUMBER: AK101137
  ref <309>: DATABASE ENTRY DATE: 2002-08-28
ggtcctcaccaacttccttcatcatccccttcccatcgccgcggttctccacgctccactgcggtggactgcgccgcatgtagcgccggggagctccacagtccaccccggcccgcgcccgcgccctctcgagttcccacacgagctccgccgccgacggctctcgaggcaggcaggcaggcagcgccgccgatctcggttgccgccgtgtggagcgccccccgggattttcattctcagcagtacaagaggcggccggattcgccgccgtttgaggtaatctcgcgcgccggcgacgtccggatcgcctttcctggctggcgtctggagtatgtagactgcaagggggaatcggaagcggccgggcggagccatggagacccgtgccaccgagtgcaggacgatgcagctcctccgtgagcttcaaacaaacaaattggacacatcttcaaagataatttacgctccacggcagcaagatgatatttatgcgggcataatgccagaactcccgctcgataaacttccggaggatatcttgcatcatgtatattctctaatgccattgaaagatgccgctcgtgctgcttgtgtgtcgcatggatttctacgttgctggagacgctatccaatccttgtattaaatagcaaaacaataggtttggctaagagaaaacttagtttgtatgcggaagatgtgccattgtatgagccagcgcttaaagtggatgacatggaaagctatgccatcagtaaaattgaccatattattaataaccactctggcattggggtcaaagtgtttaaacttcaactgtttgcctgtccgaacatagatgcagctgttcttggcaaatggtttgtacatgttatcaaagctgggatcaaagaactctccttggagatgtctttatgcaaaaaaaggacagaatacaacttcccatgttccattctatcaagtaaggcaggtggagggacaattcagtcacttttcctctcctcttgttcttttcatcctacagtggctctaggttgcaacataagcttgacaagcttacatttatatgaagttcatatttctggggaggagatagggcagttcctttccaattcattcgctttggagagattggtaatttctgattgcaatgacataatccagtttaaggtaccttgcctgatgcagcagctcaagtacctccaggtgacaaaatgtgaaatgctagaggtgatatcgatagatgctcccaaactctcctcttttatctatggggatgtcggaatacaaatctctcttggagatccactgcaagtcaaagacatacgtctgatgggttacaaccaacccaacacagtctgttttgctcgtactgagcttccatccattatgccaaatgttgaatcacttattgtgtcatctactgatgagatgatcagtacaccaatggtgcccatcaagttcctccacctcaagttattggaaatttatcttgctgaattactggcttttcctcccaactatgatttcttttctctggtttctttcttggatggttcccctgccttggagactttcatcttgcatgtaaagcagcgatgtgaaaggcgtgattcgattcttgatggagaacatacaaatttgaggcaaattctgcaccccagacatgccaacctccagaatgtgacaatcactggctttaactctacaaagagcatgattgagctaacaagtcacattcttgagaatgcaccatcgcttaagtgcattacgctggatacagccaacttctatgataagaaccttttgacgatgggtgaatgcttgcctatgaggaaaggaggaatcttggaagcacggaaagcttttgatgcagccaaaagatacatcgcggggaaagtaccggcgcatgttgagtataagtttctggaaccctgcaggaaatgtcatattgggtattgaaacaaaacggtagatctcaagataccgtctttttgggaaggagaaactgtgagataaaattggttgtgtagcagtatatcgccgaaatttagtgatttcgctactttctgtgaaaaggatgtgtttaagtgccaagacaagtaatttaactttatatagtttgtaattataaatgtataatataacataaatttgtggccagagttgtatggagtataaatgtataatataacagaaacccgcacttgtttcagttgtttggttcatccgttcatgtataagtttaccatgtcattgctaaacgctccg

SEQ ID NO: 25696 - DNA, 2403 bp, Oryza sativa
  ref <308>: DATABASE ACCESSION NUMBER: AK101138
  ref <309>: DATABASE ENTRY DATE: 2002-08-28
gtcactcgagtgctcgccgccgccgccgccgccgccgtcgccggcgatgcacctcggcgtctccctcgtcccacccctcccgctccacttcccccgccgcgcgccctatggattccgctccgctgctccccgccggatagccgtttgccccctcctctccgtcggtcggcgccgccggttgggggccccaccgcgcgcggcgcggggaggtggggaggggcccgaggaggagatgcggaggctgctggagttgctccccggggagctgaggcggcgggtggaggggcacccggagctcccggcgctggtggaggtggtcatggacctcggccgcccgccgctcgcccgcttcccctccggcgacttcctcctctcgcagagccccatctccttcgacgacctccgccacgccacctcccaggttggggatttcggagcggacaatcgagctggaattagccggacgctgcaccggatcagcgcgattcgcaaccggaagggcgccatcataggcctcacttgccgggttgggcgtgccgtgcctggaagtgctaatttgctgcaggatttggtgaaggatggtgggtcattgctgctcatcggtccaccgggtgtggggaagacgactgtcataagagaaatcgctcgaatgctagctgatgattataggaagagggtgatgattgttgacacatccaatgagataggtggagatggagatattcctcacccaggaataggcaatgcccgcaggttacaagtgcctaaccaagatatgcagcataaggtattgatagaagctgtggaaaaccacatgccccaggcaatagtcatcgatgaaattggaacgaagctagaggctatggctgctagcaccattgcacaacgggggttacaacttgttgccactgcccatggaataacaatagagaatctgatcatgaatccatcactagatatgcttgtaggaggtgtgcagagcgtcacccttggtgatgaagaagctaatcgaagaggggtccagaaaactgtcctagagcgcaagggtccatcgacttttacatgtgctgcggagattgtctccaaaattgaattgcgcgtccatcgtagtttggaagatactgtagatgctctgcttgcaggcaaaatgcctaatgttgaaattcgtaaagttggttcaaaggggccagtacaggaagtttatgtgcaaaaggaacggttggatcttggtccttctgaaggtgcaactcaattggacactgattctttgagcaatgcaagaagaagcttagactcggcatttaatcttgatcctgctgaagggcatatagggagatcaactgaagctgaaccagacctcaatctatatgcttatgggatctcggagtcgactgccttgcaagccattaaacagctggagctggaggacattgtaaccttgacttataacatcagtgaagctgatgcagtgattgcattgcaatcgaagctcaagaagaatacccagattcaggctgttgtgaagtctcaagatatacctgttttttttcaccaagacaaactccctggtgcaaatcagaagggcacttcgtgcccttgttgatgatcacacggatgggttgatggattttgaagatactgaagtgagatcttcggaggaaactgatgctttggaggaagctagattggcaatcgagcaagtagtgatcccaaaaggtgaaagcgtgcagctactgcccagaccaccaagcatcatcgcttcccaggtggatctagtcgaaagtttcaagctcaagtgggaatctataggccaggagccaaacgcatgcctcagaattcttccgcaattcgtaggcgtggaagaaggcggcaagtctgtcaagcaagaagctgcaactgagctcacagattcagacaattcagatgacatggactataaacagaacggtgtcagcaggctgcctttcctcccagagtagcactcactatcttaccctcctgctgttcctagctgtatgaatgtcaattctttttccagtttccacttccctgggttgctattgataacatggtaacaacatccatcagaaagtggctgtaatttacaaagttggatagatagtgcagcattacgcatacagaagtacagaatcggttccgactcagaagtcagaaataaaacctgacggccttcagatgactcacaggatcattttggcaacttttgtgagctgggggtgataaatactgtcattagttgttaggcacattccctcctgggattattatacagctcaagctgcgagtttgtaaatgcaattaaaatgtttgccgacacatgctactggcccaatcttatatcggtgtggaattaaacacatttggctgctgagtttcagtgtg

SEQ ID NO: 25697 - DNA, 2217 bp, Oryza sativa
  ref <308>: DATABASE ACCESSION NUMBER: AK101139
  ref <309>: DATABASE ENTRY DATE: 2002-08-28
tatcggcaaagtctggcacatctgctgataaggtttcagcattcacatgccttatcgaagacaatccaattgcaaacatgagggcactcgattctctccttggtatggttacatcaaaggttggtaaaaggtatgcgttcacagggtttgatgcattgaaggagttgttcctcaaaagggtattacctgatcgtaagttgaaaagtcttattcagcacccattagatattttaccagaaacaaaagatggctactcacttctcctcttctggtattgggaggactgcttgaaacagaggtacgagaagtttgttattgcattggaggacgcattaaaagatatgctgccaaatcttaaggacaaagcaatgaagacggtttttatccttttaaaggaaaaggcagaacaggaacgccggttacttacagctcttgttaacaaacttggagatcctgaaaggagagcagcctcaagtgcggcatatctgttaacaagtctcctatctgctcatccaaatatgaagatggttgtgatagatgaggtggactcatttctctttcggccacatgttggtcttagggccaaataccaagctgtcaactttttgagccagatttttcttaccagtaagggtgatggcccgaaaatagccaagcgtttggtggatgtttacattgcgcttttcaaggtactcatgtcttgctctcgtgctactgaaggagttaaacacagcaaatatggcaagaaaactaatgaaaatgggaaaaaggaaaagggcaatgacttcaattctcatgtaaagcatgaagacccttgtgcaggatcagatttagagatggactctaggattctctctgcacttttaactggggttaatagagcattaccatatgttgcaagctcagaagttgatgatattgtggaagttcagacaccaattctttttagattggtgcactctgtaaatttcaatgttggtgtacaggcattaatgcttttgtaccaaatatctacaaaaaatcagatcgcaagcgaccgtttttaccgtgcactgtatgcaaaacttttgagtcctgcatccgtaacctcgtcaaagccagaattatttcttggtttattggtgaaagcaatgaaaaatgatgtcatgttaaagagagtggctgcatttgcaaagcggttgctgcaggttgctcttcagcggcctcctcaatatgcttgcggatgccttttcatactgtcagaggtccttaaagcaaagccaccattgtgggcaattgtgctccagaatgaatctgttgatgatggtattgagcactttgaagacatagtagagaatactgattgtccagctattacctcaagaactacagataaatgcaatgacatattagctactcttgagaaatgcaattcagatgctgaggatgcctgtgatactatagaatgtgtaagtccaatctcaagtggtgagaaagatggaaaaggcacatcagctgaggggttgacacttcaggcatcttataatccacgacacagagagccttcttactgtaatgcagaccatgccagttggtgggagcttactgcactggccttacatgtgcacccatcggtatctactatggctaggacattgctatctggtaacaatatcgtttatagtggtgatccattgacagacctatcactccctgctttccttgacaaattcatggagaagaaaccaaaaggaaaccgcatcgctgaagggaaatggcatggtggatcccaaattgcaccagctaaaaagcttgatcaaagtcatcatctcattggagaagagctactagaactggtagaaaaggaagttcctcctgaagatgttgttttccatcgtttctacatgaacaagactggccctattaaacctaaagcaaagaagaaaaccgcggttctggatgaagatactggagagctctttgctgatgatgtagatgatgctagtgatgaaagtgatgatgaaatgcaggagctgggaattgggtcgatagaagatggagaatatgattatgataatctggatgcaaccacatttgaggaggaaggggatttgcttagatatgacagtgatgttgagttgcatgacatttcagatgatatctcttctggagcagattctgatactgaagcccttgaaggtgctaaccattcagatggcaatgacagtgatggagagg

SEQ ID NO: 25698 - DNA, 2828 bp, Oryza sativa
  ref <308>: DATABASE ACCESSION NUMBER: AK101140
  ref <309>: DATABASE ENTRY DATE: 2002-08-28
gtcgatatcctccgccccgccgcctctcccgtcgccacccatctcgccgcgacctggagatccccttcgctgtctctcacgccgccacccttcccagtcttccactaccctgatctgattgaaatgtcgggttcaacccgattcgggtgtcggggttgggggtggagggggggggggggggaagcgacacattcccatcccatcgtgcaacacacacgtagctcggcagccgactggaggagttcgcccccattcgaccgaggcgacacatccagcggcaaaggaggcaggtggatccagaagcgctggcattcaatcggaggagacgacatggagccacgaagctattggcacctgtaagctcaccacagtggctcgtacggatcggaggcgagaacccccaaccgcgacaacgacctcctgatctgttgaaacagcgctgttgctagcaggctggctgctgcagtgcagccctgcagccagctcttcccaacggcgccattattggcattgccctagcagctcagattcttgcctttgcctttcccagctgtgctcgatcatccttcgtgtcttgaccgccgtgctccggttggagttccaacttccaaggttcgatttttttttctctttctctgctacatcggtcaatatgtgttcaatagtttatcggccggcttatccaagtcgagctatttgattcttttatccattgaatttcgtactatttactaccttatacaaatgcattgtccggtgtggtacgggaaagaaaaatagatagatcggcttgtcatttgctcctgttggtgatgaagcattgtgcaagactagaacccaaaaggccttacctttttttctgtttcagggagcactgtaaaaaaaaaactttatcaggataaatatgaactatatgttcccctgtttcattttgtaataaatagtttgttgatggctttaattttcaaaatagtttttagccttcttgtgttctatatttctacttttttactccctcttttattataagatgttttgggctttgaatagattcacgcttcatatatgtatccaaattcatatggatgttagtgaatctagataagggatggaaaggccaaaacatcttataatgtggagcggagggagtatatgctatgtaaggtgccatatcaactaccaaaagctttgtgtcattagctcatattacacagcattagttttcctaacttgaattttgatactatgtggcatgcaaactacaacctttcttttacattaaccaatgccagtttaaacattagcatgttgtttaaaagatatcatgtctaaacaatagtatgtgattgcactttgttttacatttactgaattatatgataggcacaactcgttcttccctattgtagtatactagcatttctgtaattacttcattctccacactataattcctattgtttatagatggcatgcaaaatatttgagggggtacagatggatgcataccttaatcaagaacaaagacaacaattttcaaagcaaatatctagtgttgtttggatgattagggttgacagcgcagccaaggaagatgatttggcaaccaaggactatgcatatgttgctggtgtgtgcatgagtccagtggggcacatcttgacgtcagcgcatgttgtgaaacctggtgtgaagtatgttggtgcatgcacttcatggaaagcaggctggactccactaagggtagtgaaaacatctatggcttatgggatgtgtttatgtcagttggaacatgagagccgtaaaaagactgattacactaatttagcagaatctggactcttgagtgtttaccagcatgtatatggatttggacatcctaatttattcaaaataccatgtgactacagttttgtgagaggttcagttgagtatccatgtaaggatatttcggagctgcctagtttaaatgatttggaccgtttgctgtatgaaggtttgcaaaaagaaggacttaaatttgatcgcatggaagctatagttctcactcctagaaaagtgaaacatttaatgtggttgattgactcgtcatttaggccaaagaccatataccaaatgcatcaagacataccactaattcagataaaaaacttccatgtgagtcactgtggcagtccagtgttcctgtcttccgggcatattgttggtatagtcttattcaaatttcatgaaatcaactttgctgttcatttatcagcaatcaaagaatttctgaaggaatttgatttggtgagttttacagtaaaataattttgctttcctacaaatattaagtcgttatggtagtcgataatctcagttccaatagctctcagatattcacaaaggccgtgagtgtagataattagtgcaagatggatttactgcctaatctatgagaaaacaattatattggcttgtgtaacaaaatctattcgtgttttcagatgcctcaacatgtggatgcaccttccatggctgagaatgccatttcagatcaaaccccaactgctgaacctgcacctgctagtgttgctacgactgaaacagtggatggaagttcagagcagcacactttgctaggtaaaggagttgatgccctgttccacatctgtatgcatgaagtgttagatatgaggttgtcgccaaacagaacttctgtttcttgtttggaaagttgctgttgaacttgtcatgaaaatggtagcagcatgtttgttataatttcacacaaggttggagtttatagcacatgtgatgttggaaagcagcacatttttgatagtcag

SEQ ID NO: 25699 - DNA, 1724 bp, Oryza sativa
  ref <308>: DATABASE ACCESSION NUMBER: AK101141
  ref <309>: DATABASE ENTRY DATE: 2002-08-28
gggattcgaccatggcggcgacgaggtcgaccgcgacggcggcgctcgcgctctccagaaccctcgcccgccgccccgccgcctcctcctcctctagaagaatctccctcgaactctccgccccgagaggcaccaatccattccaatccaccgcgttctcgtccaccaccaccggagatccgccgccgccgacgatggattcgccgatcaaggtggtgtcgcacatcggggggagcggtggggatgggggagggggagcgatcgacgcggggaggtcggcgaggaagccgctgagcctgtggcccgggatgtaccactcgccggtgaccaacgcgctgtgggaggcgcggtccagcatcttcgagcggatgatcgacgccggggccgcggggaagcagcagcagcagccaccgcggacggagctgctgacgaagacgcccgcggggagccggaccagcatcgtgtacaagttcgccaccgacgacatcctccgggagcagtacagggacccgtggaacgaggtgcgcatcggcaagctgctcgaggacctcgacgccctcgccggcaccatcgccgtcaagcactgttctgacgaagatagcacaacaaggccccttttgctggtgactgcttctgtagataagatggagctaaagaagccaatttgtgtggacactgatctgaagatagctggagctgttacttatgttggccgttcttcaattgatatacaaattgaagtgactcaagttgatcaagatagtgatatgcaatcagatccaatcgctctaacggctaacttcacgtttgttgcacgagattctatgactggaaagtctgctccagtgaaccgcctttcaccagaaactgaaaaggagaaacaactattcgcagagagggaagcaagggacaagctgagaaaaagaaagagagaagaacagaagggggtgtttgaaaatgggataaataagcttcatgttgaggctgagcgactaaatagtttactagcagagggccgtgttttctctgatttgcctgctttagctgatagagatagcatcttgctgaaagacactcgcctggagaactctcttatctgtcagcctcaacaacggaacttgcatggacgaatatttggaggtttcttgatgcaccgagcatttgagcttgccttctcaactgcatatgcctttgttgggcaaagaccttgctttcttgaagttgatcatgttgacttcttaaaaccagtggatgtaggagactttcttcgattcaagtcatgtgtcttgtatacccagctcgacaatgcagagcagcctctggtcaatgttgaagttgttgctcatgtaacaaggcctgagctccggaagagcgaggtttccaacacattccacttcaccttcaccgtctgcagcgatgcattgaagaacggactgaagatacgccatgttgttccctctactgaagaagaggcacggcgcatattagagcgcatggacgcagagggtttgttcgactagtcctgcagaaccgcttgtttcagccacatgtctttttttttactgatcaacgtcagctaatgggaaatgtaaagatgatttaaataacatcagataagtagtagcatgctggcaatatagcggcaaaatgctagttatatgattacttttgcaattccttttgcagacatttggggtatataataaacataaacctcgagaccc

SEQ ID NO: 25700 - DNA, 2876 bp, Oryza sativa
  ref <308>: DATABASE ACCESSION NUMBER: AK101142
  ref <309>: DATABASE ENTRY DATE: 2002-08-28
gtcggcctctaaacccagcgccgcgcagtcgccgcgggcaactgccaagccctcgtccatggcggcctccctgcggggcctcgcgctctcgccgccgcctctggtggctccccccacgtgcgcgccgtctcgccgcctcgtcccgtcgccgcggagccgcagcggctacggggtccgtgtggcagcggcggccgacggtgccccgcggccatcggatcccgtggaggtggtcggcgtcgggagccggaaggacgccgtcatcgacttctgcctgggctcccgcaccctctcctccacccctatccgcttctggaccatgcatgtggtggataattgtactgtacagttaatacaaaaaagccatggagaagatgttgtagtcagagacttggaaactccgttatctcttcagccctgcccaccagcggttattcttgttgcaagtgcaggacaggatgctgaccatattactgcgatggagctccttagtgaagtaaaatctgctggtaagctggctgcatcaatatttttgaagcccttttgttttgagggacagagacgacaattagaggcaactgatttaattgacaaacttcaaatgtgctcaaactttcacattgttattgaagctgattcactgcttgagacagaagtggaaacccttgctgaagctctggaaagtgccaacaacgctgttctgtcaactattagcatgatatctatcatgatgtctgggttaaatcagacgttccggagttcgattaatgctcaaattatggaagtccatcctgatgaactaggacaactactcagaagttatggagaagccagaattggatttggtgctggttataacatccagtctgcaattaaacaagccgtcttccactgtccgtttcttcgtggtggaatcaaggatctgaacaatgtggttttcctctccattacgagttctcgaatattttctgaaagtgatatggtctccactttgcacattttccgtcgagttacagggttcactgaagatattatattttccagaaattgtgaacctgatttagagccaaaactgatagtagtttctttcttaactgtgagaaacagtactgatgagaacgtggcatctgtcaaggaggggtttctttcaggtttggccttgcattttccttttatatcctctcttatgggaggagatatccctgaacagaaacaagctacgttgaagcattcatacagtaaactgcctagcaatggattgagtttggcagagcaggaattctcacgactttccagtgcttttaccaatgttgttgttaataatttatttcctgaggaaacagacatcatgaaatctgaaagggaatctaaagagaaaacacagacacaatctcaagaggctaagattgaacctgatggggaaattagcaaagatagggaaagagagcatttagattcagagcaggagcataagttctggagcaattcccctggtattggcattgctcaattatgggctaaagtgcgtatggcatcagatggaggaacacagaacaatgacatcaatattatcactcttccagttggtgtgaaatctcctgaagttcagtgtggtgcagatacacgacctgaagctcatagtggttccagcagcacatctgcagcttctggacatgctgcttttggagtatcattttctgacattggcttggagaaagtaacagagatgtacagctctgcaatgacatttttaaaggggggaatggatagatctcgaaagcgcggatcagttgctaatcgtgctgcgctaatgctggatgcagaaagagagctggagaaaacatggagccccatagttgagatacagtttggaggaggaatttacagagggaggtgacaagaaggtgtccctgaaggaaagggtcgcataaccttcagcgacggtagcttttacgatggactctggaggtatggcaagagatcaggtctagggacactctattacagtaatggtgatgtattccatggaacatggagggatgacctttttcatggaaagggctggtattattttcacagtggtgaccgctggtttgcaaacttttggaaggggagggctaatggtgagggtagattttatgccaaagatgggagtgtcttctttggcaattttcaaaatggatggcgccatggggaggccctgttgatagatgcaaatggatcgaggtggattgaagtttgggatgatggtgtacttattggtcaaactaggttggaaaaatagggctccaaactatttcccatactttattggtaaagttgtacacttgtactacacataagttggagtactgcattgtagcaagtgccacgaccacaatacgttccgcaactccgattgtacatagatgcctgttggaagcactgttgtagagttgaagctagtttctgaaagctgcgttagtcattgatgaaatttttgacgcaaagtcattggtgaattgtgtatataatcccaagaagaatgggatgaagctttcttcttcataccgtggatgtggaaatcagggaaaagtcacacaactgcatcaagcatatgctacatgaagtaggtttgattgatttcatttatggccgctagatattctttgattggactcaatgcatggatgaacaagctctcgtggctttgccccctcaattccagctgagtatgtgattttccacatatggggtcccacagcacccttcccttctctgtttcctgtcaccgtcagtatcacccacacattctgttctagtgatgattatgcattttaagtttgtttactttcacatgattcaatcaatagattcacactaattcgaagtttgaagcg

SEQ ID NO: 25701 - DNA, 1882 bp, Oryza sativa
  ref <308>: DATABASE ACCESSION NUMBER: AK101143
  ref <309>: DATABASE ENTRY DATE: 2002-08-28
gcttgcggcgccggctctctccctctcccctctcccccgcctcgccgcagccgaactcctcgcgctaaaccctcgccgcggcggcggcggcggcggtgccatctcccctccatccccgtctcaccgcagccgggaacgtacgcttcgcgctttcctctcccgtcgtcgaatcgaatcgacccaagtagttgcgggacacgggcggtgagagagatgctggtgctgttcgagacgcccgcggggttcgccctcttcaaggtgctcgacgaggggaagctcgacaaggtcgaggatttatggaaggagttcacgacgtctgactcggcgggaaaggtggttgagctgaaggctttcaacaagtttgagaacacatctgatgccctttctgctgcaaccctcattattgacagcaagcctaccaagggtttgcgcaagttcttgcagaagcactgtgagggtgaaacattagctgtggctgactctaaacttggaaatgctataaaggagaagctgaaaattgactgccttcataatagtgctgtgatggagctcatgagagggttaagaaaccagctcactgaacttatctctggtttgggtgcacaagaccttggtccaatgagccttggcttgtcccacagtttgtctagatataagctgaagttcagtcctgaaaaggttgatactatgatcattcaggccattggcttattggatgatcttgacaaggagcttaacacttatgccatgagggttcgtgaatggtatgggtggcactttccagagctcactaaaattgtagctgataacatacagtacgcaaaagttgtgaagatgatgggtgatcggactaacgcagaaagccttgatttctctgagatactttcagatgatgaggttgaagcacagctaaaagaggcggcagtaatatccatgggaacagaagttagtgaacttgacttgctaaatatcagggagctgtgtgatcaggtgttggctctttctgagtacagagcccagctgtttgattatctgagaagcaggatgaacactatcgcaccaaatttgactgcacttgttggcgaattggttggtgctcgacttattgcacatggcggcagtttggtaaatctggccaagcagcctggcagcacaattcagatacttggtgcagagaaggctttgttcagagctctaaagacaaagcatgctacgccaaagtatggtctcatctaccatgcatccttaattggtcaagcagctccaaagcacaaggggaagatttctcgttctcttgctgcaaaaactgctcttgccattcggtatgatgcccttggtgatggtgaagataactccattggtcttgagagtcgagtcaagcttgagacacggcttcgggttcttgagggtaaagaacttggcaggtctgcaggttctactaagggaaagcccaagatagaagtgtatgaaaaggaccggaagaagggtgctggggctttaatcactcctgccaagacatacaatcctgcggctgatctggtacttggacaatccactgaagaaacaccaaagaagcctgaaggtgcttcaaagaagaggaaacatcaagaggcggagcctgcaggtgcagaggaaaccattcaagaggatggtgaccaagagggtcagaagaaaaagaagaaaaaaaagtccaaagatagcgaggattctcctgtggccgatgctgatggcggcaagaaaaagaaaaagaagtccaaggagagcgaggagccacctgtagccaccgctgaaggtgagaagaaggagaagaagaaaaagaagaaatctgattcacaagatgctaaggatgttgccatggaaaccgaagcgtctggtaagaaag

SEQ ID NO: 25702 - DNA, 2354 bp, Oryza sativa
  ref <308>: DATABASE ACCESSION NUMBER: AK101144
  ref <309>: DATABASE ENTRY DATE: 2002-08-28
gtttcctccactcccgcaaaaaccctagctagggccgcctcctcgccgcccaccgcctccacgccgccgcctccctcctcccgacgagccggttttcttcaagcgcgagattattctccaagggaggtaaggtgtcgggtcggctggcgatgggggcggagctgcggcgcgacgacatggaggtggcggaggaggacatcagcgactcccaggcgttccggttcgtcgagcacgtgctccagtccgtgcggatggatccttttcaagttgatctaagggacaaagaagagtatgatagcttgctaagtattgtagactcttcaaagaaaaggagttacgatgacgaggctttgctagtgacaactttgaaagcactatcagaagcagtgtccaagatagatatcatgtaccatcatgctcttttgaacaatatatttacgatgtctatctggtacttgaacagcgatacaagggatgctcttttgtcattaatcaccagattggctgcagtggcagatcagttcttaagagagtgtttgcagatgcttgtgaacaacttcactccacctggatcacttactgctttcatcggccaaccgagatggcttgcaaggaagaaggaaatctattctcagttgcatgagagtttgagaatgatctctgatactgtacccttagcaccaaggatgttaaaggatataatagataggagtatgccgaagttatttgacaacaaagctaagatggtttcgtttgttgagtgcatgttgggtcttgataatgataggatgggcgacctcattggagcactattgctggcgaaagttgtggatctactgactgaattggatgttaacataacttgggaagatatactccaagatgaacataacaaaggtatatttgatatggagcttgaagatttgggtgaggatgaggacagccttggacaagaaggaacaaaggccctttttggaggaaatgcttgtgctgaaaagcttgatggtttaatggttgttttttgtgagcacctcaagtcatgtaaagaacatggtcgcttaccccaggagtttgacattctgaagactatctttcgagcatctgtgctaagggtgcacaaatccaaatttgcacagtttatcatgttttatgcctgctcactggatcctgaaatctgtggccttgaattcgctctcttcctctctgatatctttattaaaaaggaagaggattcaatttctagaatgtctgcagtttcatatgttggaagctatttgtctcgggcaaggttcatttctgctgatacggtggttggtatactcaaaaggttagtggactggtgtgttgactattgtgacctccagaacaacataaggataacaaccaagcctataaatcatcaaatattttacgcaagctgtcaggcagtcatgtacatcctgtgctttcgcttaagatctattatggactacccaaatcttaaggcacagctttttaacatgccatttggatatatcttgacacacccactggaacctttaaaggtttgcttgccatcgatagttgatgagttcctgaggcaggccaaggctgccaggttgttcaatgcatctgtccattcagaatttgaagatgcgcttgaatctgatttgtccaaaacttttggaggaatgaatagacttgacatgttcttcccatttgatccttatctgctaaaagaatccgacagatatatgcgtccaaattttgagtactggtccatggtcaagacgacatacaacaattataacagtgatgttgatgatgagctagtggacctcgatgcacctgaaatgaatgtcggcagtttagatgatcatgttgagatagatctcaacagtgatgatgacttggaatactccatgaacaagatgtccataacgccgaaccgctctttctttcatcaaattatggcaaatagtgacactggccttaccatgcctgcgaggatcagaccatcaataagccccccatcataatgggtccaaagatcatcgccgccgccaacttgttgttcacttcacaaaagaaacagccgtatgctgggagtgcattaggatccagcttgtataagagtacaagtatcggatagaattggagctttacttcatagctagtagaagggtcgaacgacccatcttttgcgatgtatccagcccaaataggttagttgttgggatgaaatgtgaagtacagatgtgttattaaaaacgaagcgggagtggttgtgactatagactagcaggtagccctctggtatgtaaaagacaggcctgttttgatgtagaacgatttaccaatattttttatatcgg

SEQ ID NO: 25703 - DNA, 2971 bp, Oryza sativa
  ref <308>: DATABASE ACCESSION NUMBER: AK101145
  ref <309>: DATABASE ENTRY DATE: 2002-08-28
ggctccttgcgccatctcgcggctgaacaggggaggggcggcgatctccatccggcgagcggagcaggggaggggaggggatcttgacaatggttggacctgggcataggaacagtcacgggaagcgtcactctgattatgctgaaaatggaggtggcaagagaaggaatcctggtgatgatacatatgctcctggtccagatgatactgtctaccgctatctttgcccttctagaaaaatagggagcatcattgggaggggtggagaaattgctaagcagatgagggccgacactcaagctaagataaggattggtgagagtgtatctggttgtgatgagagagttatcacaatatttagctcaagcagggaaactaataccctagtagatgctgaagataaggtttgccctgcccaagacgctctctttagagttcatgaaaagctatccatagatgatgatattgggaatgaagaaagtgatgaaggtttagctcaagttaccgttcggttgcttgtgccatcagaccagattggatgcattattggaaaaggtgggcatattatacagggaatccgcagtgacactggtgctcatatacgtgttcttagcaatgaaaatctccctgcgtgtgccatcagtggtgatgaacttcttcagatatctggggactcaacagttgtcagaaaagctcttcttcaagtgtcatctcgtctccatgacaacccatctaggtcacagcatcttcttgcatccagcatgacacagccttatccagtgggctcccaccttggtagttcctcaactgcaccagttgtggggattacgcctttaattagttcttatggaggatacaaaggtgatgtggctggagattggccttctatatatcaaccacggagggaggagagctctgcaaaggaatttagcttgcgccttctttgtgctgcatcaaatgtgggaggtgtaattggaaagggtggtggaattatcaaacagattaggcaggagtctggagcctttatcaaagttgatagttcaaatactgaagatgactgcataattactgtttctgcaaaggagttctttgaagatcctgtctccccaacaataaatgctgcagttcatttacaaccaagatgcagtgagaaaactgatccggaatcagcgatcccgtcttacacaacacgcttgttggtgtcgacatcacgtattgggtgcttgattggaaaaggtggttcaatcattactgagataaggagaacatcaagagcaaacatacgtatcctttctaaggagaatgtaccaaaagtagcagcagaagacgaagagatggttcagatcagtggagaccttgatgttgtaagacatgctcttctgcaaataactactaggctgaaagccaatttctttgaaagagaaggtgctttatcaggtttcccacctgtaatcccttaccatcctcttccagttggtgtttctgaagggccaaagtatctaggcagagatactaagcctcttgggcatgattatccatattcaagtggatatcgtggctcagatgatattggccctattgacagctatgcaagttatggcagctcccaggtctctggaggaggttatggggcttatggtggatatagtggtcgttctggcagcagtgggttatctggccctagttcattttcctatggaaagcgacatggttattaggacttagattgacaaatgcaacaggtatggttcatccaccttgtcttgaaatgaacagaatgatcatgcgatcaagacttgctccttattgcatttctgccttttaaacacatttaacccagctcagctatcttctgatggacctgttcttttcacctttgccccatgcccacctcccttactaaaaacagccaagacaaaagaatgccaagaccaatgaagtatggagcctgcttattggagccccttcccaaaccagatgaccaagagtatggccccaacctggaagctttgcctaagagggacctgcctggatgccatagaccatcttatttccctagtatacagcatttacttatattttcctctgggactatgttgattccccgtcttacatgttctaaacctatgtattgaaagttcacagttgagacttcctgtatgtgttctcgtgcaacctgcttcatcttagtagttcgtgtggaagaacttggttccctgtttgccaaccaaaagcctagaagttacttgcccttgctttaaggatgtggatcgtgtcatccttcacattcgttcctatctgcacatagttccccagagaaaattgtacctcctcagtgagctcaaaataggctaacataaaacttaagtttacctataaaccaatctcagcatggtcttctagtatcaacctgtctggtaagctatatgactactatggcgatttacagttagctggaagttttcgcttttgctgatttatagatcataaaagccctaacatgcaattgtgcaagccatgctatacatgggatcttgacttgatgtgcacgtgtgctctgatgctcaatctgagtgtgggtaagtttcagagaacctctcaaagttaataactgggttgagattttatcgagttaagagtttcctttgtgttttggagtcttttcctcttctttacccttctcatggaggtgcaggagcatacgccgtgtgctgctactgcagacttgtccactgctatatggaaccactgctggagttgcagaacgttggtgccatgccatgcagggcatttgttagtgtattgctgtagactatgatacattttcgatgtaggcggtaacatggcaaacagtattgtgctgctttcagtatatttcttttttttggccaaatttgtttatgcatgtaaaagcaattctctcaacattgtatttgaacagtttggtcgaattagccgatcattcttatgt

SEQ ID NO: 25704 - DNA, 2393 bp, Oryza sativa
  ref <308>: DATABASE ACCESSION NUMBER: AK101146
  ref <309>: DATABASE ENTRY DATE: 2002-08-28
gatcacctagctctccctcctcccctccgccgccgccgccgccgccgccgcttcgcctccttcctatgctgccttccgcgcggagctcagctgctcgtggaggcagagccgtgcccgtctcatcccctgcccgtgcaagcagctaggtaggacgatttgagcgtggtgttaggccgaaccgctgaaggaagattgctccactgttgactgcattaggattcaatccttgctgctaaatgtattgcttatattcagcaatataatgttcagcagcaagaactggatcttaatatagtcgatagtggaagaacggtaacatatgtggtttgcagcaggtgagcaggatgggtgtggatgattgaatatctctgttcagtgttttcatcatctgactgaacactgaatcagcttgctgacgttagaggtttcagtttacctaatttatggtctgtacccatgaaaagtgggaaaaggctgaagaattcgatttctttctttctttcaatgttgagcacagctacacaggcatccaacccaacatcatgttgttcaacatgatatttgtctgcctatgcaagaagaccagggctttggaagcctaaaaagtcttcgaccagataggatcttagggtatgaaacccgacgcgttctcgtgtgctgcatattgtttatcttgtaagatagatgaagtaacctgacctataatcagttaaatgccctataatcttgaattattgatttatttatggcttcagctttcagtaacagggcttttattactgtaaccatataatccaacatagcagatgagttgacaggcaggttcttgtcttcacactgttgaaataataaaatttgtttccttggtttcttcctttgtgaaattatcgaagggaattatcaacttaaattatactgtattcagaaggtatagctgagatgccaatgaaatatagcaatgaataaattaaatgtttttttcttgtaatgtcagtttgtggcttatttacattgcattttttcttggttttaaacatttcagttggcatttgtatctataattcgatgcttctaatagtcattagcacgcctacctgtagtactttctggaagacaaagcttgaaactgagcttgactagtatacttctgctgcttgctttcatatggaaatttatttggaacccataatcatgtaatattttacatgcaccttaagcacactaacctgttcaattcattttttccccttttctagatgcttcgcatacatcttgcaaatgggttgttacaggctctctggaatcagcattcaccattcaggaacatcttgcaaatgggttgttacaggctctctggaatcagcattcaccgttcaggaaccaataacgttttgtactgccaagtgccaactattatttcctttgttgttattgcttaaaaaagatggttatacgagtcacaggccatattttatactggcaaagtctttttttcgtatttttctccttggatgagaatatcgcctttccttgctgaacccgttacctggttgcaacaccggaacattgcattcgactcagctaatggtacacatcagtttttgacgggatgtctgtatgattggagtacctccacgggtctttcagtccaccattgatcttgatccatagagatgtgaagacccagaacatccttactgcaaattgtgaggcaaaaatatctgatttcaggctgagcagccagcgctttctgcagtgaaaccaaaacacacaccaccactgatcctactgccactcttggatacttggactctatgcatttcctcacccctaagtaataataattcatttggggtaaccagcaaatagataagaaattggtgattgtttaccatgagcaggtactacaaaacctctcctctcgacatcgcagtgaaaagagcgatggctttggggttgctcccttagtgcttatcagctatcacagctcaaccaacgatcatcagcattgtgaaatttggtgcagaacagcctttctgaaggacattgctgacagcagcagaataactgagcaagaggaaattatgatataaactctgtatgaaggtgtccgatctggctttgcattgcacaaagcaacgcattgtggaaggttttatgggagagcttgtacctggaagacctcgtcctgttactacgaggtgcagctccaatggtacgtttgctgacgctaagttggggcactcgagtcagagaaaattaattagagaaacatcagcaagggaacacagctgattttcctacggtgctaatttttcatttgatataggagtatgaaacattggtgaattgtttaaactttagtaaagacctacaacctatttaatctggcg

SEQ ID NO: 25705 - DNA, 1874 bp, Oryza sativa
  ref <308>: DATABASE ACCESSION NUMBER: AK101147
  ref <309>: DATABASE ENTRY DATE: 2002-08-28
gacatctcctcctcctcgtaatcatcttctcttatctcttccccggcggcgacgcggcggcgccggtcaaaccactcctcgccggcgaggggagcgcggatcgggctcgggaggaggctaggggtttggctcgctcgctcgctttcggcgtgcagctgaggcggtggacttggcggctgtggcggaggtggggaggtggaggtggaggggagatggaggggttcctgcagaagctgaaggggctggacgcgtaccccaaggtgaacgaggacttctacaagcggacgctctccggcggcgtcgtcacggtcgtcgcctccgtcgtcatgctgctgctgttcgtctccgagacccggtcatatttttattcagcaacagagactaagctagtggttgacacatcaagaggggaaaggctacgagttaattttgacgtaacttttccgagtgttccctgcacccttctcagtgttgataccatggatattagtggagagcagcatcatgacattaggcatgatatagaaaagaggcgattagacgcacatggtaatgtcattgaggctagaaaagaaggcattggtggagcaaagatagagagtccattgcaaaaacatggaggaagactcagcaaaggtgaagaatactgtggcacgtgttatggtgctgaggagtcggatgaacaatgctgtaattcttgtgaagaagttaggaagcatataagaagaaaggatgggcccttacaaatcctgatctgattgaccagtgcaccagagaagattttgtggaaagagttaaaactcaacaaggtgaaggttgtaatgtacatggctttttagatgtcagcaaagttgcagggaacttacactttgctccaggcaaaggattttatgagtcaaatataaatgtgcctgagctgtcggcacttgagcatggtttcaacatcacacacaaaataaataaactgtcttttgggacagaattccctggtgttgttaatccacttgatggtgctcagtggacacaaccagcatcagatgggacataccaatacttcataaaagttgttcctacaatttacactgatctaagagggcgcaagattcattccaaccaattctcagtaacagagcattttagagatgggaatattcgccccaaaccccagcctggagtatttttcttctatgatttctcacccataaaggtaatatttacagaagaaaatagttccctgctccactatctgacgaacctatgtgctatagtgggaggggttttcaccgtctccggcatcattgactcgttcatatatcacgggcagaaggcactcaagaaaaaaatggagctaggcaagtacagatgatttacctgaaacatggactggccctcatgttccccaagttcccaagttccgtggcttgtaaaggatccattgcttaagacctgaagacgttgctttgctggaaggttttgctaaggccatcagaattgacgatattgcacattagttgatcaaaaactcgtttacatgtaaaaaaagacaatatcatagcgttgggcctgggggagtgctttgatgtctcagtgagactctttttgagtggccaaaactggcgaaatgagatggatagattaaatcaattttaccactgcgtgtgccatctaacactgtttgacgttttctgtatttcttttcaggaagaactagaacttacattttttttgttctttttttttgcttcatctgagtgcattagtagagatataacccatttcttgtaacttcagggtgttcaaagagacaatttgatcattttcgtgtcacgtccttctgccatcgtttgacgcttgcaatttattcaggaagaact

SEQ ID NO: 25706 - DNA, 2848 bp, Oryza sativa
  ref <308>: DATABASE ACCESSION NUMBER: AK101148
  ref <309>: DATABASE ENTRY DATE: 2002-08-28
gatggccgcagacttacacgacgacgcgccttatctcccccggtcgccgtgcccgcccgtcgccgtcgccgtcgccgtcgccgtcgacgccgcagcagccgggagggaggcctcgtcgtagctcctctcctctcccgcctcagggtcggggagcccccgcccccccgccgcgggttccgttgacgtggagccctagcgcgcgccaccgccgggcgtcgccctcccgtagcgacgccgccgccgccgtcgccgccggtggaccgctgatccatcgacataagcgctcatggggaagggagaaattgtggctgttcttcaagtaggtggagaattcagcacagatgctgatggactaatgtcttactctggtggagaagcacacgcaatgcttgtcaaaagtgactggacgttcagtgcattcaagcatgaaatatcttcaacgctgaataatatcagagtcgatcagtttgtgttcaagtatttccttccaaaaaataagaaaaccttgatttctatttccaatgacaaggatctacaccgcatggttgagttccatgcagaatctgagactacatacatctatgtcatgaaaaagaaggttgacaacagggcatcgattgttgttgctgactctggtactcctgtagataccactgcagttgtgccaacgactcaggatgggtctaagaggcagaagatctgtgcaacatggaagaatgtgattactggagttggtcaagtgtttgatggtcctaaagatttccgtgatgccttacataagtatgccattgcccataaattccattacagatttatcaagaatgattcatctcgtgtgactgcggaatgtactggtgaagattgcccttggcgaatacatgcttccaaatcccctgccaagaagcaattcatgatcaagaaaatatctgaaagccacacctgtgaatcagagacagtcaaaagtcatcgtctggcttctcagcgatgggttgctagtgttataaaagaaaagttacgcgatagtccaaactacaggccaagagatattgcaagtgatcttcagcgtgagtatggactatgcctaaattactctcaggcttggcgtggaagatcaattgctcaaaaggaacttcatagcacacacgatgaggtaaccagtcagctaccttggttttgtggacggatcatgcagacaaaccctcaaagtgtggccactgtagtacctatggaagattcaaaatttcgtttgtttgttgcattccatgcatcgcttcatggttttgagcatgggtgcagaccattactttttcttgatgtaatatctgcaaaaccaaataagcagtggaagctacttactgccacttctgttgatagtgaaggtgatgtgttcccagttgcatttgctgtagtggatgatgagagcagtgaacactggcattggtttcttgagcaacttaaatcttctgtgtcagcttcccgtgccataacattcatatcgaatggagaaaatggactatgggatgaagtgcctttggttttccctgacagtcaccacggatactgtgtggactatcttattgaagaatttaagacacaattggatgatgcatggaccgaagaagcaagagatgtcatggttgagcatcttaagaaggccatatatgcatgcacagttgacgagttcaatcagtatattgaactaatcaaaggtgaatctgacaagcttgctgaatggcttctggagattaaacccgagcgatggtcagatgcctttttcaaagggtcaaggcatgggcagtattcatgcaattttcctagcactattgttgagtggatccccaccagatacgagctttcaattgtccagttagttgacatgataagatgcaagctcatggagatgatgtacacacgcagggagtcttctaatgcgtgggctgagttattaacacctgcagctaatcagaaattgcaggaagaagtgagcaaagcccacaccctgaacgtcatcccttctgaaagtaatgaaaatggcaatgtgttcaaggtgtgtgatgattctgttaatgttgtcaatattgatgcatgggagtgtacctgccgaaagtggcatatttctgggttgccatgcatgcatgcaattgcagtaatagagcggattggacactgcccttacgattactgtgtgaagtatttcagaacagaatgctaccgcttgacctactccatgtcgataaatccaatacccgatgttatgctgcctcctgctatattaagtgatcaatctcaaagtccagtaacacatgcaaccccaataagaacccgacgacgggttggcaggccaaaggagaagccggcagacccacgcatcgcaattaaaagggcagtgcggtgcagcaggtgccagggttatggccacaataaagcaacctgcaaagttcctctgagcacatagtctacccatgggttcagttctcctatgtacatttaggtggagagttgctcttgtttgctgtaatacgagtgatgctatttctttataactcggtacatgcatcagtcattgattctagctctaaattgctttgtatttgcttgctttgttaggctaacatatttggtcgtaaaatcgcacattgtaatggacgcaatagagagacttgggaggtttgctgttatgtaatgctgtccaatttgatctggtttcccgttctagctattgtgtgccaatctgatcatctcaactctcaggcaaggaaaggaatatatatagactgtagttacttgaaaaacctttgtcagagtatttgaactttgcattattagtttgtttggtttttgcagtagc

SEQ ID NO: 25707 - DNA, 2372 bp, Oryza sativa
  ref <308>: DATABASE ACCESSION NUMBER: AK101149
  ref <309>: DATABASE ENTRY DATE: 2002-08-28
gatctgcttcttcttcttcttcctctgctgctgccgcgttgcgtacggtcgtgggaggaaacagggagagggagatggcggcctcgacgatgaagcacctcgtgcaggtcggggaggcgcgggaggcggcggaggaggacggaggggcgccctcggccgggccggcgtaccgctgcgcctacggcgggggcgccgcctcgccgcccgccgtgccggggctcgagtgctgctgggacatattccggatgacggtggagaggtgcccggacaacaagatgttgggccgccgagaaatcgtcgacggcaaggctggcaagtacacgtggataacttacaaggaagcgtacgacaccgtgatcaaggtgggcgcgtccatccggagccttggagtcggcaagggtggacgctgtggtatttacggagccaactgccctgagtgggttatcagtatgcaggcctgcaatgcccatggcatatactgtgttccgttgtatgacacgctaggtgctggggctgtagaatttatactgtgccatgctgaggtagaaattgcttttatagaggaaaagaagataggagaggtgctcaagacatttccaaatgcaacaaagtatttgaagacaattgtgagctttggaaaggtcaatcctgaacaaaaggaaaaggttgaacaaaacggagtgtccatctactcgtgggaagagtttttgcagttgggagttgaagaaaagtatgaacttcctacaaagcaaaaggatgatatctgtacaataatgtacaccagtggaacaactggtgaccctaagggagttttaatctccaacaggagcattattactattatttcagcagtagatgggttccttgcaaactcaaaaaagcagcttcgtgaagatgatgtttacatttcttatcttcctcttgcccatatctttgaccgtgtacttgaggaagtgttcattcaccatggtgcatcaattggattttggcgtggagatgtcaaactcttggttgaagacattggagaactcaagccaacaattttctgcgctgttccacgtgtactagacagaatttatggaggactgcaagataaagtttcgactggtggtttcctgaagaagacactgtttaatgttgcttacaaatacaaacaagggaatatggtgaaaggaagcaagcatgaagaagctgctgccatgttcgataaactagtcttcaccaaggttaaacgaggattaggtggcagagtacgacttattttgtctggtgcagctcccctgtctaatcatgttgaagagtacctgcgtgtggtaacttgctcccttgttcttcagggctatggtcttactgagacctgtgctgggtccttcgtttcccttccaaacaacatgtcgatgctgggaactgtaggccctccagtcccctatgtcgaagtacacctcgagtctgttcctgaaatgggatatgatgcattgtcaaaagaatcacctcgtggggagatttgcatcagaggggacaccttgttctcagggtaccacaaacgagaagacctcaccaaggaagttttagtcgatggatggtttcacacaggagacattggtgagtggcagtctgatggaagcatgaagatcattgatcgcaagaagaacatcttcaagctctcccaaggagaatatgtcgctgtggagaatttggagaacatattcggtcaagctcctggtgttgattcgatttgggtgtacgggaatagcttcgaatcatgcttggttgcagtggtcaacccgaacaagcaagctctggaacgatgggcagagtcaaacggggtaactggagactttgctaccatgtgtgaagatcctaaagcaaaagaatttatcttgggagaattaaccaagactggtaaagaaaagaagttcaaaggctttgagctcatcagggctgttcatctggagccagtgccattcgatatggatcgtgacctaattaccccaacttacaagaagaagcggccacagctgctcaaatattaccagaacgtcatcgacagcatgtataagaacatgaagtaggactggactcatggcggtacggtggaccaaaacttcacttagtagtttcgatgcgaacggaaagaaagaatttggtgatagttaggcttattttatttccattttctcctaaatttggacgtgtaatagttagtcttacatagccgtgctagcatgagcgacctcatatattaccgtgtcaattcttgcattttctttgcactgatagaaaagagtgaacagatacaaaactgttgctggcgagtttctactgtgtgaatttacattcttttatggtaacaaggacacatactttactcc

SEQ ID NO: 25708 - DNA, 518 bp, Oryza sativa
  ref <308>: DATABASE ACCESSION NUMBER: AK101150
  ref <309>: DATABASE ENTRY DATE: 2002-08-28
gacgattcggtgagtctgtgaagaggaaccgaccaagcaaaccctagccgccgccgccgccgcctccgcgtccgcctccagatccggccgtcggcatggcgatgcgcgctctggtctccaagctgagggtccccgcggctgcttcccgccgggctcttccgccgtttcgatccttctccgccgcctctcaggataaggttggcggaactactgcacgcgctgccgctaaagaagggactccaatttctgataatagcaggaaggtcgagaagttctacaggaagctgcgatggtatcaagcccttggcaacttccttgggttcaacacttcagtttatttattctatcgctaccactacacctaagctaaggaggagcaaacttagtactctgattgtcactctatttatgtatccatataccacctaagtactgaacactcaattgcatgtatgagtacgtacttagtactctgattgtcactctatttatgtatccatatgccaccaaagtactgc

SEQ ID NO: 25709 - DNA, 3018 bp, Oryza sativa
  ref <308>: DATABASE ACCESSION NUMBER: AK101151
  ref <309>: DATABASE ENTRY DATE: 2002-08-28
ggttcagcgagccagagaggaaacgaaccgatcgatcaggccgtcgctccgctcgccgccgcgcgacgcgacgcgacgcgacacgccggagacggacgacgagcgctttgccttccccgcgcgcgcgcgcgcgcgcacggaggcggacgctggtcggtttggtcgggtgcgaccgggaacggcggccatggcgcgcggcgggggcggcgggtgctgcccgccgatggatctgatgcggtcggaggcgatgcagctggtgcaggtcatcatccccacggagtcggcgcacctcaccgtctcctacctcggcgaactcggcctcctccagttgaaagaccttaacgcagacaagagtccttttcaacgaacatatgctgcccagataaaaaggtgtggtgaaatggctcgcaaattaagatttttcaaagaacaaatgtccaaagctggcatatcaacttctgcacaattaactgaaatttcgttggactttgatgatttggagataaagcttggagaactggaagctgaactagctgaagttaatgcaaacaatgaaaagttaaagcggacctacaatgagctgttggagtacagtactgttcttcaaaaggctggtgaatttttctattcggctcaaagaagtgctgcggcgcaacagagagaaatggaggcaaatcaatctggtgagagttcactggagagccctctgctggagcaggatacgttaacagatgcatcaaaacaagtgaagcttggatcattgagtggtcttgtaccaaaggaaaaggcaatggcttttgaacgcatcttattccgtgccacgaggggaaacattttcctcagacaagagtctgttgatgaacctgtcactgacccagtctctggagaaaaggttgccaaaaatgcatttgttattttctactctggggatagagcaaaagccaaaattctgaagatatgtgatgcgttcaacgcaaatcgctacccatttccagaagatgttgctagacaattacatgctgttcaggaggtatctgcaaagatatcagagttaaaggcaacaattgacatgggattagcacatcgtgacaatatattgaaaaatatcgcgtctgagtttgagaattggaaccgtctggcaaataaggaaaaaataatttaccacactttgaacatgttgagtgttgatgtgacaaagaaatgcttagttggtgagggctggagtccagtttttgcaacaactcagatccaagatgcgctccagcgagctactcttgatagcaaatcccaagttggttcaatttttcaagttctcaacacaacagaatctcccccgacatatttccagacaaataagttcacttcggctttccaggaaattgttgatgcatacgggatagccaaatatcaagaagcaaaccctggtgtattcactattgtcacttttcctttcttatttgctgtcatgtttggagattggggacatggaatttgcatattggtttcgacactctatctgataatccgagagaagaaatttgcttcacagaaacttggagacataatggagatgatgtttggtgggcgctatgtaattataatgatggcactcttttcaatctatacaggattaatatacaatgaatttttctctgttccatttgagctttttggtaaatctgcttatgcatgccgtgatccttcttgtggagatgctgcaacagaaggattactcaaggtaagacggacatacccttttggtgtggaccctgtatggcatggcagccgcagcgagttgccgtttctcaactcactgaagatgaagatgtcaattcttcttggagttgcacaaatgaaccttggaattgtgattagttactttaatgcgaaattcttcaggaacagtgttaatgtgtggtaccagttcatcccccagctgatcttcttgaacagcttatttggttacttatccatgctcatcattatcaagtggagcacgggggcaaaagcagatctgtaccatactatgatatatatgttcctcagtccaacagatgaacttggggagaaccaattatttcctggacagaaaacagtgcagcttgttttacttctgcttgctctggtgtctgttccctggatgctgatcccaaagccatttttcttgaagatggagcatgagcgaaggcatcaaggacaacaatatgcaatgcttcagagcacagatgactcagtggtagcggagatgggacatcataatggctcgaaccaccatgaggagttcgagttcagtgaagtttttgttcaccagttgatccacacaattgagtttgttcttggggcagtctcaaatacagcctcatatcttcgtctctgggctctcagtcttgcacactcggagttgtcaagtgtattctatgacaaggttctcctcctagctttcgggtacaacaacattcttatccgcatcgctggcattaccatcttcatctgtgcgacagttggtgtcttgcttgttatggagaccctaagtgcattccttcacgccttaaggctacattgggtggagttccagaacaaattctatgagggcgatggatacaagtttgcgcccttctctttcgcactgatcagtgaagaggaagactgagtttgcgcaattattgcatctattgtagcgtgtaatttcttggggcgtccttttttctcaaagcgtcaagtatttatcacggaagaatcataaacctccagtttgttccttcatcaggaaagggactagcagcatcattttttgctttgctacgaatgattcgtggcaagatgattttttgggtggccgttggcacatcgggtggcatcacccttattttggtgtaaggctaataaataataagtaaattctgcactcgggttgccatttgggcaattagttttctgcacataaataaacattgtatcaaatgttaatattccattgggttcttttattgtcaataaagagtgcggcctacattcttt

SEQ ID NO: 25710 - DNA, 3156 bp, Oryza sativa
  ref <308>: DATABASE ACCESSION NUMBER: AK101152
  ref <309>: DATABASE ENTRY DATE: 2002-08-28
ggcgtgtccatttcacgaattcctcgtctccacctctctctccctctctctccgctttctccccctttcctccactcgcctcacgccacacccctctctcccgaccaccacccgcctccgccgccgcctccgcctcggttcgggtcggcttggctgctccggcgtctgttggacggtgggcgcggcggcggcggcggccgcgggcaaggggcggtgggggtgggggtgggggcgcttctagggtttggtggggttcgggcgggcgcgccgccgtgtttggggtagccatgtcgcagacgaactgggaggcggataagatgctggatgtctacatatatgactactttatgaagagaaatctgcaggcaactgcaaaggccttccaagcagaagggaaggtctcttcggatccagttgcgattgatgctcctggtggttttctttttgagtggtggtcagttttttgggatattttcatagcaaggacaaatgagaagcattcagatgttgcggcttcatatattgaaactcagcacatgaaagccagggagcaacaacagcagcagcagcagcaacctcctcaacagcgacaacagcaaccacagcatatacaaatgcaacaaatgttgctacaaagagcagcacagcagcagcagcaacaacagcagcagcaacagcagcagcagcaacagcagcaacagcagcagcagcagcaacaacaacagcgcagagatggtactcatcttcttaatggtactgcaagtggacttcctggaaacaatcctttaatgcggcaaaaccagagtactgcaaatgttatggcaacaaaaatgtatgaggagaggttaaagttgccttcccagagagatggtttggacgaggtgtcaattaagcaaagatatggagagaatgctggacaactacttgattcaaacgaagcgttgttgaaagcatctgcaagtggacaatcttcagggcaaattttgcatggtactgttggtggtctgtcaggcagtctgcaacaagttcagtccaggagtccacagattcctgggccagctcagagtatcaagacagagatgaatcccattttgacaccaaggtcagcaggtcctgaggggtcatttattggtgtccaagggtctaatcaagctggaaacaatttgactctgaaaggatggccactcacgggacttgaacaacttcgctctggacttctgcagcagaagtcatttgtgcagaatcaacagcaattacaacagcagattcattttcttaccccgcaacagcagcagcagcttatgttgcaggctcagcaaaatatggcttccccaacatctagtgatgttgacagcagacgattaaggatgatgcttaacaacaggaatgttgggcagacaaacagtggtggtgatattattccaaatattggttctcctagtctaagtggtggagatgtagatatcctgataaagaagaaaattgctcagcagcaacaattattacagcagcaaagcaacagccagcagcatccacagcttcagcagcctgctgtctccagtcagcagtctcaaagctcaaatcagtttctccaacaagaaaaaccaggaatcggaactatgcctgttgatgggggcatgccaaactctttcggtggagttgatcaaactacaaagaagaggaagaaacctggttcatcctctggtagagccaatagttcaggaactgcaaatactgctggcccttctccaagttctgcaccatcaacgccttccactcatacaccaggagatgcaatgtctatgccacagctgcagcagaatggtggttccgcaaaaccattggtaatgtttggctctgatggtgctggaagtttgacgtctccagcaaatgcactggctgacgtggatcgtttgctagaagatggttcattggatgaaaatgttgaatcttttctatctcaggatgacatggaccctagggattcattggggcgctccatggatgctagtaaagggtttggttttgctgaagttgcgaaggcacgtgcaagtgcaaccaaggttacctgttgtcacttctcctctgatggcaaactgctcgctactggtggacatgataaaaaggttcttttatggtgtacagagcctgctctaaagcctacatcttcattagaagaacattcggcattgattacggatgttcgatttagtccaagcatgtcacggcttgctacatcttcctttgacaaaaccgtgcgggtttgggatgctgacaatacaagttattcactccgtactttcacgggtcattcagcatctgttatgtcacttgacttccatccgaacaaagaagatatgatttgctcctgtgatggtgatggtgaagtccgcagctggagcataaataatggtagctgcctgacctttgttaaggtctttaagggaggtgctactcagatgcgatttcaacctcaaaagggaaaatatcttgcagctgcctcagagaaggccatctacatacttgatggagagacacaacttgcttgtagaaaccctatgcaggggcacacaaagaatattcactcactttgttgggattctaccggtgacaatctggcttctgtcagtgaagatagtgtcagaatatggtcgtttgctcctggacatgacggtgaatttgtgaatgagttgagttgcagcgggaacaagttccagtcatgcgtttttcacccctcttacccatatttgctagtaattggatgctacgagtctttggaactctgggacattagggagaagaacgccatgacggtccacagtgctcatgatggtttagttgcagcgctagcagcatcgagcgcaacaggcaaggttgcctcagtaagccatgataggtttgtcaagctctggaaatgacttgctccaggtgaccacatgacaaaagagggtagctaacaaaaaaaaaaaatcttgaaccgctttgggtgcaagaactaacctggtttgtgttttgtggttgtcttcagttgtaccgtgtatgctgctctattagcttctgaagtttgtaactctgtagaaatgtttgttggcgtgctgtaactctcaacatgtctctgatttgtactgatcataagttacaaagtctgttagtctc

SEQ ID NO: 25711 - DNA, 2082 bp, Oryza sativa
  ref <308>: DATABASE ACCESSION NUMBER: AK101153
  ref <309>: DATABASE ENTRY DATE: 2002-08-28
gaggcaccaccatctcgcatcatttgttttttctccctggaaagagcggccatctcgccctgcgttgcgagatccccgtgaaccgtcgcggccgggcggtggtaatcgtggcaaggacggatgcagcacaaatggaaggtcgtggagggcggcgccggtgccggtgccggcggcggcgggggagatcagcgccggcggtgcgtgacggcgtcgttgtccatgctgatcgcggccaccctggcgtttcttgcctacgtcgccttcttcccgtatgacggcgcgggcgggctgtaccggtggtggagatgcgagggttgcggcgacgcggcgggcgggttcgccttcgacgaggcggccatggcgcaaggacctacggctggtggcgcccgccgccgctcgccgacgacgctgtcgcacatcgtgttcggcgtcggcgcctcggcgcggacgtgggacaagcggcgcgggtacgcggagctgtggtggcgccccggggagatgcgcggccacgtctggctcgacgagcagccggtggggccctggccggcggcgacgtgcccgccgtaccgcgtctcggcggacgcgtcccggttcggggaccgggcgtcggcgtcccggatggccaggatcgtggcggactcgttcttagccgtcacggcggagatggcgaacggcaccaccgattctcccgaggcgcggtggtttgtgatgggtgacgacgacacggtgttcttcccggacaacctggtggccgtgctgaacaagtacgaccacgaggagatgtactacgtcggggcgccgtcggagagcgtggagcaggacgtgatgcactcgtacggcatggcgttcggcggcggcggttcgccgtcagctacccggccgccgccgagctcgccaaggccatcgacggttgcctcgaacgatacaggctgttctacggcagcgatcagcgcgtgcaagcctgcctcagcgagctcggcgtccctctcacccgcgagcccggattccaccaggtggacgtccgcggcgacgcgtacgggatgctggccgcccacccgctggcgccgctggtgtcgctccaccacctcgaccacatcgagcccatcagccccggggggcagcatggcagcccgctggacgcggcgcggcggctggtgcgcgcgtcgcggctcgaccaggcgcggtcgctgcagcaggcgttctgctaccagcgcgggccgcgctacacctggtccgtgtcggtgtcgtggggttacacggtgcagctgtacccgtgggccgtggcgcctcacgagctggaggtgccgctccggacgttcaagacgtggcggtcgtgggccgatggcccgttcgtcttcaacacgcggccgctgagccgcgacgacgcgtgcgcccagcgggccgtcttcttcctcagcgccgcccggaacaatacgtcctcccgcggccgcggccgcagccgagccaccatgacggagtacaccaggcgcgttgcgaagccgggggccaaggaatgtgaccggcccagcttcctcgcggcgtccacggtccacacggtcagggtcttcgccccaaagatgagcccaaacgagtggacacgggccccacggcggcattgctgcagcacgaagaggacgaggtttggcactgagctggaggtgcggatacgatactgcggccgaggagagctcaccacgccgtagctctctgccgatgatcccgccgcagttttgccaacagcacggagggctagatgccaagattttagtagcggctagtgccatgacaccgaactgactgaagaggacggcagggtgaaacaccgtatttcactgcggatttttggacagattctggtttgtcttcgttgtgcacgtacaagtgattatacggctcgtcaggccgcagacacatgctgacatgcatacgcatgattgcataccccgggtacacagtaatccgtttggctcgagcgctctttttctgtaaagagctgtaaagggagtggtgatcagacttaacgatttcgacatgtaaagcgtagtaggactagtttgaaaggatggtcttttcactgttttg

SEQ ID NO: 25712 - DNA, 2584 bp, Oryza sativa
  ref <308>: DATABASE ACCESSION NUMBER: AK101154
  ref <309>: DATABASE ENTRY DATE: 2002-08-28
ggtaggctcgtcgcggccacgtacgccatcccgagctcgggggctaccccggtcggaggcggagcgcttgggggccggggtttaatcgtgcggaggactcggtagggctcgccatacctcgcgccgtccggcggcgcagagcgcggcgtcgccgctggggagaaggacggactcaacgagacgagcgagcgacggccgacaggcgaaggcgttctcgcttcttggcctctcgccgttgaattggagacccacattgggcttgttttgtgtgttactagcatcaccaagagttcccctactactcccaatttcaaattttggggtttttcgagcaaaaaaaatggatccaacagatatccaaaccagcttccaaaaattttgagaccctaatcccgtgtttccgttctccaccagtagagaatacctcccgctcccaatccactgcagccgggcagttttcgcgcgctgccgaggtgcttggttcccccatctccattgattccccatctcgtgcgattggcggagctgatgagtgacgacagccacgggcgagcgggaggtggcacgtcgacaggcggcggagggccgccagcgcagctgcggcagccggcaaggggcggctgggtgggctgcaggctgtggctgcagttgggcagcgcggcagtagcaggtggcgggccaacaagtagcagggcaggccggcagcagcagcagatcaacaggatgattcaatctttgctatttgccttatccaccttaaagatagcctattaatcgatccatctttgctaggagtatctgttttgcagattatttatatgtctatcctcctttggctatcccatgtactgctgaaacttcattacttgaggttatattcatgtgcatcctcgtgcactcctgtgtccatcttatatggtaccaacaagaagttgaagtgtttgggtgatcgctttggggaaatggaaggcagcaacccacctggtaatatgacacagggaccttcctatgggagtttagatttgcatggtatctccaagcaaatgcatcctccaaactcaggaaatcagggcttcaaccagcctcagataccagggaattttaccattcctatggatagggttacagagcctgataacatctctgatggagttcagttaggacaacatgggaagattgcccatcatcaccatcaccacagacaccactcaaagaaccatgggagtgatgaagaggagcacgatatgaatgaggatgctgctgatggcaaagacaagaagggctctccatggcatcggatgaagtggacagattcaatggtgaagcttttgattactgcagtatcctacacaggggaggatcctggagctgatttaggcggtgggaggaggaactattcaatgatgcaaaagaagggaaaatggaaagcaatatcaaaggtcatgggcgagagaggttgccatgtgtcgccacagcagtgtgaggataagttcaatgaccttaataagagatacaaaagactaacagatatccttggaaggggtactgcttgtaatgttgtggagaatcactcacttcttgatcacatggatatttctgagaagatgaaagaggatgcaaggaagatactgaactccaaacacttgttctatgaagagatgtgttcctaccataataataaccgtataagtctgcctgaagatcccgcacttcagcagtcactacagcttgctcttagatgtaaagaggataatgatttcatgaggcatgcaagtggagatgctgaactagatgatgatcagagtgaagattcagattatgaggagaatgaggaagaacatcgagcagttgataccaatataaggggcccctcaatgcataaaaggatgtggcatgttgtagatcatggtgatgtaggttttgtcacctcatgctcgaatgatggtagtgggaggtctgatccctatgacgtgttggatatcaacaaaccctttccagatggatgtgatttggctttggtgcaaaaagacttggctctgaaagcagcagagattcaaaaacatcgtttgcagattgaaaccaaggctgtgcaactcgcaaagcaacgtctcaagtgggagatgttcaggaagaacaaggacttggaattggaaaagttggcgttggagaatgaacaaatgatgcttcagaataagcggtttgagcttgacctaagacacaaggagctagaacttgagattaagataaagggcaatgctaatcatccatgatctttgttctgttagcacttcatttcgcaatatggttgcagatcaattcaattcaggaccgtgtttatgcaagatggtagaggtggcagattgtttatgcaagatggtagaggtggcagattatctgtgactactgacaagtgacaacaatttcaatgctttatagctagctcagtgatcctctcctcttgttgtttatatatcattatatctcctgattctctctacttgtaaaatttccatgtgatactgggctccatctgtattctaaagttttcatcatttttttctatccaactttgttttactcaatc

SEQ ID NO: 25713 - DNA, 1193 bp, Oryza sativa
  ref <308>: DATABASE ACCESSION NUMBER: AK101155
  ref <309>: DATABASE ENTRY DATE: 2002-08-28
ttggtgtactgaatgaactgaattagtgtgtgcgtgttgtatcatcggcccgatcgagaagatgtcgaagctccaactccggccgcctctgttggctactctgcattgcagcttgctcgtgctcctcatcatcaatggcgccgccgctgccggcaagaccggcgagctcaccgtcatctggggccggaacaaggacgagggctcattgcgttcgacctgcgacaccggcctctacaccaccgtcgtcatctccttcctcaccgtcttcggccacggccgctaccggaccgacctcgccggccacccgctcgccggcgtcggcgccgacgtcaagcactgccaaaaggccaagaacgtcaccgtcctcctctccatcggcggcgccggcgaccagtactcgctgcccaccgccaagtcggcgcaggacgtggccgaacacctgtggcacgcctacctcggcggcggccgcaggggcgtgtcccgcccgttcggcgacgccgtgctcgacggcgtcgacgtctacgtcgaccgcggccggtggggccactacgacgagctcgccaggcgcctgaggagcttcggtcgcgagaagccggcagtgcgcctgacggcgtcgccggcgtgctcgctggcgctgttcgacgacgaggtggagacgatgaagacgctgtcgctgttcgagcggctgcacgtgcggttctacaacgagagctcgtgcgactacaactacttcgagacgcggccgttctggggcgcgtggaggacgtggacgtcgaggttcccggcggcgcgggtgcaggtggggtggccggcgatggaggagatgagcgggttcgtggacccgcagacgctgcgggagagcgtgctatcgtcggtgcaggacgatgccaactacggcggcgtcatgctctgggatcgctactacgacaagatcaccggattcggccgtgccatcaaagacattgtctaattgcaatgttactccagtgtttatactacatggttcactgtgttgtttaccaacctgcattgcgtcatctgttactatctgtacccgtctactggcatatgcatgttcgtatgggtcaggcttgaaagtagtatgattatgttaatttagttttgaaatataaaagaatccagcatgtttcactgtgctgtttaccatagttgcattgcattattggttgatt

SEQ ID NO: 25714 - DNA, 2125 bp, Oryza sativa
  ref <308>: DATABASE ACCESSION NUMBER: AK101156
  ref <309>: DATABASE ENTRY DATE: 2002-08-28
ggctctcgctcccaccacgcttcgctgctgctgatcaaaccccgcttctcgatccgaccagggaaggaggaggggaggatgaggggggcggtggcggtgaaggcggggagcaggccgccgtgggtggggctaggggcggcggtgtgggtgcaggtggcgggcggagccagctccaccttcgcgctctactcccacgccctcaaggtcgcgctcgccgccgaccagcgccgcctcgcgctgctcggggtcgcctgcgacgtcggggagaacctcggcctcctcccgggcgtcctctgcaaccgcctccaccccgccctgctgctcctcgtcggcgccgccgcatgcctcctcggctacggctccacctggctcgccgtctccgcctccggccccgcgctcccctactggctgatatggtttgccttatgccttgctgcaaacagtggtgcatggttggggaccgctgttttggtaaccaatatgaggaatttcccactcagtagaggtgccgtcgctggcatccttaaagggtacgctggtttaagtgctgctgtgtacactgtaatatacaccggagtacttcatgattcagcttcaaactttctgctttttgtcaccctgggagttcctgttgtgtgccttgtgacaatgtacttcgtgcggccttgtgaaccctcccttgtggagaactcttcggagcaagtgcattttttgttcacacaactctccagtgttcttctaggggtttatcttgttgcagccacgatattggaccatttcgtaactcttactgatgctgtgaactatgttctgcttgtcatcatggtccttgtcctctttgttccacttacagtacccttgaaaatgacattgtttccaagcaaccgaagaaaagggcaatccgattcatcagagtgctcttcttcttctgctgatcatgatcatacagaatcattacttccttcttcatcagcatcaaatcttggtaatatagaagatgatgattccatggatattgatattctcttagctgagggagaaggggctataaagcagaagagaagaagaccaaaaaggggagaggactttagatttcgtgaagcactgctgaaggctgatttctggcttttatttgcagtgtattttattggggttggatctggagtcactgttcttaataatctagcacaagttggaattgcagcaggtgttgcggatacaaccatatcactcgccctcttcagtttcggcaatttctttggccgtttaggaggtggtgctgtttctgagtatcttgtcaggtcaaggacccttccacggacaacattgattacatgcacccaagtcatgatgataattatatacctgctctttgcattgggccaccatgccacacttcatgtctctgttgctttacttggtatttgttatggtgcccagttctcagtgatggtgtcaacttcatctgagttgtttggattgaagcacttcggaaagattttcaatttcatctccttggggaacccacttggcgcactcttgtttaacagtctcgcggggtatgtttacgaccaggaagtggagagacagcatgccacaacaatggacactgacattgcatgccatggccctaattgtttcagacttacattttgcgttctagctggagtggctagcttgggtacattgctgagcattgttttgacagtgagaatccgaccagtatatcagatgctctatgctggtggatccttcagccagccgaggagctctgctcactgagaaaggcttttccggaattcacattgatgtagcatgagatcgagatcttgtttgatgatattcttggatccactgtattcagttatgagtattggtgctctacactgttatttcagctatgaggttcaggaatgagagaggtgctttttgttgagtttgtaatgcgatgctggtgctgctagtattaggctgatgagctaaagcaagaaaacgagaatgtaataacagaaattgctgcttttgtataatagaaatttatgattatacttaggcacacaagctgtgtgatattcaggtgttctcatgttctgataaagaaaatatttcatgcattgagcatctc

SEQ ID NO: 25715 - DNA, 1579 bp, Oryza sativa
  ref <308>: DATABASE ACCESSION NUMBER: AK101157
  ref <309>: DATABASE ENTRY DATE: 2002-08-28
ggaggaagaagacgacttggccacatcgttcacacacttcactcacacgagagagagagagagagagacaaagctcagagctgcttcctcccaaaagcttcttccaacaacaatggcgtcgttctctcctcctccccgctaaaccgccgccggcgtcccgacccgacgtgcttgttgactgcatctgcgacaaggcgagaagagaacgggggcccaagcccacgcctcgccgaatcgcgtcggtgctttggatcgtggccatggacatggagacggagaagcagcagcagcagacgaggtgcccgccttggctccaggcggccattgcagacatcgagcagcgggtacgggcgctggcggtgagcgtgccggaggacgcggcggcgacggcgacggaccactccttcgccgagcgcgctgagaactactaccacaagcggccgcagctgctggcgctgctcaccgacctccaccaccgctacctctacctcgccgaccgctactcccagtctctcctcgccgccaacaagcccttccacgctgccgccgcctcctccgactgcggctcctccgacgtcgacgaccgctcctccgacaccggtagctccctctccttccagcctccacccaccaccagcagcagtgttcgtgatgccgttgacgctgagctggtggtggcggagctggtggccgcttggattgatcgggagattctcgccgacgaggcggagcggcggaaggcggagtcggcgaggaagatcgagctgcaggggagcctcgtggaggtgctggagtcggagaggctggtgctgctcggcgagaacgcgcgggtcgggttccgcgcgtcggcggccgaggaggaggcggcggccgcggcggccgagctgggttacatgcggcggcgcgcggcggagatggcgcggctggtggtgaagctccgggaggaccaccgggtgtgcatgctgggtcgcaagatcgaggcgctgcagtcgcaggtgtacgggctggagctgcggaaccgggagtgctacgaggccatggcggcgtgggaggcggagaggaaggtgggcctcgccgagatcgagcggctgcgcgcggacaacaagcggctggccgcggaggccgccatggccgccgcggcgaggcggaagcggaagggcgggaacggaagcgggtggctgtggtgggcgcgggtgcggatggcggcggagtggacgccgtgcgcgccggcggtgaggaaggtcggtgagcggatcaagcacggcggcggccggaaggacgtcaagtacaacgccggcggctgcttctgcctctagtttggattttggcgggatggtttctttttgggtgggtcaatgttcattttaccccttggattgtgatgatattgcgtgcaagtatcaaggaggggagtagtaatagtaatcaggttatgggattatgcagagtgagagagagagagagagagagagagaaattaattagcgagaggttaattagcttgtaaaatggatcagttgcatgttggtggtaaaactagtgtactgagactcaagtatataatattatgacatgttct

SEQ ID NO: 25716 - DNA, 2096 bp, Oryza sativa
  ref <308>: DATABASE ACCESSION NUMBER: AK101158
  ref <309>: DATABASE ENTRY DATE: 2002-08-28
gtggcgatcaccccgtgggcggcggcgccgccgtcctcaggccgccggccgccgcgtgcggtcgagctgccttgccatggcaaggccgcagccttgctgatagcgaacggaggaaaacgaccaggctgtatgcccgcatggtgttcgaaggggtcgggagcgatggctcggggtcgggggcggtggctgctgccgacgcggctgctgaacgtctgcctcgccgcgctctgccgcggggggagcctcgccgccgcggaatccgtcctcgtcgacgccatccgcctcggcctgccacccgacgtcgtcacctacaacaccctcctcgccgcccactgccgcgccgcgggcctcgaggctggcctcgtcgtcatgggacggatgcgggaggccggggtggagcccgacgccgtcacctacaactccctcatcgcgggggccgcgcgccgcgggctcccgatacacgccctcgacctgttcgacgaaatgctccgttcggggatcgcccccgactcctggagttacaaccccctcatgcactgcctgttccggtccggccacccggaggatgcctaccgggtgtttgctgatatggctgagaaaggcattgcgccgtgcgacaccacctacaacactctcctcgacgggatgttcagggccggttatgcgatgaacgcatacaggatgttcaggtacctgcagagggcggggctccccgtgagcattgtgacttacaacaccatgattaacgggctgtgcagttcaggcaaggtgggctatgcccggatggtccttagggagcttgggaggactgatcatgccccaaatattatcacttacacggcagttatgaaatgctgctttaagtatggtaggtttgagcaggggttggacaccttcttgtcattgctggacagagggtacatttcggatgtctacccttactgcacagtgatcagtgctttggttaagaagggccggttgggagaagctaataattattgtgacctcatgctacaaaatggatctaggcttgacagtgtgtgctacaacacgctgattcacatgcgatgccaagaagggaagctggatgacgcatttgagcttgtgagcatgatggaagatggcggcctggagagtgatgagtacacattcgcaattttggtcaacgggctgtgcaagatgggacatatcgaggctgcagaaaagcagctattttacatggagatcaagggcatgcaatctaatgttgtggcatacaattgcttggttgatgcgctctgcaaatttcaagaggtggatgcagctatcagattactgcagtgtatgaaactaaaggatgattttacttacacatcactagtccatggtctatgtagggtgggtagataccatatggcatcaaaattcttgcgaatctgcttgcatgaaggtaataatgttcttgcatctgcaaagcgtgctgtcattgctgggcttcgtagctcagggtttaaaaatgatttgaggaaagtccgggtagcattaaatatggctaagctgctacgaccataatccaaggaaaatggcctgaaagatcaattcgcaagagaaatgactggataatcctgcatggagtttaaggatgaatatcttgtcggtggctcagtgcatcattctatagaagtaaaatgggtatactctttttctggagaaactgtaggatggtgatcttgcaatatgcaatcagccttttcactgtcagtctgtcaaacccaagcggaacaaaattaaacatcatgggaagctgcagacatcaccactagttggcgaacggtatcggctcagtatgtgcacaaagccaccactaactggtgtatgccttgccttggattttgttgggaagattgattgggtttagttatctgttgctccagaccagacgatacagagcaagcaattaaaaagaagtacaaaaagctgcagattggtacagaaaaacccatttgtacatcatttttttgtctgttctttaattcttatgaagcagtggaaaaaaaaatctctttgggtgataccatatgtcacagttttaacatattgagcaagttttatattac

SEQ ID NO: 25717 - DNA, 1627 bp, Oryza sativa
  ref <308>: DATABASE ACCESSION NUMBER: AK101159
  ref <309>: DATABASE ENTRY DATE: 2002-08-28
gactcgcgaagtcccctcgaactcccaggcgcgcaaaaagtcccctggggaacttccagcggcgcacccaccgccagcagcagcagcttcgccgcccgccgacgccgtagcggagggcaagccatgaagttcaaggccttcttcacggacgacggcatcgctctcctcgacaagcggttcctgccggcgatggacaaggtgggccgcctgtgccacgtctacctcacgcccacgcacgccatgctcctccacaacctcctcggacccacggggacggggcccgacggcggagggccgcagtgcgtcgcgcagttcgccaaggacctcctcttccgggagtacagcgtgtcgtcgcggaacggcaaccgcgtggccttcgccgtcgacgtcgcgctgctccaccgcgccctccgcagcgcgctcgccgtccacgcccagtcgccggccgccggggacgcctcagccgcgatacaggtgaagctcgtcaacaagctgccggccgggtcccggtctgcctcgccgttcctcactttcgagaccaagggagcccgctctgctgtcgtgcaggacgtgcccatctcgcggcccctttcacgctccgacgtcgagcggctgcaggctgccctcgactccgcccaagagctccctcagactctagttcaggttccagatctgccacagttgcagagtttggtcgatcgtctaaaaaatgtcggcgatcttctgacagtagctgttactcaatatggtgacttacatctacacgttgccacttctcttgttactgttggttcagaattcaggaaacttcgtatccttggtgttcgtgcaaccgcacctgttggtgatcaaaatttgagtgcttccactcgtaccaatatggcaattgagagaggggaggcgctctcagtgcaagtgaatatgaagcacctagctaaaagtctacaatgtcatttggctaagcccgactgtaccttctatggtatttctcctggtggtgcttgcttgactgtgatattccagtatttcattccaggaactagactgacggacaagtccattagcttctactgcaggcttccagtccttgaccctggcagtttaaacatattacagcgtggatggatgtgtacttggtgccgacgtcatagtagatggtgccaatgcagacggtcacgaggagatagatgaggagcctcagccagtaatacccgaagtcccttgacatgttgatgaaggagcgcttggtcagtgtgcctgcctgcatcaagaagctagcctggcttcctcctgaatccagcacagttcctttctgcaacgaataacatgggtgtgttagtgttcatcctgttattgcctgtcctggatgcagtcttaactatacgtgggggcgcaagaaaaaaaaaacagagaggaaaaagagtgatatcaatacgcgctgctgtattagggtcgccaagaacacgtaccagtcgtgagatgtcattaactctctcccttgcagcgtagtagtactgggacctgctgtaggatgcaaccaactttctgatggcttcagatgtggtcatcctgtccagaggatcgtccgacctctcgatcttcaatgagaatgcccaaaaattagatc

SEQ ID NO: 25718 - DNA, 2072 bp, Oryza sativa
  ref <308>: DATABASE ACCESSION NUMBER: AK101160
  ref <309>: DATABASE ENTRY DATE: 2002-08-28
gaggcgtggctcaaaattcttcgcctcccagggaaaaaagaacaaggaaaatacactcgaacttcctgttcacccagcacaaattggtgtcatccttccctcgtccttgcttgcgtcaaacgattctgcgtcagtttaccgactcacgcgagttcgttcgtgttcgtctccgtttgttgtcgtgtttcgtggaggccaggagaaaatagttcttgtagttgtatccgatcagcaaggagaaggaagaagaagaaggcttccgtttctatcgccgaaaggttgctccctttctcctcacgattcgagctgacgaggtgaaggccatggagaagagcaccacgagctgacccgaatccccctctctccagcttactgttcctcggagatgggctgcttcggccgcgtgagggatatgatcaagaagcggaaggggaagaagaggccgccgccgcacgaggggccagcgccgccgccgccgccgccgtcggcgctcgccggctcgtcccactccacctccacggtgtcgtcgtcggccgtcgcgacgagccagtcgaccgaggactcgagcgcggcggcggcgaggcccgccgccgggtggagcaggtcgtccgggtcggtctcgtcggcgcggagcatcccggagctgtacgaggagaggggcgcgagctccctgcaggagttcgggctccgggagctccaggcggcgaccagggacttcagccgcctgctcaagatcggcgagggcggcttcgggagcgtctacaagggcgtcgttcggctgcccggagggcccgccggtggcaccgaggtcgccataaaaaagctcaatcccaacagccgacagggtcacaagcaatggctgacagaagttcaatttctaggggttgttgagcacccgaatctcgtcaagctcattggatattgtgccgctcagagtgaacgaggccctcagaggttgctggtatatgagttcatgtcgaacaagaccttggatgatcatctattcaataaagcatatcccgtcctcccatgggacatcaggttgaagatagcattgggtgctgctgaggggttgttgtacctccatgagggattggaagttcaggtcatataccgtgatttcaaagcatccaatgtgctacttgatgaggaattcagaccgaaactttcagacttcggattagcaagggaagggccaactgcagataacactcatgtgtccacagcggttatggggacttatggttatgcagctccagactatgttgagacaggccatctcacaaacaagagtgatgtttggagctttggagttgtcctatatgagatcctcaccggacgccgttcaatggaaaggaatcgtcccaagaacgagcagaaactcctggaatgggtgaggcagtatcctgttgagactaagaggttcagcaggattatagatatcagactcaggcacaattactctaagcagggcactagagaaattgccaaattggccaacagctgccttgcaaaacatgcaaaagaccgcccaactatgagagaggtggtggagagcataaagcaagtgatgcagcacaacgaattggatggtgacgtcgaggcatcaggggagagctcaccacctcatgaggttcctgggaagccaaccgcagatgatgttgctgtggcggcagcaaggcggcggatgcttcacctggctgcgctaggtgaaaatgcaaacaatattgcgaggaggagattcatgctcatgagggcagctgctgctccaactccaacataaacttctgcaagagttggtgttcttgactgtattattctgatgtgcttgtaaaggtaggtccattagtcaacttttttatcactataaatactttaaaaagatccaacattttgcttactgtagatttgtaatacacaattctgtaggttcagtcaaacatcagacttacagttaatactgtgaggagttctttgtggtgtctttgtaaatacaaaatgtaattctgctttctcttttttgttacgagttctgaacttgtgaatgtagactctgaaaatgtttccgtatg

SEQ ID NO: 25719 - DNA, 2507 bp, Oryza sativa
  ref <308>: DATABASE ACCESSION NUMBER: AK101161
  ref <309>: DATABASE ENTRY DATE: 2002-08-28
gagccaccggcatcggcacccccgatcgcgaccaccccgccgccgaacgccgccgctgccgccgccgcctctctccgccaccgccccagctcgccgccccaccgtcgagcgccaccaacccgccgccaccgtgcgccacttccacgagaggaaaaaggaaaccctaatttccaaatccaccgcttcttccgacaatgtcccgaagaatcatgaatcgcgaatccttcaatcccccctccctacccaatctcgccgcctcccgctgctggccggagtcggtaattctggctaaccgggcgtacatcgccgactgcaagaaccctacaaccgcaacagcgcagtcaagagatggtcacaccgtgcaaatctctttctgcttcgccgaggcgcctgtgatctcatatttctgtgcgcactgctacaatcccagggttaaggttgagttcttcaccgagcccatcatagtggccggggaaggtgcttttgtcgtcctccgcgttcacttatcctcgccgttgctctctgaattcttcatctacagggcgggtccagggttgccatcactagagcgggttcaagatcccacaggttataattctcctatcttttacctttctttgctaggcatagcatcttgtgacaatgatgatgggggaagctgtttacttgttggttttcgcaaccgtttgacccactatgaagtttacgtctacacttccaccaccaagacttggagcacgagaaagttggatctgtctcctggaattagggctattcgacctcaaaaggtgatcaatcttgggaggggtctactaggttgggttgatctttggcatggaattttaattttcaatgcacgtgatgaacaacctcagattcagtatgtcccgttgcctgagcccatgccactcaacaaggaaagttttcgcccatccaatcgctcggaaagctgccctatgttgtttcgggatgtcatttgtagcagcagcggtgagatcaagtttgttgagttggaacaacgacagaggaaaatacaacctattcctcaagagctagaagatgtccgtcaagaatctaaagaagatgtttgtgacagggatgttttagatgattcatacctgatgtcatgtgcacacatggacgatttgcccaaagaggagacaccatcctttgttggtgatggttggagggcagtgacttggagtagattaatttcgtcaaattgctggcagaaaggttacgtgattgacagtgatgacatgcaatcaacatatgaggtgttgacatctacacaaagagacaaaggtgttgagatgttaagattcagggatctcttctcagtttttcccaccctgagcctgaatggtgctggtgatcttctttacctcaagagcactgtgaaatttaaagatttaaatggttgggtgtcttccattgacattggaaaaaagacaataaaagttctcaaaccgtattgtaatggaaggcatatcccatttgtgcagatgttccggtcttgtgtattatgccaccatctgacagtgctacctggtcctgaaaacataggtcggttcatcgaaacaagcagtaatgagaatcatccaaaaactatagcagctagcattatgcctgagtctaactgtttggctggaaacaaaaggtcaagatcagccacgagatggtctcctgcacttcgtggctggccttctgcgagagttgccaaaccagctctgagttggaggtcatgcccaccatcactttctccagtttcgtcgacttatggccttagaaacacagctggttaccatatggcacaaacatgttgctttgaaaatgatccccgtgcaactgcgaacacaaccccgaggcatcctgagaatcaattcactcagcatggatatgagcagcgggaaaatgatttcattttgtctgcacccaactttgttcgctggcataggccgccattctctgctggtggaactctgcctccacctcccccaacgcagcagccctcagcttttggtactctgcctccgccacgcccatcgcagcagttttctgcatgtggtaccatgcttccgccatcctcatcgcagccattctgtccttcggttcgatcgctcgcaatgcagacgttcgctactcctggtccaattctgcctggacctcctgttactccaatgcagtggcctgtttttatttctcctccacagcagcagctttctgcctgtgctgtatggccgcaggcaggtaccctgcagcaggaactgccaccccatatcccgttcagagctcatcagtgcccgtgatgatcctattcttaatgaagctggttgaatagacgggcatcttctcattgcaggagaaaatcttctcgtggaccttagttactttatttgttaaatccagaattcagtccgtcttgtgataactattgatatacgaacctttctacgtggaccattgctgatgtgttcttgcttatcatgagttctgtgatgttgtgt

SEQ ID NO: 25720 - DNA, 2077 bp, Oryza sativa
  ref <308>: DATABASE ACCESSION NUMBER: AK101162
  ref <309>: DATABASE ENTRY DATE: 2002-08-28
gggggaaacccatccattcccccccaatccctcgcgccgctccccttcccccactcaccaatggccgccgccgccgccgccgcgtcaacgtcgcgcctcctcctcctccgccaccaccaccacgccgccgccgacgggtcgaagcagcagcagcagctcaggtattcctccaagccgtcttctctcgctctgccccggctgcgccttttgccggcggccggggcgctgctgcccgaccgggtcaccccgttctcctacgaggaggacgacgagtccgacgaccacccgcgcgaggagtgcgggctggtcggggtcgtgggggaccccgacgcgtcgtcgctctgctacctcgggctgcagaagctgcagcaccgcggggaggagggtgccgggattgtcgccgtcgggggtgacgggaagctcaagtcggtcaccgggctcggcctcgtcgccgacgtgttcggtgaccccgcacggctggcatcgctccccgggccagccgccatcgggcacgtgaggtactccaccgccggcgccgccgcgtcgctgcggaacgtgcagccgttcctggccgggtacaggttcgggcaggtcgccgtcgcgcacaacggcaacctcgtcaactaccaggcgctgcggaacaagctggaggcgaggggctccatcttcaacacctcgtcggacacggaggtcatcctccacctcatcgcgacgtcgctgtcgcggccactgctgtcccgcatctgcgacgcgtgcgagcgcctcgcgggggcctactcgctgctgttcctgacggccgataagatgttcgccgtgcgcgacccgcacgggttccgcccgctggtgctcggccgccgccgcaacggcaccgtcgcgttcgcgtcggagacttgcgcgctggacctcatcgaggcgacctacgagcgcgaggtggagcccggggaggtggtcgtcgtcgaccgccgcgacatgtccgtctcctcagcgtgcctcgtcccgcaccgcccccgccgctcctgcgtcttcgagcacatctacttcgccctcccaaactccgtcgtcttctcgcacgccgtccacgagcgccgcaccgccttcggccgcgcgctcgcggaggagtcccccgccgcgggcgccgacgtggtcatcccggttcccgactcggggttctacgccgcgctcgggttcgcgcgcgcgtcggggctggagttccagcagggcctcatccggtggcactacagcggccgcagcttcatccagccgacgcaggcgatccgcgacctcgccgtgaagctcaagctggcacccgtccacggcgtgatccgcgggaagagcgtggtggtggtggacgactccctggtgcgcggcaccacctcgagcaagatcgtgcggctgctccgcgacgccggcgcgcgcgaggtgcacatgcggatcgcgagcccgccggtggtgggctcgtgcctgtacggcatcgacacgcccagcgagggggagctcatctccaaccggatggatctcgagggcgtccgccgcgagatcggcagcgactcgctcgccttcctctcgctcggcaagctccacagcatctacggcgccgaggcggagggctactgcgacgcctgcttctcgcgcaactaccccgtgctgcccacgctgcccgagccggtcgtagagctcgaggagtgaactggtcacactggtgagtgagtgagtgatcgagtaggtcagctctgctctgctatgctctacggcttctctgcatccgtcgtaatgttaggcaatggatcagaatttgtatggacatggaattttggtgctactactacttcagtatatttgatcagggcaatttttatccggtgttgaattactatttcgagaggggataaagggataaagctccagtgtctgtttgagggatccggctcctctgcctttgtaggcatcagaggatccaaatccctgtttgagtgtatgtttagctccagtgctttacacgttttatgctgtggtggcttgagagtcgagaacatcagatgcttgtgtgccttgagctactggcagttattatcccatc

SEQ ID NO: 25721 - DNA, 1941 bp, Oryza sativa
  ref <308>: DATABASE ACCESSION NUMBER: AK101163
  ref <309>: DATABASE ENTRY DATE: 2002-08-28
gcttctcctcccgccgcgccgcgccgccccgatacctcgcttcttctacaagcttccattcctcggtcggtgccggccgcttcgggcgcgcgtggaggtggttgctgctgctgctgctgctgggggcggcagaagctagtggcggtgggtgtgggatgcccgccgcgacgccgacccgctctcgcctcctcttccccgcgttgcggccgcggccggtggtggttaaagcggacgggggaagcctcgccgctgccggtgactgactggctgactgaccgactgcgccgccgcggtgcggtgggaccacgcgcgacgccatggacgccgcctcccgccccgccgtcgtcatcgacaacggcaccgggtacacgaagatggggttcgccgggaacgtggagccctgcttcatcacccccaccgtcgtcgccgtcaacgacaccttcgccggccagaccagggccaacaccaccaaggggaactggatggcgcagcacagcgccggcgtcatggccgatctcgacttcttcatcggggaggacgccctggcccgctcccgctccagcaacacctacaacctcagctatccaattcacaatggccaggttgagaattgggacaccatggagaggttctggcagcagtgcattttcaattacctgcggtgtgatccggaggatcactattttctgctcaccgagagccccctgactcctcccgagacccgcgagtacaccggggagatcatgtttgagactttcaatgtgcctggtctgtacatagcgtgccagccggttcttgccctcgcagcaggatacaccaccacaaagtgtgaaatgacaggtgttgtagtcgatgtgggtgatggggctacccacattgttcctgttgctgatggttatgttatatgaagcagcatcagatcaattccaattacaggcaaggatgttacccagtttattcagcaactcttaaaggaaagaggtgagcacattccaccagaagaatcttttgatgtggcaaggagagtgaaagaaatgtactgctatacatgttcagatattgtgaaggaatttaataagcatgacagagagcccaataagtacataaagcactggagtggcatcaaaccaaaaactggtgccaaatacacctgcgacattggatatgaacgcttcctagggcctgagattttcttccaccctgagatttacaacaatgacttcaccactcctttgcatgtagttattgacaagtgcatccaatcatccccaattgacacaagaagggctctttataagaatattgtcttgtccgggggatcaactatgtttaaggatttccacaggaggctgcagcgggacctaaaaaagatagtggatgcacgagtccttgcatctaatgctcgacttggtggagatgcaaaggcccaacctatagaagtaaatgtagttagccatcctattcaaagatatgctgtctggtttggtggttctgtgcttgcctctaccgctgaattctacgaggcttgccacacaaaagcagagtatgaagagtatggcgcaagcatctgccggacgaatactgttttcaaagggatgtactaaaccacggcgcaaagcttctgtagacatcaccagtggcacccccaacgcgatccagctgcactgcccagcatggtacaactgacgttggggaccgagggggatcctgcagtagcctcgctgttatgagttgtacaaatctagcaggcgcatagatagatccactctttcggtaatacattccacatgttcatcagtttttgctagcctagcagcaaaaacaatatgaccgaacggcatgggcaaaatatatgtttcatgctgctgtataatctttgttggtgacggtgtagcattacgacattgttttttttgttggtgatttggttttgatctttgt

SEQ ID NO: 25722 - DNA, 2753 bp, Oryza sativa
  ref <308>: DATABASE ACCESSION NUMBER: AK101164
  ref <309>: DATABASE ENTRY DATE: 2002-08-28
gggtctgcctcaacctcaagccaatcgcgctcacgctgggagcagaccggtcgccggtggcggtatcagggagtaacgtgttccgacgaggggcggctagccggctatactgtttcctctcgaaatctcgatccatccgtatgaagcagggagcataacgagccctgccggcggggggcgaacgacatcgagggacgcttagccgctcggagggcggtggattttgttctctggtaggtatcgtcagttcgtcactatctctgaagcggtgatactgtgtacgaatagattgtgttcgatcagcatgtcaacgtggtcgggtgctgcatcaatgcctctccgttcagcagcgggagtgttcagtgctgccgacaacagattgaaggagattgataccttggtaggggagatccagatggattttcggagcttacatacgcctaactgtgtgttcaatggggaagaaatagaggatgacgacgatgtcgttgatccagaatacctcgagattatgacactcgccgggcagatcagatgtggagttcgggaacttcagactgctctagaccgtaagcgtatctacgatagcagctacggtgatgaggacagatcaatggaggaaactcaggggcaagcatgttggttcccttctgcctcgcagctggagcttgtcattcactcactagatgctcagttgaggcactgcctcctctgccttgcaatgttcccggctgatgagctcatcaagaagaagatgctcatccactactggattggcgaggggatcgtccagtccgttactgctgggaaggactgctttacggatctcctctccagaggcctgatacagcctgcttgccagcgacaacactgcagcaaggtgcactactgcaagattccccccattgttagcaactttcttgttaagacggcacatcgcatggggttctatcagtttgatggtgaaggcaaacctatggaggattttgacagcgagaggtcccgccgtgcatgtctctgggaaaggcagatcggtggaagaggcgatgatgtcaatgaactctatgggccgtctagctgcaaggatctgctcacactttacaacttcaaccggcagtatgtcaacatggataagacttggttgtctaaacaagcagagatgagcactctccagctcgggcagtggaagccgtcatggagacaccgcattgaaattgtgagccccgagaccctggaggcggcaaccatgtgcgagagcctaaagtacctcagcctccgaggcatctctctcattgagtatatcccagactctatcggcaatctccagaatctcgtggtgatggacctcagtgcgtgccacaacttggagaagttgtcagattctatcggctcacttcgcaagctgcagtttttggatgtttcggagtgctatctcctggatgaaatgcctgaagggataggaagcctggaggaactccaggttctgaagggttttcttgtgggtggcgccaccagcaaaagtaacccatgtcgtctagcagatctagctagcttgcccaagctgaggaagctgagcattagcactgggcggcgagcattagtggtacaggaagatgagctgaacaaattgcaagggtgcacagcccttgagtccttgactataacatggggagcagcagcagctgcacaagggccgaagcgtcaactgatatctggtgttgaaggaagcatcaaaggaacctccatgggatcagagctgttgcttcctccaagacttgagaagctggacctgcggcgcacccccatggagaacttgatgcatttgcttcatccaggaaatgctgagaacttgaagagactgtatattcgaggagggaagctgaagagctttggtgatgtggaaggttggaatgtcgagacgcttcgtgtgaggttcctgaaagtcttggagtgtgattgggagcgactcagagcttcatttggcaagctacgttttctggagatgcgtgaatgtcccaatctaacttcatgggaatgcgacggcgaaggtgtttggagggaggacgatgacaatggtaccacgcatgtaggttgcttcgacaaatagctagctagattataggcagataatggaggacgaagcaattcggtgctgttcgacatgtgccggcgctcggctggcagagcagctgcagtagcttgaatggcggaagcggtggcggctggtcggggtgtggggtgttgatgctgtgctacgccgccggcaagtgcaggggcaacttccacgccaagcagctgagccagcgcggcgagctgctcaccgtggtgtggctgctcgtggcgcacttcggcatgggtaaccagtacagagttgaggccggccacgcccgcgccaagctcatcaccgagaactagcctcctattgccgccggcacataacagctgagcatttcagaattcagatcagttcagactaagtttttaaaaaatctcttttgttactgaagttaaaaagctttaggttttgacttgactattgaagatttataactgtttaacactcttgcggagataaatccgcgtcaatatgtaaagatagctttcttagtgcctttcataatagtgatcaagctactttctgtaatacagttttcagtatgtgcaagctgttttctgtggtgcaatttcctctgttactgttagtccaagtccatatcagcaaaatgaataacaaagaagcagatgttagcatc

SEQ ID NO: 25723 - DNA, 2721 bp, Oryza sativa
  ref <308>: DATABASE ACCESSION NUMBER: AK101165
  ref <309>: DATABASE ENTRY DATE: 2002-08-28
tattaggctttggattttcctctcgtgttctttagtctcagcctattagaggtttgaggaaagttttccatttcttagctctttttgcttccagcttcttgggattgctctgtttcttgctgagaattggctcgatttgggaggcctcatcttgtgttagctttcaggttttcttgcctgaaattgaaccgattgggtaggtttttaggtgcttcagtttcagttgctagctcgtcaggcttgttcttgggctcctgccttgaattggggtcaaattgggatgcttctgggtgctttgaggatggaggagaggaagggattgatggggagggagagggatcaattccccgtcggcatgcgggtcctcgccgtcgacgatgacccggtgtgcctcaaggttcttgagaccctcctccggcgctgccaataccatgtaacatcaaccaaccaggctattactgcgttgaagctgctcagggagaacagggacatgtttgatcttgtcatcagtgatgtccacatgcccgacatggacggatttaagctccttgagcttgtggggcttgaaatggatctcccagtcatcatgttatcagtaaatggagagacaaagactgtgatgaaggggataactcatggtgcctgtgactatcttctaaaaccggtccgaatcgaagaactaaggaacatatggcagcatgttgttaggaggaagttcggtaatcgtgagcgaaacaatcttgatttctccaaagaatgcaataagccgcaaagcgcggatactgatcatggaccataccaacctacctgtggttcttctgatcaaaatgggaggtccagcaggaaaaggaaagaactacacggcgaggacgacgatgaaggcgatgataatgattatcaagaaaatgatgagccctcagctgcaaagaagcccagagttgtatggtcagttgagctgcaccgaaaatttgttgccgctgtcaaccagcttggaattgacaaagctgtaccaaaaagaattcttgagcttatgaatgtggagaaactcaccagggaaaatgttgcaagtcatctacagaagtacaggctttacctcaagagactaggtgctgtagcatcacaacaagccagcattgttgctgcctttggaggcagagatccctccttcttgcatattggagcatttgaaggactccagagctatcaaccttttgcaccttctgctgctcttccatctttcaatccacatggcctgctaacccgaactagcgccgccgcggctttcggacttcaggagcttgctgccccctccagcacaattcagacttctacaggaaatgtcacagttggccattgcttggaagaaaaccagcaggcaaatctagcacaaggcttgaccgcggcgatcgggcaacctcagcttcaacagaactggattcatcaagaaggtaatggtctgtctgatgttttttctgggagttctctgaccaacactttgtccagcacactccaaagagttccaagcagttcattgccaccacaagaactcttggagtgcaaacaagccaaagttagcatgccgccatcgatacggataccgccttctagttcagcacttcttgagaggactcttggggtttccaccaatttgggagattctagtatatcccagcagggtgctcttccaatagatggtggattttctgctgacaggttaccattgcacagttcatttgatggcgctgttgcaacaaagctagatactagtttggcagcttcacagagagagattggccagcaggggaaattttcagttagcatgcttgtctccccttctgacaatcttgcattagccaaaaatgccaaaactggagctagttcttctggcagtactataattctccctcttgatactgcaagacattcagactacttgcagttcggaggtgcaagcaattctttgcagaaaatggatggacagaaacaagatcatatacagagctcaaacattatatggagttcaatgccaagcactcaactgccaagtgatacccaaattcataatactcaaaaccaaagattggacagcggaagttttaaccataatattggtgcccatttggctgaccaaacaaatgcaagtgcgtcaatacttccgcaaatgaagtttgacacaagaatatcagaagagaaaatgaagcagaagaatacatatgacttgggtagttcaaagctgcagggtggatttaattctagtggctgcaattttgatggccttctcaattccataatcaaagtggagaaggatgatctccaattcatggacaatgaattgggctgtgacctttttccacttggtgcctgcatatgaatccatcatttcggacaccaaagattttgcataatctaaaagagtcagctgtgctgcctgatctgtgctacttcatccaggctttgtgtatactaggatctagggacagtagtggcttgtaatcttgctttatctcttctctagggttggctatggaagtatggttagatcaagataagaagaaaatataatgctgtaatgtcagcgccttttctagtcaaaatctgtgtttgtttctaaccaagcaaccacatctagtgtttgctgcaccttctcagactgaaaaaatatggaaactcaccatggcatagataaatcaaaagggaagtctttaaccatccaagtttgct

SEQ ID NO: 25724 - DNA, 3081 bp, Oryza sativa
  ref <308>: DATABASE ACCESSION NUMBER: AK101166
  ref <309>: DATABASE ENTRY DATE: 2002-08-28
ggtggatcttgtcgaccatcgttatccaccaccaccaccaccacgccgctcgctgccttcgtccccagccaccgccgctgcctccctctatccccacccgaactgctcactgcttccatccgcgccccatagctccggaagggcgcaaggaagacagtgaggtagatgaggtcggcgacgctgctgtccgattcctcctgctttctcagatctagcggcgccgagctcggggacgcctgatccggcagcccgcccgctgtagccgctaaagaagaggaatttgcatccgtagcgtgatcttcaaaggctgccaagatggtgaagttcacggttgaagagctgcgcaggattatggacaagaagaataacattcgtaacatgtctgtcattgctcatgtcgaccatggcaagtccacgcttacagattcccttgtggcagctgctgggattattgcccaggaagttgctggtgatgttcgcatgactgatacccgtgcagatgaagctgagcgtggtattacaatcaagtccactggcatctctcttttctacgagatgagtgatgaatcactcaagttatacaagggcgagagagacggaaatgagtacctgatcaaccttattgattcacctgggcacgttgatttttcttcggaggtcactgctgctcttcgtattactgatggtgctttggtggttgttgactgtattgagggtgtctgtgtgcaaactgaaactgtgctccgccaagctcttggtgagaggattaggcctgtccttactgtgaacaagatggacaggtgcttccttgagcttcaagtcgaaggtgaggaggcgtatcagaccttttcccgtgtcattgagaatgccaatgtcattatggcaacatatgaagacacgctccttggtgatgtccaagtttaccctgagaagggaactgttgctttctctgctggtttgcatggctgggctttcacactctcaagctttgctaagatgtatgcttccaagtttggagttgatgaatctaagatgatggagaggctttggggtgagaacttctttgacccggccacaaagaagtggaccaacaagagcactggctcagctacctgcaaaagaggtttcgttcagttctgttatgagccaatcaagcaaatcatcaacacttgcatgaatgaccagaaggacaagttgtggcctatgctgcagaagcttggtgtggtcatgaaggctgatgagaaggatcttatgggcaaggctctcatgaagcgtgttatgcaaacttggctgccagccagtaatgcacttcttgagatgatgatataccaccttccatctccttcgaaggcccagaagtaccgtgtggagaatctgtacgagggtcctcttgatgatgtctatgcaactgctatcaggaactgtgatccggaaggtcctctcatgctgtatgtttccaagatgattccagcatcagacaaaggtagattctttgcctttggccgtgtcttctctgggagggttgcaactggcatgaaggtgcgtattatgggtcccaactatgtccctggccagaagaaggatctgtatgtgaagagtgtccagcgtactgttatctggatgggaaagaaacaagagtctgttgaggatgttccttgtggtaacactgtcgctatggtcggtctggatcagttcatcacaaagaatgccaccctaacaaatgagaaggaagctgatgcctgcccaatcagagcaatgaagttctcagtgtccccagttgtgcgtgttgctgttcagtgcaaggttgcatctgatcttcccaagcttgttgaaggtttaaagcgtctggcaaagtctgatcctatggtcctctgtaccattgaggagtccggtgagcatatcattgctggagctggagagcttcaccttgaaatctgcttgaaggatctacaggaagacttcatgggtggtgctgagattattgtttcccctcctgttgtctccttccgtgagactgttcttgagaagtcctgccgtacagttatgagcaaatccccaaacaagcacaaccgtctttacatggaagctcgccccttggaggagggactggccgaggccatcgacgatggacgtattggcccacgtgacgatcccaaggtgcggtccaagatcctgtctgaggagtttgggtgggacaaggacctcgccaagaagatttggtgctttggacctgagaccactggccccaacatggtggtcgacatgtgtaagggagttcagtatcttaatgaaatcaaggactctgttgtggctgggttccagtgggcatcaaaagaaggtgcattggctgaggagaacatgcgcggcatctgcttcgaggtatgtgatgtggttctccacgctgatgctattcacaggggcggtggccaggtcattccgacagcgaggagggtcatctatgcttctcagctcaccgcgaagccaaggctgctggagccagtctacctggtggagatccaggcccctgagaatgcccttggcggtatctatggcgttctgaaccagaagagaggccatgtgttcgaggagatgcagaggcccggtaccccgctgtacaacatcaaggcttacctccccgtcatcgagtcgtttgggttctcgagccagctccgtgccgcaacatcgggccaggccttccctcagtgtgtctttgatcactgggacatgatgacttctgatcctctggaggtgagctcgcaggcgaaccagctggtgctggacatccgcaagaggaagggtctcaaggagcagatgacccctctctcggatttcgaggacaagctctaagaaaaaacccttttggtctcgcatatgtttttgccattaatttacctgttctaatagctgttctactattgttaaagagttataagacaagtcagaaatatgatgtgtttgttacacatcaagtatcggtgttggtagtgttgtgctgtggaactatatattttgctgtctggtgatatgcaacagatatggaactttgatagtgtatctgttgatagtttttacggttttccg

SEQ ID NO: 25725 - DNA, 3363 bp, Oryza sativa
  ref <308>: DATABASE ACCESSION NUMBER: AK101167
  ref <309>: DATABASE ENTRY DATE: 2002-08-28
gacctcctcctcctcctcctcttcttcctccccatctctctcctctccctcttcctctctcctttccgtgtgcgccattgcaacccagagaggcagaccacgcacactgcacttggacacgaagacgagagcggtttccggtctcttccccccaaccaccattccctcctcttcccgtctccggctcgccggagcgcgagagctgctgctgcggcggcgtgggcccgatcaccggccggcctcctgctccgccgccgcggctgcaatggcgcgctagctagatccgacccatccggcgcggtttaatacctcggtgtatctctccggtcaccgccggcggcggcgacggcggaggcggcggttgcgggctcgccggcggcgaagcaagcggtgcagtgttgagagatgagaggggttcaagataggaagcagaagaagaagcaggacctgcaggttctcgggcccttccctggatgcttgggtaggatgataaacatgtttgacctcagcaatggcgtggtcgcgaccaagatgctcacagagaaagcgcatagagatgtttctccagcaggtaaagaccgtggtaatgctttcaagatggcaattggtccattctcatcacagatagaagataaaaagagagatagtcagcctagaaagcagtccccaactaaaagattgagctcaccaactaaaagatctggtgaggctcctgttaaattgctcatggagcaggacatgtggaaagaagggatgtctggcgaggagccactgaatgttgttgccagattgatgggtctaaatgatgctgccggccaccaatctgatctgaaatcgggaaaaagatcagacaaggaatatcgatctggtggttttgatgagaacagtcggaatctcagaccaaagaaggacagcaaaggccacccaaaccaaaaggcaggaacacacagtgaaccatgcagtggtttcagtgatcaaactttaagaatgaatagcagcaggaataaacaccaagggaaggagccttcttgtgagaagagaatgacccttgtgcgtgaaaaatttgctgaagcaaaacgtctggctacagatgagaagcttctccacacaaaggagttccaagaagcattgcagtttttaagctcaaataaagatctgttcttgaaattccttgatgagccaaatccactgttatcacacaacaattatgagttccaacctgataccccaccttcggagacaaagcaaataaccatactgaagccatcagactcaatcaagagaaatggcaacactcttgtagggaggcagctctattcagacggagatgaaagtgaagggaacaggtgcaggcgtcatcagagtttaagtgtttccccaacaaattcaacattgtctgaaccaacaagaattgtagtactaaagccaggacttgtaaagtcccaggaacccaagattctgaggtccccttcatcatcatcaactgcagctgatagtgaagatgatagtatgtcggcagttgatgagacagtgccaagctcaagaagactggccaaagagatcacttggcagatgaggatgcgtttgaaagacaagcaggatgaagaaaacctactctcttatgagttccatgatatttatattggagatgactccttcagcaagtcagaagttgagaatgcaaaagaagtgtctggtgaaataagtgaggatttggagttcggtactcctacttctggccgttcctgggatttcctgagcaggagtggcagcccttactctgcatcatgctctagtcagacatcccatcggcgtgaaccatcagtggtcagagaagccaaaaaaaggatttttgagagattgtcaattgtatcatccaccgtcggtggtgaggaagaaagggaagcacgcagaagtatgggcacactaggtgagatgcttaccattccagaagtcaagaaagaccaagaagtgtttgggggagtcacattggagaacccatcacctgagatggattccgaagaaccgttcttgtgtttgccacggtctcgatctgttccgatttctttgtcttttggaggcactgagctaaatggagtagcgaccggttgtcaggaagccgagaaggaaaagaacaggaagtcattatcatttagggaaaaggtttccagtctgttctctaaaaataggaaagtggctcgggggaagctagatccatctggaattccatcaactgatgatagactcaagcatggaaattctgctactgttaatgatttcagcgaaaacgctgatcattctgcactggacaatccgcttaactgtactatacagaatgtcgatgatatttctatgccaaggctcatggctagttcttggcacatgaatgatatggaaaacatgcctgccaaggatatttcttccatcccggttattggtgccccaggaatctttggtgagtcacaggaccaaccaagtcctgtgtctgtactagatggaccatttctctccgataacagcaggagcttgctgtgctcatctgaaagtttcatcaccgcatccccacaagctttgtcgagatctccacttatcggatcattttcacgctcactttcatgggaagatcccccactggaagtcatgtcgccaaattccttgagactatcaaggcttttctctaaggctgacgaagatcaagactcattgacatttatccagaagttagtctgctctgctggcatagatagagaaggttgcatgttatccggtcctttggaactgtatttgcttgagaagttctcagattaccaagaagagggaaccaaattacgggaaaggcggtcgaaagagaagtttctattcgatgctgtcaatgaggcactcacagagctcacttggactgcagaactgatggcgtatccattgggaaggtcatcttctttggaacgcaaagattgtgagaatgctttcagtaactcggcagctgatgaaatttggcgagtcataaggaactggtcgattcttgacaagtatccacccggagaaactattgaaagaaacctcctggtggaaatgatactgaagagagaggtgttggaggcggccagcagcgacacgacacgattggagacattcgagctcaccagtatggtctgtacaatggtcttggaggacctgattgcagatgcagttgtagatctgagtgcctgactaacaactagcgaggtacctccacttttctaaccactaattttgcttatgcctcctaacattgctgtttcacgcgatacttgctgctgtaacactgcttcattcattcacatcaccacagaaatgcatgtgatgccaaatgtgccttttgcc

SEQ ID NO: 25726 - DNA, 1820 bp, Oryza sativa
  ref <308>: DATABASE ACCESSION NUMBER: AK101168
  ref <309>: DATABASE ENTRY DATE: 2002-08-28
ggcgataaacctcgccgacggcgcggagagaaatctgactctccaacctcccgtccttggtccttacacgcaattataggggcgtgggtcccacgtctcagtgagagagagagaagctttttttttctacatctgagacgttcgccggagatggcgtcggagctcacgtaccgcggcggcgcgggggccccgggctccgcctccgacggcggggagtactcccccaagccctccaagccgctctcctggctcacccgcgccgcccgctacgccgccgccgagcaccgccccgccttcgccctcgccgggatgctcctcgccgccgccctcttctccctctacgccccttcctccgacgcctcatcctccgccgccaccaccaccaccaccaccttcagccacctctcctcgctcccgtcgtcgtcggcggcgtcgctgcacgagtccgccggggggaaggtgccgctgggcctccgccgccgcgcgctgcgggtgctcgtcacgggcggcgccgggttcgtcgggagccacctcgtggaccgcctggtggagcgcggcgacagcgtgatcgtcgtcgacaacttcttcacggggcgcaaggacaacgtggcgcaccacctcgccaacccgcgattcgaggtgatccgccacgacgtcgtcgagcccatcctgctcgaggtcgaccagatctaccacctcgcctgccccgctagccccgtgcactacaagtacaaccccatcaagaccatcaagaccaacgtggttgggacactgaacatgcttggattggccaagaggattggggcaaaatttctcctcaccagcaccagtgaggtatatggagatcccctccagcaccctcaggtggagacttactggggcaatgtcaaccccattggtgttagaagctgctatgatgagggcaagcgcacagctgaaacgttgaccatggattaccaccgtggtgccaaccttgaggtgaggattgctcggatttttaacacatatggtcctcgcatgtgcattgatgatggccgtgttgtcagcaactttgttgctcaggcactgaggaaggaacctttgactgtctatggtgatggcaagcagactaggagctttcaatatgtctctgatttggtggaagggttgatgagcttgatggaaggggagcacataggaccatttaacctgggtaatccgggtgagttcaccatgctggagctggctaaggttgtccaggacaccattgatccgaatgctcgcattgagttccgtccgaacactgcggatgatccacacaagcgcaagcctgacatcacccgtgcgaaagagctcctgggctgggagcccaaggttcccctgcgtgagggccttcccctcatggttaccgacttccgcaaacgcatctttggcgaccaggaagcctaatctgcagcagctggtggcatgtattaaatttcaacatgacaacggcacacaactcattaaaatcctataacttgtactttatagtaactacatgtggagaagttaaatcgggtagaaatacttggaaaggaaattggtgccttggttctttggttgcttcatacctgacggacaaaatggccatggctgaatacatagctagttctttggacacatggggatgctactaatactatcaatctatcataggcactactgtaagctactgtcttttttggtcttgctcatagaagccatatggtgttatacatgtaatctttattggaaactcgatatatgtttcagtatgaacagaacattccacttgcttacatgaagcatctttttaaact

SEQ ID NO: 25727 - DNA, 2095 bp, Oryza sativa
  ref <308>: DATABASE ACCESSION NUMBER: AK101169
  ref <309>: DATABASE ENTRY DATE: 2002-08-28
ggcccatttgtccgaagagctcctccggcgagtccccaacaaccagtgctcgccgccgatgaggaagtgcaccggcgtgctgctcatcctgaccctcgccgtcctcctcctcctcctctccccgtcaccctccaccgcgcctccgcccgccgccaccgccgccggcggcccagcggcccgcctcctccccaccctcccgggcctctcccgcctctaccctcccccggccaactccaccgcccaccactcctggcgcctcctccgccccctcctcctccgctccgacgcgctcccgggcaccgccgctggagtcctcgaggccgccgacgcatggcgcaacctcaccctcgccgtcgcggcatcggcggccggcggcaaggacgggcggcgccagggagacctcgatgtgagctgccggtcgtccgtggaaggggatctgggcggcgtgggcgcccggggcgtcaagatcccgtgcgggctcgcggagggctccgcggtgacggtggtcggggtgcccaagcccggggcggcctggttccgggtggagatggtggggggcggcggcgaggtggtggtctccgtcaatgtgagcttgggagtcgccgagatggtggtggagcagagctcctggacgcgcgaggaggggtggggattgtcggagcggtgtcctccggttggtgatgccgatcgcaatagcagctcactgcttagtctagtggatgggcttgttcgttgcaatcagcaagcgggtgtcagtggccttcaggggaggaacaatacaatggcaaatgttactgcaaacgagcatgaaaatgagaaaaggccaaaaggacgtgcaaattttggtggtagtttttctattattgaaggggagccttttacagcaacattatgggctggtgcagaagggttccatatgacagtaaatggaaggcatgatacgtcatttgcatacagagagaggctggagccatggtctgtagcagaagttaaggtttctggtgatctggagctcctgtcagtcttggctaatggattgccagtttcagaagaggtggacatggctagtgttgagcttatgaaggccccacctctttcaaagaagcgaatttttctgctgattggtgttttctcgactggaaacaacttcaagcgtcggatggctttgaggcgaacatggatgcaatatgaggctgtccgtttaggagaagtagccgtacggttttttactggtcttcataagaatgagcaagttaatatggaaatactgaaagaagctcagatgtatggtgatatccaatttatgccgtttgttgactattataccttgattacactgaagaccattgccatttgcatgtttgggaccaaagttgttcctgcaaagtacatcatgaaaacagatgatgatgcttttgttaggattgatgaagtcatctcaagcctgaagaagagtgaccctcatggacttctgtatggtcttatttctttccagtcttcaccacatagaaacaaggatagcaaatggttcatcagtccaaaggaatggcctgttgaagcatatccaccatgggctcatggccctggatatatagtctcaagggacattgcaaagtttattgttcatggtcatcaagaacgaactcttcagttattcaaacttgaagatgtggcaatgggtatctggatacaacagtacaaaaacagtggccagaaagtaaattatgtgaatgatgaccgcttctatagcgaaggatgtgactccgattatgtgcttgcccactatcagagcccgaggcttatgatgtgtttgtgggagaagcttcaaaaggagtatcagccggtatgttgtgaatagtttctgcatcagcgccaacaatagcgacaggtagtgaagtctcaagttgtggtaggctagttttcttgttgttgtacaatgtattgccacgattgttttgttcgatggcaagtttgttgggggtcaataggtttggttttgtagaggaaaatattgatccatgtatacgaaattacgagctggaagacaaaaaaatgttttacaatggatctccaactgttctggatgattccattc

SEQ ID NO: 25728 - DNA, 2078 bp, Oryza sativa
  ref <308>: DATABASE ACCESSION NUMBER: AK101170
  ref <309>: DATABASE ENTRY DATE: 2002-08-28
gtccgtttttcttccctctccatattacagtgacaaccaagcaggcgtgccaaatccactggacacggccaagtcggctaccattcctgcgcctacatataccgcggcatctcccgcgccattgctgtgcccagagagctcgacacaaatacagggggactcgtcttcttccccgagctttgcgagcagagtcgttcagccatggcgcggcaggagcagcagcagcacctgcaggtgctgagcacgctggacgcggcgaagacgcagtggtaccacttcacggcgatcgtcgtcgccggcatgggcttcttcaccgacgcctacgacctcttctgcatctccctcgtcaccaagctgctcggccgcatctactacaccgacctcgccaaggagaaccccggcagcctgccgcccaacgtcgccgcggcggtgaacggagtcgcgttctgcggcacgctggcggggcagctcttcttcgggtggctcggcgacaagctcggccggaagagcgtgtacgggatgacgctgctgatgatggtcatctgctccatcgcgtcggggctctcgttctcgcacacgcccaccagcgtcatggcgacgctctgcttcttccggttctggctcggattcggcatcggcggcgactacccgctgtcggcgacgatcatgtcggagtacgccaacaagaagacccgcggcgcgttcatcgccgccgtgttcgcgatgcaggggttcggcatcctcgccggcggcatcgtcaccctcatcatctcctccgcgttccgcgccgggttcccggcgccggcgtaccaggacgaccgcgcgggctccaccgtccgccaggccgactacgtgtggcggatcatcctcatgctcggcgccatgccggcgctgctcacctactactggcggatgaagatgccggagacggcgcgctacaccgccctcgtcgccaagaacgccaagcaggccgccgccgacatgtccaaggtgctccaggtcgagatccaggaggagcaggacaagctggagcagatggtgacccggaacagcagcagcttcggcctcttctcccgccagttcgcgcgccgccacggcctccacctcgtcggcaccgccacgacatggttcctcctcgacatcgccttctacagccagaacctgttccagaaggacatcttcaccagcatcaactggatccccaaggccaagaccatgtcggcgctggaggaggtgttccgcatcgcgcgcgcccagacgctcatcgccctgtgcggcaccgtcccgggctactggttcaccgtcttcctcatcgacatcgtcggccgcttcgccatccagctgctagggtttttcatgatgaccgtgttcatgctcggcctcgccgtgccgtaccaccactggacgacgaaggggaaccacatcggcttcgtcgtcatgtacgccttcaccttcttcttcgccaacttcggccccaactccaccaccttcatcgtgccggcggagatcttcccggcgaggctgcgttccacctgccacggcatctcggcggcggcggggaaggccggcgccatcatcggatcgttcgggttcctgtacgcggcgcaggacccgcacaagcccgacgccgggtacaaacccgggatcggggtgaggaactcgctgttcgtgctcgccggatgcaacctgctcgggttcatctgcacgttcctcgtgccggagtcgaaggggaagtcgctggaggagatgtccggcgaggcggaggacgacgacgacgaggtggccgccgccggcggtggcgccgccgtgcggccgcagacggcgtagtgtatgactgcacgtgaatatagtgtaggttttacttaatttacttactgttattattattatactcctacttgtgtttgtctatgtgaaattgggaatcatgaacccatgatcatgttttgttaggttaagaaggcaaaagaaatgtgtgttaaatacttcaattatgtaaactctgtttttaagtatttggccacttgaggaataattcttgcagaccagcaatttggcacgaatacattttataattg

SEQ ID NO: 25729 - DNA, 2064 bp, Oryza sativa
  ref <308>: DATABASE ACCESSION NUMBER: AK101171
  ref <309>: DATABASE ENTRY DATE: 2002-08-28
gaaggagagagccttcccgtctcctttttttccttccatccaaaaaattccaaatggagtagtagttcacatttttacaccgtcgtcttcgcaaatttaatactactatacgaaggaggaggaagctctcgcgccgcggtcgctttccttcccctaaattaaatcccgtgcgacgcgtagagacctcctcctccgctttctcctccaaagcccaagctaatccccctcctcttcctcgtcgccggcgagagctcttcgtcttctccaactcgaccggaagcaagcgcgcttccgatccgccatggtgctctcccacggcgtgtcgggctccgatgagtccgtccactccacgttcgcctcccgctacgtccgcacctccctccccaggttccggatgccggagcagtcgatccccaaggaggcggcgtaccagatcatcaacgacgagctgatgctggacggcaacccgcggctgaacctcgcgtcgttcgtcaccacgtggatggagcccgagtgcgacaagctcatccaggcctccgtcaacaagaactacgtcgacatggacgagtaccccgtcaccaccgaactccagaaccgatgtgtgaacatgattgcacacctcttcaatgctcctctaggggactctgaaacggccgtcggagtcggcactgtcggctcgtctgaggccatcatgctcgccggtttggccttcaagaggaggtggcagaacaagatgaaggcagccggcaagccatgcgacaagcctaacattgtcaccggcgccaatgtccaagtttgctgggagaagttcgcgcgatacttcgaggttgagctcaaggaagtggagctgagtgacggctactacgtcatggacccagctaaggccgtggatatggtcgacgagaacaccatctgcgtcgcggcgatcctcgggtcgacgctgaacggggagttcgaggacgtgaagctgctcaacgatctgctcaccaagaagaacgctgaaacaggctgggacacgccgatccacgtggacgcggcgagcggcgggttcatcgcgccgttcctgtacccggagctggagtgggacttccggctgccgctggtgaagagcatcaacgtgagcgggcacaagtacggcctcgtctacgccgggatcgggtggtgcatctggaggagcaaggaggatctgcctgaggagctcatcttccacatcaactacctcggcgccgaccggcccaccttcaccctcaacttctccaagggttccagccaggtcattgcacagtattaccaactaatccgcctaggctttgaggggtacaagaacatcatggagaactgccaggagaacgcgatggtgctgaagcaggggctggagaagacggggcggttcaacatcgtgtccaaggacaacggcgtgccgctggtggccttctccctcaaggacagcgcccggcacaacgagttcgagatctccgacttcctccgccgcttcggctggatcgtgccggcctacaccatgccccccgacgcgcagcacgtcaccgtgctccgcgtcgtcatccgcgaggacttcagccgcacgctcgccgagcgcctcgtgctcgacgtcgagaaggtgctgcacgagctcgacgcgctccccgcccgcgtcgtcgccaacggcggcgacgccgccgccgcgtcggcgagcgagagggagatggagaagcagcgcgaggtgatctccctctggaagagggccgtgctgccaagaagaagaccaacggcgtctgctaaagcaagtcagctgcgcagcggggatcgtatactattattatggtccacttcgtaattgcgacttcttaatttttaccgtgtcgatcggtttaccgtctcaagtctgctctcatccgattttcggattgatgctgcttaattatgtaccaagttaattaattcttagaggacggaatagttccgactcaatacgaagcattgcctgtataagtcgaacacgggatcatgcattttacgttgggtgtgtagcagtgaattgatcagtgatgctccatctctactctg

SEQ ID NO: 25730 - DNA, 1857 bp, Oryza sativa
  ref <308>: DATABASE ACCESSION NUMBER: AK101172
  ref <309>: DATABASE ENTRY DATE: 2002-08-28
ggttagttaagctttcccctcccaattaattaagtttagctcttatcagagcgagagagagagagagagagggaagaagaagaagtggaagtggtatgtatgtgcccatgtccattgccgcagaaacaaactgtagcagcagcagcagcagctagtgaagtactacagtacagtagtgaggacttaatcaaacggggcgcgcggggtgccccctagctctcctcattccaccaccatgcccaccccgccatcgccatgcctcttcttcctcttcctcctcttcttcatgtggtcgtctcactctcaccttggcgccgcctccgacgcggacgcgctgctcgccctcaagtccgccctcgaccgctccgaccgcctcccctggcgccgcgacaccgcccccgccttgtgctcctcctggctcggcgtgcgccagtgctcccaacctccccgggacaggagggtcaccaagctcgtcctcgagaacctcaacctcaccggcgtcctcaccgccaccctcctcgccccgctctccgagctgcgcgtcctcagcctcaagtccaacgccctcaccggccccatccccgacgccctccccgccgccctccctaacctcaagctgctctacctctccgccaaccgcctccagggccgcatcccgcccaccctcgccctcctccaccgcgccaccgtcctcgtcctctcctccaacctcctccatggcgctgagggcctacttccaggccaaggaggagcgactcctcgtctacgattactaccccaatggcagcctcttctccctcctccacgggtccagcagccggacgtcgagcaaggggaagcccctgcactggacgtcgtgcatgaagatcgcggaggatgtcgccgccgggctggtgcacctgcaccagtcgccgccggctggcatcgtgcacggcaacctcaagccctccaacgtcctcctcggccccgacttcgaatcgtgcctcaccgattacggtctggtgcccacgctgctcccctcccacgccgatctcgcctcctccacgtccgtcctataccgagcgccggaaactcgcaccgcccatgccttcacgccggcgtccgacgtgtacagcttcggcgtgctcctcctggagctgctcaccgggaaggcgccgttccaggacctgatggagatgcacagcgatgacatcccgagctgggtgcgggcagtgcgtgaggaagagacggagtccggcggggagtccgcgtccgctggcggcacggaggagaagctcggtgcgctgatcagcattgcggcggcctgcgtggtggcggacccggcgaggcggccaaccacaccggaggtgctacggatggtgagggaggcaagggcggaggcaatgtcgtcgtcgaacagcagcgaccggtcaccagcgcggtggtcagacgccgtgcaggtgcagatgggcatgggggtgccgcgagatcagggagagctaggaggactcacctgatcgatcgatcagcagctgatctcatcctgatcagcagctgatcatcgcctggctggccggcttgttgttactttacttcatgtaccgtagcagcaaaaaaagtgtagttaccactcaatttgtcttggctcaaagaatgactcattcttcaggcaacactttttaaataccaggggtctttgatttgggacttgtgtaggtttttagcagggaagggtggggcattgggagatactcctagcttagataggttcagagatgaagattctctgggctggatctgtctgtaaatcttttttggattgttgtaaacttgtcctttttattttttccggagtggagctaaactggtttatgtgtc

SEQ ID NO: 25731 - DNA, 2325 bp, Oryza sativa
  ref <308>: DATABASE ACCESSION NUMBER: AK101173
  ref <309>: DATABASE ENTRY DATE: 2002-08-28
gactgctgctccgcctctgctcgtgtgagcccccagcctccattcctgcctgcctgcctgcctcctgctgctcctccccggatcgaaatcgatctctcctcttcctcctcctcctcctcttctccatctctccagattccacaagccacgcgggatatgctgctctgattgatctctctccacgtcgggtcaggtcttcacccttgagggaattgttttcattatcttatcaaaatggagaaaatgcaaaagacgcaatcaaggaaatccagctcatggtggtgggatagccatattagtccaaaaagttctaagtggctctccgataacttagaagtgatggagacacagataaaagaaacgctggagcttattgaggaaggagaaccctctgcagaaaaggctggggttcttattactcacgtacagaactttcagcagatgtatcgtgttcttgccaagcgatatggcaatgtgactggagaattgcgcaaaaatatcccatcatctctgcaatcatctgtctcctttggcatctcagaatcagattctgaggcacagtctccttcatcaccagagcgtgacttgcaagagaagatgtcacaaaagcaaaaaccgcgatcagattgctttgatgtttctattggctctggtatgagttctgacgtatccaagaaggggagtgatgggtcttcatcatcttcagaatctgatttagagcttgatgaggctaaagaagaaaatggcaatagcattttttatgccctaagtcaaaaaattattgagcttgaggatgagcttcatgaagtaaggggtaaacttgatgcttccgaggaaaagaacatgcgttgccattgtaattttggtgctaactcagaactgtctgaacatgaggaaaagcaacaggtttcagatgtggaaaccagtagccttcagaaggatcttgatgaagtcaaaagtgaaaaggaagcattggaagctgttgtattggtgaacaaagatgaaattgataggctgaaggaatcaatggtatcggcagccaagcagtttgaagttgaacttgcgcatcgtgatactgaaattgataagtgcaaacaggagcttgaggtactttcggagaagtatctgcatgatatatctgctcttgaggctgaaattggaaagctccagggagtcatcaaaacctttgaagacgactttgcaaaaatatcacaggagaaattgatgctcgaatctcgggttgaagagcttgagcagtcagttaacagctcaaattattcggtttctgagatggttaatctgcaagaactaatgaaggatacacaagcagaattagaaaaggtttcacaggagaaagaagtgctcagagaacgtgttcttgaatttgagcaacttttgggggactttgagaattcaggcatggaggttgcaaagctaccagaaaccatcaagaacttgggagcccagatagagggaacactacaggagatcagtactccaggacaggattaaggagctggagcaggctgtccatgattcattgcagaaccattcactggagaagtcctctctgagtgctgagctttcaaaattatctgaagccaatgcttctcttgaagccaagttggcatccgtggaggcagagctcaaacaagtttacgacgaaaaggctaatgaatccctcaacagcgagaaggaaatctccaggctgaatcaagaactggccaatgtcaaaaccgatctggaattgctgttatccgagaaatccctggtggacaacaaagtaaccactctactaaccgacatcacaactcgcgatgaaaagatgaagcagatggatgatcaactgaatcagcttcagcttgagcattccaagctaatggcacaggccgatcttgcccgcaagtccctgtcagaactgcatgctcgggtatgcgagctcgagaaagaggtagagatgcagaagcttgtgatctctgagagcgccgaggggaagcgcgaggcgatcaggcaactgtgcttctcactcgagcactaccgcagcggctaccaggagctgcggcagctgctgcatgaccagaagagaccactggtgatggcaacatgaaccaaagctagtgatcctgatgccatccttctcggatgctttgtggatgttttctgtcaatggcaatgcatgctttcctgtgtctctctctctctctcttctaccagtagcttgctgctgctctataacttgtgcactgttgcttctccggctactaagaattctgtgttgtgtcttgcaatgtgatgggataatcaatatcgtttcttgtgtactct

SEQ ID NO: 25732 - DNA, 2459 bp, Oryza sativa
  ref <308>: DATABASE ACCESSION NUMBER: AK101174
  ref <309>: DATABASE ENTRY DATE: 2002-08-28
gagagttgcaagacccccaaacccccgtgacctctccgccgcagccgcaacagcaatggaggcgcaggcggacgccggcggcgacgacctcgccgccatgcgggagcagtgccggagcctggaggaggccatcggcttccgccgggagacgcagatgggcctcgtcgcatcgctccagcgcctcgtccccgacctcgtcccctccctcgaccgctcgctccgcatcatcgccgccttcaacgaccgccccttcgtccccaccccgaaccccgacggcggccacggtaagagccccgccgccctcaagccccaccaccgccgcgccctccctgacccggcgcgctccacccgccgcaagacctcgcccggatcctcccctgcctccgtcgccgctgcccccggcggcctcgacgccgtgcgcaccatggtcgccgtgtgcctcctggagctcgtccccttcgccgagatcgacgccgccgcgctcgcccgccgcctgcaggcggagagctcatccgccagcgaggccgagcggactgctctcgctgacctagccgccgaactcggcggctcggcggcctccgctgtagtcctcgccctccgccgcatagccgaggacaccggcggtgtgcagatcgaggaggccatgattgggggcaagtcgatgacgatggtctgggccatcgaccggaacaagctcctcaaggagctgccagaatccgctactttgccgctactccaacctcctccagccccccagatgcccccctctgagaccgatgccggcagcgcaatgataccaagaacaccgcagcagcagcagccgcagccggatatgtggccgcattcgatgcctccgatattcccacggccaaggggcatgacgatgcaggggatgcagagggtgcccggcgtgccaccagggttgatgccgctgcagcggccattcatgggaccagctggagttatcacaatgggtgggggtgtggggcctagccctaaccagcagaagcagaagagcgaggaggacgaacttaaggatcttgagttgctgctgaacaaaaagacatatagagagaagcagaacaccaagaccggggaggaacttttagatctcattcaccggcccacggcgaaggagacggctgtggcagcgaagtttaaaacaaaaggtggttcccagctgaaggaatattgtaccaacttaactaaagaagattgccgacgccaaagtggatcttttgttgcctgtgataaggtccatttccgccgtattattgctcctcatactgatacaaacctaggagattgttcttttctcgacacttgccgtcacacaaagacctgcaagtatgtccactacgagcttgaccaaacaccagatatacctccaatgatggctggtgctcttgcacccccaaggcaaataaggctccagagagctgaatattgttcagaagtagagcttggagaagctcaatggataaactgtgacatccgaaacttcagaatggatatcttaggacagtttggagtaattatggccgatcccccttgggatattcatatagaattgccatatggcacaatggctaatgatgaaatgaggacccttaatgtccctgctttacaaactgatggattaattttcttatgggtcactggtcgtgcaatggaacttggtcgggagtgtttggagctctggggttacaaacgtgtggaggaaattatttgggtgaagaccaatcaacttcaacgtattattcgaactggacgcactggtcattggttgaatcatagtaaagagcattgccttgttggaataaaaggaaaccctttagtcaacaggaacattgacactgatgttattgttgctgaagtccgtgaaacaagcagaagacctgatgagatgtaccccatgctagaaagaataagcccaaggacaaggaagctggaactgtttgcaagaatgcataatgcacatgctggatggctttctctgggtaaccagttaaatggagtaaggcttgttgatgaagggttgagagcacggtacaaggctgcctatcctgattcagaggtgcagccaccatcaccgcccagagcaagcgcccctatagatggtgatcaaggcacatcacagaaacctactgtatcagacggcgagaggcctgcctgatgtgaagcagtcggcaccttactttgaggactatgacattgaggaatcatcgtgcaagaatacaaacactttggacgacataagtattttatcactcgtcagctttaactccggttgtaaaattagttaagtcggtttacttagaagttactccagttgtaaaattagtaagtcgattgtttttggtcgcttgaggaatgcaggaggagggaagaattgttgggttttgtaatgttggcagacatccatcttgataatggaacgcgtgagccattactgatcc

SEQ ID NO: 25733 - DNA, 2290 bp, Oryza sativa
  ref <308>: DATABASE ACCESSION NUMBER: AK101175
  ref <309>: DATABASE ENTRY DATE: 2002-08-28
gatgagtacactgacatgcctccaagcttgactgctttggtactctatggatcccggggcacaggcgcacagcataacatcaattcagatttctgatgtgtgaactgtgatccctgcttgctttgttcgtgcacacgacttcgatgcagctcaacttcgtgcacacgacttcgatgcagctctgctacaacttgggaagatgacaaggctgtatttagttggcgcccaagtcaaatgtcctggcaagcgaaagtcgtgagattttaaagaatcgaagtgcagtttagcagactgctactttcccctacctcaagagttctccacatctccagttcttcagaagtttgagcctgtttggaggaattgagctgcttttcgcccgattgacttgtcctgtacatctgtgaggctgaagaagaaatacctgtttgttcagagtttcagttaaacagagaaaaatggttcagaattttcctgaagacgacatggcaggcacaccttactctgatcaaacctcaccaattttgactgaatatcatatcacagttcctgctcttcatgatggatcaatgcaaggatctgttcatcacgagaggagactcctggattgcctcagagccactccctcggtggagtggctaaagaatatcaacctctgttctccactgacgaatttccggctgccatctaccggcgtccgccggtacctccatgtcgaggttcacttcgtcagaagaatcaactggagctcggtgttcagcttctgcaagaactggctcaagcaccctctgaacattgctctcctggcatggctgctctgcgtcgctgcagctggtggcatgttgatcctgctcctgctaggattgctgaacagggccttcccttccaagccattgaggcatcactggatagagatcgacaaccagatccttaacgcgctcttcacgctcatgagcatataccagcatcccagcctgatccaccacctcgttcttctctgccgatggcggccggaggacgccgcggagctccggaaggtgtactgcaagaatggcgaccgccgtcccggcgaacgggcgcacatgtccgtcgtggtggctctcctccatgtcacttgcatttctcagtacgtggtttgcaacctctactgggcttaccgcagcagatcgcgatccgaattcgccgacaatttcttcttcgtcctcggcgtcgtcgcgcccgtcgtcgccggagcgtacacggtgtacagccctctaggcagggacacagacgacgatgcctccggcgaggaagccaagcagcagcagcagcacatgatcgaagccgagctgcccggaacgagaacggtggtcgtcgaccccgtgtgggcgggcggcctcctcgactgcggcgaggaccccgcggcgtgctgcctctcgtcgctgtgcaccttctgcgtgttcggctggaacatggagcggctcgggttcggcaacatgtacgtccacaccgccatgttcctgctgctctgcgtcgcgcccttctgggtattcaacatcacggcgctccacatccacgactacgacctgagcgacgccgtgggcgccgcggggatcgcgctgtgcttcctcggcctgctgtacggcgggttctggagggtccagatgcggaagaggttcgcgctgccggggagccggtggtgctgcggctcggcgtcgctgacggactacgcgcggtggctcttctgctggccgtgcgcgctcgcgcaggaggtgcgcacggggaacctgtacgacgtcgaggacggcggcggcgtcttctacgagaaggcgatggacggcggcgatgtggagggcggcgcggcatcgacggctgcgacgggagtagtgccggtatcggtgggtggaggagagggggatggcgttgtcggtgacataaaactcggtatggacggtgagatgatcccacccgcgcaggcagtgatggagaccagtggcgatacgcaaggcagtggtgcagacgttgcggcaaatggtgacaacgagctcagtagctaaacccaagggtgattatctgattgatgttatggtgtgcagaagctgcgggggaatcaatcttgttttttggggattggcaccatctttccagcattgtgctcttgctttgtcatgttctgctcagctactgttttcgtgtggcaaggtttagggcaggtaccatagcagaatataaaccaactataaatatattttaaagagataaaagaggaaataaaagagcagcaggctacagatctgtagccagttacagc

SEQ ID NO: 25734 - DNA, 3762 bp, Oryza sativa
  ref <308>: DATABASE ACCESSION NUMBER: AK101176
  ref <309>: DATABASE ENTRY DATE: 2002-08-28
ggagcggttcatcgccgcggcacaaaatgctccgccgcagccgccacttcctcccacccagaccccgccgccggccgagacctcgccgcgaggcccccgccgccgagccgcccaccccgacctacacccgcgacgtcgtccgccgcgtcgacgccatcctccgcggccacccctggtcggcggcgcggccgctcctcctctccctcccgggcctcgcctgggactcccacaccgtcgcgcgcgtcctcaaggcgcacccgcctctccacaaggccttcctcttcttccgcctcgccgccggcgcaggcggcgggttccgccacgaccgcttcacctacacctccatgctccacctcctcggcgaggccggccgcgtgccggccatgatgcgcctcctcgccgagatgctccgcgcgggggtggaccccgacgccgccaccttcaccacggtcatgcactggctggcgcacgccggggacgtcgacgccgcgatgcgggtgtgggaggagatgcgcgcgcggaaggggaagtgtcggcccaccctcgtgagctacacggcgtgcgtgaagatcctgttcgacgccgggaggcctgcggaggccagggaggtgttccaggagatggtggccgagggactgcggcccagctgcaagacgtacacggtgctcatcgagcatctcgcgaacgtagggaaatttgaagctactatggaaattatggacaagatgcaagaagctggtgtagaaccagataaagcactctgtaatattctagttcagaaatgctccagggctggtgagacatcagtgatgacccgaattcttcaatacatgaaggaaaatttcatcgtgcttcgccgacctatatttttggaagcacttgaagctctaaaagctaatggtgagagtgacaatcttcttcgggaagtgaatccgcatcttgcatttgaaggcatcgaatgtgacccagcatttactgatctaggctacattactgtcaggagtacgatcctgtaccttttggcttctagaaactggtccgccgtagaacacatgataaatgaaatgacccccaagaatatcaaggttgaatcacatatcctctctgacattattcaagcaagctgtgcaaactgcagaccatcatgtgggcttgcagttctgcgttacagtctaagaataggcaatgaacttgatagatctgcatatggcagccttcttggtcattacatcagaaatggttcattcgatttggtgtttgagatcgttgaaatattgattaaatctggctgcaatcttgggacatatctatcatctatattaataataaaactggcttgtgctgggcattcttcaaccgcagtgcgcatttttggattattgactacagacaagaatgttgttacgtacactgcccttatgagtgcctattttcaagatgggaaagttgataaggctctccaactattcttgcaaatgagtgctaatggagtatctgcatgcccaggtacatatgaagtactgatacatggattacaaatggctgggcggaaacaggaatctgaacattaccgaagagagagaatggagatgcaatggcatcttcagtatcgcaatgagcattcccctgaagatagcttatgtaaccatctgttttgtgattttcatggttagaagatggtccaaaatcttcatctttcattagctgaatccttccagcacctattgctgcctgaacatgatgatattgacacacagtaactcataatgaggtctggaccgttcattcggtacacaaaatcaagtactggctacatactatccaccagtttttgtgcttttgagagcatattattgatgaattactgcattgtagatgaatatgtcaagatgtcattaaattatggagtccatctaggatcaccattatgtaacacaaatgctctttctgagcatcttcacgagcatgactgcacaagctgctacacgggctgttcacttttccatttcaatgtattgctgttgtcattcatcagtagacaacttctaaaggtgcacatggtgaagactagtgctgccacttttatcaaacctttactcagcagcccctatacaaactctctattgctcttggctgctattgcaaaaaggtttcacgaaacttgaactggggcagggtaatttactatcctgttcagcattctcctgcaccttttctgaatagttatctacaggtatgttatatgaatggctcaaattcttcataaacagagaaactagttaccaatgtcaacatgtcatggaagctgagttatcctcaaaaagctccaacagcaattttagtttttgctgggtagacatgcccatgaaatggtgataaacgattgggtaaatatgagaagctgatttataatttgtcatgtcaattcacatccagtcagcaggagataactgagctagaggttgcaagatcctttgccagcatactgcatatctacatcacagggagctaacataaagacgatgaaccaagagagttctagttgtgcattaatctagccatccaaatctaagcagcctcatgcacatatattacatagcatggccaacattgaccaaacatgttgcatcctatcttgaatctgttagttgaagacaaccagttctctccatcaggccactttcacgtttgtcttcagcctctttgcagcctgcacgaaaccaacgatgacctgcaactcatccaattgcttaaacatggcaattgggattcacaagagacgaccaagatgtcaatcaagcatggttatgcaaagctgctgtgtagaaattggagagagatgagtcttgtttatcaacctgcgacacaaagtgcctctggacagcatccactaactgctccctggatgggttagggctagcatcctgttcagcacgtagtcagaacaccattttcatggtatatttttattcaactggtggagcttgatctgggaatgattacttacgagattgaagtgacgccaatatctccataatgcagtcatttccagcttgctcaggtcaactttctgcaaatttcacagtcaaagcttcagctacgaccaccacatcatcatggagaacacataatgttacagctaacagtagggatttagtccaaatactacaaaggttgtgacagagcaaagttacagtgacactgacacatattactggaaagtgattggggtgctacaagcaatggttgttacaagcacagaaaccaaggaagcaaaagtcgcaccgtgtgagcccttgaggaggaagaaaatgacgccttggagtgggaatcacaagacatggagcggctgaaggatttggtctggaaccctctatgctgcctgctccttgacctctgtggctttggtgattgtgcgtcatcggatgctgcaagaatgggattaaacaagaccaactatttacaaacgagacgcatgcaaccaaatcgaaggacataattaggtgccacgaaaaccgtgccattattttaagttcggttttcacaagctaaattggtccgtgacacagacggcgttcgggctaattctaggggctaattgctctttacagaaaattatggtgtcgtgcatcaggtaaactgtcttttttggtccttccccacaagatagaacaaagtatacgacattattattcatagatcggcagaattttatcatgcgaacaaaatacgaaagcattgagaagatcagcatttagtatg

SEQ ID NO: 25735 - DNA, 2896 bp, Oryza sativa
  ref <308>: DATABASE ACCESSION NUMBER: AK101177
  ref <309>: DATABASE ENTRY DATE: 2002-08-28
gaatcggtacacgcgccgcttctcccctcctctcttccttcctcgacccgcccgcccgcctgctcgctcgccggccatgggcgatcccccggcgctgaagaggcccaagctcgagaaggacgactacggatccgcctactggccccgccccgccgcctccaatgcctcctccgcatccaaacccccccaatcctcttcctccgccaccgccaccgccgccacgcagggggatgaggaggatgacatcgcggaggaggcggtcctcgccctcatcgcccaccgcgagcgggacgtcgagcgctgcaagctcaagctctcgcactaccagtccctgctggacaccgcggagaagaagctcgccgaggcgcaagatcggctcgcccggtatcgagatcgcaagccgcctccgccgccgacccatagggaccccaagccgtcgctgccaccgacgacgacccagagggaccccaagccatctcctccacagcacaaggcgccggagcggccgcagcttgtcatcccgggggcaaacaaccggccacccccgcgcccagagcccatgcctgggttgaagaagaccgccgctccatcatcctcctccgcatccgtgccgccggagcggcccagggcactggagaagaagcccaagcttaagatcgaacagaaggagcatcagaacttgattcagagcgtgaagaaatcatctgcaacggtgcttaggttctatggcggtaccgtaatctgtagccaacacaagaggaagcttaggtgtcttgagctatgccctgtcaatgatcagcttgttgctactagtgcattggatggaattgttactctgtggcaagtgcagccaaaagggtaggcctcatattactcatttcttatcatactgtagtttaagttgctattgactgactttgctgcgaataggagctctaggcaatgtttttactccatggttattttggcatgaggcctgaaagttcattcatgtgattggcatcggaaatgtggatttaatctttgtttatgaagcacatattgtgaaagcatacttaaaacccaccttagcacttatgtattccttttttgcattgcctcatgaagcatatattgtgaaatcatatttaaaaacccaccttagcacttacatatttttgttacctcacacaaaagccaagttaattggtaaatcctctcacttttccttttttttttttttttgcattgccttgcctgatgcaacttcacaatgctgagatgttaaacacagcaacttaagcaacataagaaaaactctctggttcgatggaaaacctgtaattgcaacacagtaagtggctgtaaaagaatatgccaacacttctaccaagtgacatttttaacactgatatgaccaaatcccccaaacagttggcttatgaatttaagcaaattataatacctaacttaaacatggtgtggcgtatggacattgaagtcatgacttcatacactactgttggcactaaatgacttcttgcttcctgaatctcattggacatgtagcaaaaaaaaactcttatgtggagatataaaactagaaattgatgtagaaactatagtgataatcctaccataaccacatttttttgtccatttggttttaagcatgattttacaatcacatatattttacttgcagacccgtcatctccttgctcagcacaacagattgcttttctcctaagcataggtggcctgaagatgtagcttggcatccacatggtgaattaatttttgctgtgtacagtgctgataacggcgactctcaagtttcagtgatgaatcgcaacttatcaggacaaaagaaagttagttttctaccagtgaagcctcataccaagggaattattaacaacataaatttcatgccatggtctgatgtatgctttgtgactggtggaagtgaccatgctgtcatactttggcaagaaaaagatgattcatggaaccacaagaaagtgcacaaggatttgcattcttctgctgtcatgggtgttgctggattacagcagaaaagtacaatattatcagttggcagtgacaagaggattatatcatttgatctggcagctggaaggacagagtccaagaacctaattgattacaaatgcatgagtgtattaccaaatccatgtgatttcaacttgtacatggtgcaaacagcggcaccaggcaggcagcttcggttgtttgacgttaggcttaggcagactgaagttcatacactcggttggaaacaagagagcagcgagtctcagtcagctcttataaaccagtcatggtctcctgatggttggtacttatcatctggctctgcggaccctatgatccacatctttgacatcaggcacaatgggcagaatctctgccagtcagttcaagcgcaccagaagcgagtttttaaggccctttggcaccgaacggccccagttctgacctctatatcatcggaccttaacattggaatccacaaatattcatgagagaactatctttccggtgccatttttgatgcaatggagaggcaaacctttttgtagggaagtagaactctcagagaatcaagtcataggaattttgtttgttcacatattgcgcatcagtagagttccaaatggagagacttagcctactagccgcttggcttccaacattgcttcttttacttgcaacatgtgcaatttttgagctactgtgcatgcttagccatgagctttctaatcagccattgttgccttgttggagtgatactccgaggagtccccatctgaatgttttgctcctgttattacttgtgcaaactagatgggggaatcccatcccatatatgttgaaagaaagctgctgtttc

SEQ ID NO: 25736 - DNA, 2325 bp, Oryza sativa
  ref <308>: DATABASE ACCESSION NUMBER: AK101178
  ref <309>: DATABASE ENTRY DATE: 2002-08-28
gctgacatttgaagcactgtctgaaacatctgaatttgcaaagaagtgggttcctttctgcaaaaggtacagtctcgagcctcgtgccccagaatggtacttccaacagaagatagactacctgaaagataaggtggcaccaaactttgtcagggagaggagagcaatgaagagggaatatgaggaattcaaggtcagaatcaatgcattggttgctaaagcccagaaagttcctgaggaaggatggacaatgcaggatggaactccctggcctggaaacaacgttcgtgatcatcctggaatgattcaggtcttccttggccaaagtggtggccatgatgtggaaggaaatgaactgcctcgattggtttatgtttcaagagaaaaacggccaggctataaccatcataagaaggctggtgctatgaacgcattggtccgagtctccgctgtactaactaatgctccatatatgttgaacttggattgtgatcactacatcaacaacagcaaggctataaaggaagcaatgtgttttatgatggatcccttggtaggaaagaaagtttgttatgtgcagttcccacaaagattcgatggcattgaccgtcatgatcgatatgctaataggaatgtcgtctttttcgatatcaacatgaaaggtttggatggtattcaaggccccatctatgtcggtactggatgtgtctttagaagacaggcgctgtatggttatgatgcccccaaatcaaagaaaccaccatcaaggacttgcaactgctggccaaagtggtgcatttgctgttgctgctttggtaacaggacaaacaagaagaagactgctaaacctaaaacagagaagaaaaagaggttgtttttcaagagagcagagaatcagtcgcctgcatatgctcttggtgagattgacgaaggtgctccaggagctgaaaatgaaaaggctggtattgtaaatcaacagaagttagaaaagaaatttggtcaatcttccgtttttgttgcgtccacacttcttgagaatggtggaaccctgaagagtgcaagcccagcatcactcttaaaggaagctatacatgtcatcagttgtggttacgaggacaagacagactggggaaaagagattggctggatctacggatccgttacagaggatattcttactgggtttaagatgcactgccatggttggcggtcgatttactgcatacctaagcgggctgcattcaaaggttctgcacctctcaatctttctgaccgtcttcaccaggttcttcggtgggcgcttggatctattgaaattttcttcagcaaccattgccctctttggtatggctatggaggtggattgaaatgtttggaaagattttcctacattaattccatcgtgtatccttggacatccattccactattggcttactgtacattgcctgccatctgtttgctgacaggaaaatttatcactccagagcttactaatatcgccagcctttggttcatgtcactatttatctgcatttttgctacgggcattctggaaatgagatggagtggtgtaggcatcgatgattggtggaggaacgagcagttttgggtcattggaggtgtctcttcacatctctttgctgtgttccaaggacttctcaaggtcatagctggtatcgatacaagcttcactgtgacatcaaagggtggagatgatgaagagttctcagagctgtataccttcaaatggacaaccttgttaataccccctaccactttgctcctattgaacttcatcggggtagtggctggcgtttccaacgcaatcaataacggatatgaatcatgggggccgctctttgggaagctgttctttgcattttgggtgattgtccatctgtatccgttcttgaagggtttggttggaaggcaaaacaggacaccaacaattgtcattgtctggtccattctgctggcttcaatcttctcgctcctctgggtccggattgatcctttcctggcaaagaatgacggccctcttctggaggagtgtggtttggattgcaactagaaggtcagcatgtgaacttccccaatcaagtgtgtgcttgaagaagtatttttgcaggtgtttgtgcccatattttttttttcattttttcctctgtagatagaaacacgaaaaaaaaaacttgcatttcttttgttccatggtggtagctcagcctcatatctgcaatattgagcaaacgggaggctgcgacaaccttgtgcagttcggccacgaaaaatacagtgaatgccagtgtttgattgttcagc

SEQ ID NO: 25737 - DNA, 2840 bp, Oryza sativa
  ref <308>: DATABASE ACCESSION NUMBER: AK101179
  ref <309>: DATABASE ENTRY DATE: 2002-08-28
gacaaagccatcctccgctgcgccggcgctcgccgagtcgccgccgttgatgcgccgccccggctcgacgtctccggcggcggagacgaaggcggaggcggctacgcggagggacggggtaggcgtgcgacggcgacggttgtgaggctaacggcgccggtcgaatcctccctcaaagtttgcagatgagttgcttgatcaaatgccgattagggatgtcacgcttgaacgtgcttgtgcgtttcgtattttttttctcccctttctagttattgctgttggtgtctagttaattttgtcgcatttgcaattacgtctggggatttgctcctcgcgtggtagatgacttccaatttccacggcattgagtgaagagagagtgatggtttctgtgctgaaatcatccccgggtgggtatgcaatgcaactgatctgaccaccaccacctgtttgagggaattccagtttcagttcataaattttagcgggtacatcttctgttctgtctgaaagatgtgtcgtgtgcaaagttgtcgcttgtcagaatggtccaaatctgcttgttgagctgtgggctttcgacagattcaggacaagctgccaaggacggctctagatttcgagcatgtgtttggtgtatgcgtagggttggtgtatggaggtagttggttattgtgggcgtttgtgtagggtcttaacagttattgctttgatgtttgatcagatcacgcttattaggtggaggacctgtacagattagtcatttgcgtacaggagattgtgtcaatgctctcgcaggagacttttattcgtgtcaatgatctatgcagccatgcaggagaccttttagagtgcttgtgagacctaacatccgttgatcattttaagagggacacatattaacttgattgtaatgtgccttgtatgagggagtagctgctagctatagttgttggccaaccacagcaatgcattttgttcctatggtctttggatagtgtactgtccaatgtcaataaaaattttcactattggtggttgtatgttaacacaattttcttgcagtccttaaaaggagggcaaaaactttgccttgtatatgttaatagagcaggagaactctcttgcattatcagtttgctatgcctcccagttaggatgtagcttacatcctgagaatagaccgccatatactgtgttattgtctgtgtacatccaattggatgtagaggccgggtttaacccattttctaaaaatactgtgccatttggtggtgtgcatttggagcaaaacagattcatattccttctatttaagttgttgttattgattccttgaacaaatatattatattcttcctgttttcgatggaaaagttttacattgcttgaagtaacacaatttctgaagcacctggacatgtctgtgagacagcacatccacttaactgatagtattccatagtattattctgcaccttcttgttttagtgcaagcatctcagatgggaaaaactgcctgcagttgtaaaatatctttgttgtcacaatttcctaccagcacgacattttcatttagttcctcatgtaatgtttcttctctcaataaggtagctgttgcagagtgatcagctaatgattgttggactcttcttgtcaattaggtaaatacttaaaataaccgtcaaggcatcaagggaagcatgtgctggcggattgtgcttgatgatgtttaaaagtcctcatggcgcatgggaggggaactgtgctgcctgtgctttgagcatgaccgcagcaggtgaacggtcagctcgtcagaaagagatcggttgaagttgtacgcctgaatgcgactgcgtcaattaatgtgattcaacagaagacatgaattgatcaagagagttgcatgtccgttcaggtccgtcggttggccagaaccacgactccaagtgtacgtacgtttaccacacacaaacctcttattattccgagcaactcatgcctcgtgcggattatgtatagtcaatagtcatatggcctcatgggtgatattcatgaaaccccccgtgaggtgttcctaccatatcattttttttccctgataacgagacacatgattaagaatgtgtttgcctaatgatgctgatgaatctttgccctgccaaatgccaagacggccggggctatccccccctggaattttctcgcaggtgagcaagatgtcgtgtcgacattgggaggaggaggggttatcagggtcataatggctctgatttgggcatgcatgagaggcacaatgcaacacacggccgcggggtagagaggtggactgatcggagcaggcaggaaggcagctgctcgacggatgagcccgatttttccctgttcaggatttatttacagctcctggagtaaggcgtaagcgaaggcgaccgcgcgaggagagacacagaaggagaggaggaggacgatgctgttccagtccaggtacggttgaacctaaccgagctaaccttatcgccgctgtcaatgttctgcaacctggtttatggatgtgtttagttcgtgaaaagaaaatttttcggtgtcacgctagatgtttgatcggatgtcagaaggggtttccgaacacaaataaaaaaactaatttcataactcgtctggaaaccgtgagacggatcttttgagcttaattaagccatcattaacacacgtgggttactgtaagcttaaaagattcgtctcgcgatttccatgcaaactatacgattagtttttgtttttatctatatttaatgttttatacatgtgttcaaagatttgatgtgatgtttttgagg

SEQ ID NO: 25738 - DNA, 2834 bp, Oryza sativa
  misc_feature (561)..(561): "n"=any one base of a, t, c, or g
  misc_feature (770)..(770): "n"=any one base of a, t, c, or g
  ref <308>: DATABASE ACCESSION NUMBER: AK101180
  ref <309>: DATABASE ENTRY DATE: 2002-08-28
ggaacgaaaagctgacctactttcggaaatccttcttcggcctggtgggtaccatatcagcgatgctagtgaaggtggagaaaggctccttctgcaggatggaaggggtacggctaatgctggcgcgcgttttgctggttctccagctggtggtgctggtggtgatcctctcccctctcgcggtgttctacctgttcggcctcctcatcaccgccggcctctcgctgtggcgcttgctgcagcgcgactacggcgccggcgaggaggcggccaacctcgcgccggcgctcaacgtgctctactcgctggcgctcgtccagggcgccctcttcttctactacttcacctcgcgcctcctcgggaggcggctggcgaacttggtcgccggagtttacagcttcggcggcgagggggaggaggaggatgacggcgggcgcacgtcggtggtggagtacatgcggcagacgaggaacggatgcgagaaggacccgtcgtcggtgagagggaggaacctcgtcacgttcgccgtgacgatgatgaaggagtcgtcgccgtcgtcgntgtcgcccggcgactactcctccgcggctacgatcctcgaccagctcctgtcacaggcctggctgcgggagcagcacgagctcatcaggcagctcgtcgggtcgtccaccgacctgatggacaagctgctgcagacgctctggtgcatggggacccgcgacggtggtgttcgggagcatgcctccaggatcgtggcgcacctcgcgggngagatcaggctcgccaggttcccgcaagggatcgggtgcatatactcgctgctcaccaccccgagaaaccagcagcaagacgacgacaacgacgacgacgacgacgacagcgcccagtcctccgatcactacaagaagctcatggtgcagggcctcgtcatcctccacaagctagccgccgcggagcacaaccggcggatcatcatcaacagcacccagggacggcagctgctctccatggccatggcgcccgtcagcgccgacctgctccaccgcatcgaccacgaagcgtggaacgacatcgtcgcctgctcgctgcagctcatgtgccggctcgtcaccgcccccggcgagaccggcgacaagctgcgttcccaggtgctgaacgacaaggacgccatcggcaccatggagaggatcctcaactgcgacggatgcaacgagaagaggctctatattctcgccattaacatcctcacgcagcttcccatggcggcgaagaacaaggtggtggacgaggcttcgagcatgagcgtcgagagcagaaggaaattcaccaagctacttctactcatctataccgacgaagagaaggacgcctttatgagacaaatggcaggtgaagcattggcaatgctgtccgaacgaagcaagagcgacgccacaatcatcttgaaagcaagtgacagcactctcaaggacctcaccgcaatgctcttggatgtaaatagcaacagaggatacagaatatgtgcagctgaaatcctggagcatctgtacattcgatacaccaagcaagatggctatctcaacaatctgacggaagccatgaaagatgtgttgccaaaggtgctcggagaaatttttcttgtgtcatggacgcataaagaaaagcaaccaggaatgacagaacaaggaacagagggagttaatttctcggcacaaaaagctgacattgaaagtcaagatcccgttgcttgtcaacatgaaaaggttaaagaggaaaacgaaaaggttaaagaggaaaatgaaaaagttaaagagcaagatgaaaaggttaaagagcaaactgtggatatgaaactttatgcagctttactgtcacttagtgaggcaatatttcaaagattggtcaatgatgataaagatttggctgaactgactgataaaattgccccaggaggaggcactgcatttagcttcgccggaaagctcaaggagatggtagaaggaaacagtgaacaagcaacagccaattgcctgagaatgctgaagattactaccaggatgatcatatcattgataaatctcaatggagccaaagtcggagcagacctggagagcttgatgcattctctgttaaaagcttcagaaaagatgttggaactggagggcttcatgattttctctagcagcgatcgtaccgaaagcacgaatcctgccaacattctcgcttccctcgtgaaagaagcacaggagcttctggagaagaagaggcaggcacaaactacacccgctccatcaatggagaccagctgattgagtaaacagactatcaacacgatcgtatgctgatctgcagactgttggcagtaatacctggaaactgacaccgtacaatccctgaaaactgtctctgtaatctgtatgtgtgctgaaacttatctatcttgtcaattgtcccatctatttcaaaaactttcaagttgaactttacaacaaactgttgagctttattggcagttcgtataatatcctcttggaacagtagataaaacctatctgaagaggtgaagaggccaaggatctgcatcaacctactgcacattcagtacttgctcacctatgttaggggtgaaacaactattacataattcgggtattttgtatgcattttaaaacaagttggataatcagagacaccaattctgatgtactcgtctaataaatttatccaggacttcggacggaactcagcccatctgaagtattcagttagtttgttaggctttgttagatagggttgttagtcaattagaatcaatcaatcaagaaagttaaatc

SEQ ID NO: 25739 - DNA, 2043 bp, Oryza sativa
  ref <308>: DATABASE ACCESSION NUMBER: AK101181
  ref <309>: DATABASE ENTRY DATE: 2002-08-28
ggatctctccctgttgttttgcggggatggcggccgcctcgtccgcacccttctttgggctcggcgacacgcagatgccgccgccgcagaatcccaccaatccagccctccaccaccaccccaacccctcccccgctcccgtcgccgccgccgcgcccgcgccgaagaagaagaggaaccagcctggaaacccaaatccagatgcggaggtgatagcgctgtcgccgcggacgctgatggcgaccaacaggttcgtgtgcgaggtgtgcaacaaggggttccagcgggagcagaacctgcagctgcaccggcgagggcacaacctgccgtggaagctgaagcagaagaaccccaaggaggctcgccggcgcgtgtacctgtgcccggagccgtcgtgcgtccaccacgacccgtcgcgggccctcggcgacctcaccgggatcaagaagcactactgccgcaagcacggcgagaagaagtggcgctgcgacaagtgctccaagcgctacgccgtgcagtccgactggaaggcccactccaagacctgcggcacccgcgagtaccgctgcgactgcggcaccctcttctccaggagggacagcttcatcacccaccgcgccttctgcgacgcgctggcgcaggagaacgcgcgcatgccgcccatcggcgccggcgtatacggcggcgccggcaacatgacacttgggctcaccggcatggccgccccgcaacttcccgccggcttccctgatcaggccggccagccgtcggcgtcggccggcgatgtcctccgcctcggcggcggcagcaatggcgcctctcagtttgatcacctcatggcctcgtcgtcgggctcctccatgttccgctcgcagggatcgtcgtcctcctcgttctacctcgccaatggcgccgcccatcatgctcccgctcaggacttcggcccggaggacggccagtctcaggccggccagggctcgctgctccacggcaagccggcggcgttccatgacctgatgcagctccccgtgcagcaccagcaaagcggcaatggtaacctcctcaaccttggcttcttctcaggcagcaatggcggcgtcgaccagttcaacggcggcgctggaaacggcgggcagggcagcatcgttacttctagcggcctcgccggcaaccacggcggcggcggcggcggcttcccttctctgtacaactcgtccgaaccggccggtacactgccgcagatgtcggcgacggcgctcttgcagaaggctgcccagatgggtgcaacgacgagcagctacaacgccggcggcgccggtggcgcgagctcgctgctccgtggagctagctcccacgggatcagcgtcggtgaagggccggccaacgagaggtcgtcgtaccagaatctcatcatgggctccatggcgagcggcggcggtggcgcgggtttcgccggtagcttctccggcgcgtctggattcggtggcgccgtcgacgacggcaagctgagcacgagggacttcctcggcgtcggcgtcgtccagggcatcagcggctcggcggcaatggggccgccgcgccatggcgcggccggcctccacgtcggctcactggacccggcaaacatgaactgaagtcatcacagagaagaaaaaaaacaatagaagacggaaggagatgatcatgctgctaatttcatttcatcatatcagaattagtcaagaaactggaggtaattaattaagaagagaaaagcgatttcaatccatgcaagatggatgtttctggggaaatctggagctgttaatggtgagtcgtagttgctagctagctagccagagctgggaggaataataataatacctggattaagtggccagaacttaattttgtaccggtacatttcgtttgtttttcatgtacttttggcagggaaatgggtctcttttgatgtgaagtcatcatgtgaaggcctgaccccagactagaatcaattcaagcgcgcgctgtgcctggattaattaatcttggagttttattgcg

SEQ ID NO: 25740 - DNA, 1567 bp, Oryza sativa
  ref <308>: DATABASE ACCESSION NUMBER: AK101182
  ref <309>: DATABASE ENTRY DATE: 2002-08-28
ggtaggtccggaggaggaagcggcgagagaagctcagctaggcagggcgacgggcagaaacgcgaccacggcaacaaaccccgccgcgcgcgcccaccgtgccggttacatgggagtagaggcgggcggcggctgcggtgggagggcggtagtcaccggattctacgtctggggctgggagttcctcaccgccctcctgctcttctcggccaccacctcctactagctatacacacccatctcaccataacacacatacatagatagatagatagatagatacatacacacaaacataagtagctaggtagagaaagagatcatagcgttaggtgatcgatcgatggctgctgctgaggcggcggcggcggtggggaagcagcagcagaagggcggcgggggaaggggaggaggcggcggtgggccggcgccgttcctgacgaagacgaaccagatggtggaggagagcgcgacggacgaggtgatctcgtggggaagggaggggcggtcgttcgtggtgtggaagccggtggagttcgcccgcgacctcctcccgctccacttcaagcactgcaacttctcctccttcgtccgccagctcaacacctacggtttccggagggtggtgcccgatcggtgggagttcgccaacggcaacttccggcgaggagagcaaggcctcctctccggcatccgccgccgcaaggcgacgacgcctcagtcctccaaatcctgcggcagcggcgtcaacgtcgcgttccctccgccgctgccccctctgcccccggagccgtcggcgaccacgtccagcggcaacgaccgcagctcctcctccgcgtcctcgccgccgcgggcggacatcaccagcgagaacgagcagctcaggaaggacaaccaaacgctgacgatggagctggcgcgggctcggcggcactgcgaggagcttctgggcttcctgtcgcgcttcctcgacgtccggcagctcgatctccggctgctcatgcaggaagacatgcgagcggcggccggcggcgtcggcggcgagcagcgcgtgcaagagcacgcccgggaggagaagtgcgtggagctgttcggcgtgctcctcgacgacacccatggcgccgccacgaggaagagggcgcggtgcgaggaggcggctgccagcgagcggccgatcaagatgatcaggatcggcgagccgtgggtcagcgttccatcgtcggggccggcgcggtgtggcggcgacaactgaagtccaaacttgtgcatgccacggccatgacctgatcgaccaggcgaacggcaagcagaaggcatgcatggtgaggttggtggcaagaatggtccgatcaaccaagtcattaggtaaaacgagacgaattaagcacgccaaatacgtgcggccctgtgttaatcacgggttgctaccatgctagtagtaaggtaggaacagtacgaggagtcaaggctgaccgaagcgaagcagccggctcttgtgtctggacgttgtttcagttaacactgaaagcttcaccttactatggattatacattttttagataatgg

SEQ ID NO: 25741 - DNA, 2520 bp, Oryza sativa
  ref <308>: DATABASE ACCESSION NUMBER: AK101183
  ref <309>: DATABASE ENTRY DATE: 2002-08-28
ggtgctgctcctttttcgtaactggctctctcctcctctgctccactgctgctccgcctctgctcgtgtgagcccccagcctccattcctgcctgcctgcctgcctcctgctgctcctccccggatcgaaatcgatctctcctcttcctcctcctcctcctcttctccatctctccagattccacaagccacgcgggatatgctgctctgattgatctctctccacgtcgggtcaggtcttcacccttgagggaattgttttcattatcttatcaaaatggagaaaatgcaaaagacgcaatcaaggaaatccagctcatggtggtgggatagccatattagtccaaaaagttctaagtggctctccgataacttagaagtgatggagacacagataaaagaaacgctggagcttattgaggaaggagaaccctctgcagaaaaggctggggttcttattactcacgtacagaactttcagcagatgtatcgtgttcttgccaagcgatatggcaatgtgactggagaattgcgcaaaaatatcccatcatctctgcaatcatctgtctcctttggcatctcagaatcagattctgaggcacagtctccttcatcaccagagcgtgacttgcaagagaagatgtcacaaaagcaaaaaccgcgatcagattgctttgatgtttctattggctctggtatgagttctgacgtatccaagaaggggagtgatgggtcttcatcatcttcagaatctgatttagagcttgatgaggctaaagaagaaaatggcaatagcattttttatgccctaagtcaaaaaattattgagcttgaggatgagcttcatgaagtaaggggtaaacttgatgcttccgaggaaaagaacatgcgttgccattgtaattttggtgctaactcagaactgtctgaacatgaggaaaagcaacaggtttcagatgtggaaaccagtagccttcagaaggatcttgatgaagtcaaaagtgaaaaggaagcattggaagctgttgtattggtgaacaaagatgaaattgataggctgaaggaatcaatggtatcggcagccaagcagtttgaagttgaacttgcgcatcgtgatactgaaattgataagtgcaaacaggagcttgaggtactttcggagaagtatctgcatgatatatctgctcttgaggctgaaattggaaagctccagggagtcatcaaaacctttgaagacgactttgcaaaaatatcacaggagaaattgatgctcgaatctcgggttgaagagcttgagcagtcagttaacagctcaaattattcggtttctgagatggttaatctgcaagaactaatgaaggatacacaagcagaattagaaaaggtttcacaggagaaagaagtgctcagagaacgtgttcttgaatttgagcaacttttgggggactttgagaattcaggcatggaggttgcaaagctaccagaaaccatcaagaacttgggagcccagatagagggaacactacaggagaaatcagtactccaggacaggattaaggagctggagcaggctgtccatgattcattgcagaaccattcactggagaagtcctctctgagtgctgagctttcaaaattatctgaagccaatgcttctcttgaagccaagttggcatccgtggaggcagagctcaaacaagtttacgacgaaaaggctaatgaatccctcaacagcgagaaggaaatctccaggctgaatcaagaactggccaatgtcaaaaccgatctggaattgctgttatccgagaaatccctggtggacaacaaagtaaccactctactaaccgacatcacaactcgcgatgaaaagatgaagcagatggatgatcaactgaatcagcttcagcttgagcattccaagctaatggcacaggccgatcttgcccgcaagtccctgtcagaactgcatgctcgggtatgcgagctcgagaaagaggtagagatgcagaagcttgtgatctctgagagcgccgaggggaagcgcgaggcgatcaggcaactgtgcttctcactcgagcactaccgcagcggctaccaggagctgcggcagctgctgcatgaccagaagagaccactggtgatggcaacatgaaccaaagctagtgatcctgatgccatccttctcggatgctttgtggatgttttctgtcaatggcaatgcatgctttcctgtgtctctctctctctctcttctaccagtagcttgctgctgctctataacttgtgcactgttgcttctccggctactaagaattctgtgttgtgtcttgcaatgtgatgggataatcaatatcgtttcttgtgtactcttataactgtcgtcaggtaatgggcatagtgatgtctatcaatctatgcttgatctttgaaagatgatatgcatatcagctgtcaactttgtcaaatgtgtggattatccttgtgctttccaatccaatcaatgatgagtttgacagcagg

SEQ ID NO: 25742 - DNA, 2148 bp, Oryza sativa
  ref <308>: DATABASE ACCESSION NUMBER: AK101184
  ref <309>: DATABASE ENTRY DATE: 2002-08-28
ggcctgttcatcagaacagcagattgttccatggctgaagcacaacaagaagtcgcagcagcagcgaaagggactggtcttctccctcctcgccgtcgtcgatgtcccccactccgtcacctccaccggcggcagctgtccatggaggcggaggaagagcggaggagtccaccatcgccgccgctgcaacgccagccgcacggagtttggctgcaggggacaacggcatgcaggtgagtggccatggcgagcatgctgggttgagctccgggcggcgtcgtggccggcaaaaaggatccgggcggcgccagatccttgccaatctaggtcagtacatcgccgtccacccgcgtgcgcactcgccatggccagcggcagtggcgctggcgccggccttccactcgaagagctagggcttgacggtgctgtactcgacgcgctctggcgatgcgccgccgccgccgccccgccaccgtcgcgcctctgctccgctgcgaggaagaaggggaaaagaaaagaagagagagagaggaagccgtgcgccgggatgccgccatgcgtcgtcaccgtcggcggtgaaccctggcgatgcgccgctgccgccgccccgctgtggccgccgtcgcgcctctgctccgctgcgaggaagaaggggaaaagaaaagaagagagagaggaagaacagtgtcaaagggttattttggtacttacacaactctttctctctccatttcaaccgaaaataataaaataatgggaggagtgtccagcagctaattaccacttttttacagtgttcacgagcaaatacacgtttttgggtgtctcacagcaaaggccacaatctttcggtgtcctgtagcaaattttgcctaaattaaatttatgtatcatatactgctatcgtttttttccccaagttggattcttgactgctattcagatttggaaatgtcaacaatctgcaatttttgtgcgaaaatggacgtgtacacaaatttgcaaactgcatttgttggcctgcatttatgattctggagttccatcggcaaagggataacaccgggccttcacttgcattagattcgatttctggcccaatttattttcttgatataaccgaatggagggagtactctgtaaagttgagcaatgcactttgctcttttattattccttcaaaggttataagttactgtcgtaatgaaattgcttgcaacaaaatctctttatctatcccatcagcataccgagagcaatctgtgagatggttcataagggttcttatgacagtcttcctatgcatcaaagcttgtactagtgaaactgaattgccaaaccatataaagattttggccaaaacccttcagctttacatgattcgcacattcagaatggttcttgtttcaaaaccaactttactcacagcttttcgagaggaaggtgtatgggacttaatattctcagagaattgtttctactttgggtcatctgtagaagacatgcaatttcatattgtcgcagaagttcaaaatgaagatattaacggtaatactgaacccactgattctgaaagcttatacctatcagatgttaacattcttcagttggaagccatttccttcttggagtatgctgcaacgcttaatgaaaacaaatataacctgccagaatgctcagcactgctggaagctcttgaacactgcatttatgatcctgtggtggtcagcattcttcttaaaagttttcgtgttattctacaactcgccacagaacaaactctagtttcatttaaatccttggatgtaattactggagtccttaaggctgcatgccaacaagcaaaagaactacaaaacttcagctgttttcctagtgatgatgttatcagcagtggatatggttctaagatagaaaatattgaaatgagttcgtcaggaaagagaactgagtatgctattatttgtatagagttagctttgagcctcttcaaggaatatgtcaccatatctagctatggaagaattctaattttgcacaatcctgactgtattgagtgtttattcaacttattccaagaaaagaacttccgcaagcatgtactggagcaaatttttgctttattcagggtaaaattgtgcatattcc

SEQ ID NO: 25743 - DNA, 1956 bp, Oryza sativa
  ref <308>: DATABASE ACCESSION NUMBER: AK101185
  ref <309>: DATABASE ENTRY DATE: 2002-08-28
gcctctcctcttcttttctcgcttcctccctttcccactcccctctccctccttttccggaagaaaggcgcggactcctctcctcctcctcctcctcgccgtcgccggcgaggcgacgagggcgggagctccagcctagcgaagcaaagctgcagctgcctcaggccgcgcgacctatggcggcgcgtggtgcttgcgatcctcctggtcctggcgcctccctgcgccgcctcgtcctgctgctcgctctgtcggtgtcggcgctcgccgcggcggacgcatccggggtgttcgaagtgcagcgcaagttcacgcgccacggggacggcggggagggacacctctcggcgctccgggagcacgacggacgccgccacggccgcctcctcgccgccatcgacctccccctcggcggcagcggcctcgccaccgagaccgggctctacttcacgcggattgggatcggcacgccggcgaagcgctactacgtgcaggtggacaccggcagagacatcctctgggtcaactgcgtctcctgcgacggctgcccgcgcaagagcaacctcgggattgagctgacgatgtacgacccgagggggtcgcagagcggggagctggtgacctgcgaccagcagttctgcgtcgccaactacggcggcgtgctgccgtcgtgcacctccacgtcgccgtgcgagtacagcatctcgtacggggacgggagctccacggccgggttcttcgtcaccgacttcctgcagtacaaccaggtctccggcgatggccagaccacgccggccaatgccagcgtctcattcgggtgtggtgctaagctgggtggggatttggggtcgtcaaacctggcactcgatgggattcttggatttggtcagtcgaactcgtcgatgctgtcacagctcgccgccgcgggaaaagttcggaagatgtttgcgcattgcttggacactgtaaatggtggggggattttcgctatcgggaacgtggtgcagccgaaagtgaagacaacaccgttggtgcccgacatgccacactataatgtcatcttgaaaggaattgatgttggtggtaccgcactaggacttccaacaaatattttcgattcaggtaacagtaaaggtaccatcattgatagtgggacaacattggcgtatgtcccagagggggtttataaggctctatttgccatggtatttgataagcatcaggatatatccgtacagactttacaagacttcagttgcttccaatattctggaagcgtcgatgatggatttcctgaagttacttttcattttgagggagacgtttcactgattgtttctccacatgattatcttttccaaaatgggaagaatttatactgcatggggttccaaaacggtggagtacaaaccaaggatgggaaagatatggtgcttttgggagatctagtgctttcaaataagctggttctttatgatttagaaaatcaagctatcgggtgggcagattacaactgctcctccagcattaagatcagtgatgacaagggatcaacatacactgttaatgcggacgatatctcctccggctgtgaagttcagtggcgcaagtccttgattttgttgctagcaacaacagtgatcagctatttaatgttgtaacctggctttggaatcttgggtgcacaatacgtctgttctgaaaatgatagaaactgatttttattcttacgataaaaggggggagaaaaagtagaagcttagacttgacactgtgagcacttgttttgaggggggcacagagagaggaaatactacacacctagcacattgtacaaacagggttggactaacacgagctttgaaaagcatacatttagaagtaaattcaatgttgtttgtttctagaaattgtctaaactgttctgcttaataagcggcatcatagttttagtct

SEQ ID NO: 25744 - DNA, 806 bp, Oryza sativa
  ref <308>: DATABASE ACCESSION NUMBER: AK101186
  ref <309>: DATABASE ENTRY DATE: 2002-08-28
gtcactcttcagtctcacacaaacccaaaaacccaaagcttagccaagctactagctagctcctcacttcttccagcttcttacactaatacagctcgagccacttcgtcttctcctctcttgcagcatagtttaagtttgagataggattggcgatagatatgaggacgactggtcgtcgttcttctccgccggtggctgctgctcttgccctgcttctcctcctcgtcctcttcttcttctcccactgcgcctcagctgctcgcccactgccagcatcagcagcagcagagctagtgcttcaggatggcgccaccggcaatggcgacgaggtttccgagttgatgggagcagctgaggaggaagcagcaggattatgcgaggaggggaacgaggagtgcgtggagaggaggatgcttcgcgacgcccacctcgactacatctacacgcagaagaggaacaggccttgaaatcttgaatcataatctccaagtcgatacaaggaggaattaatcagtagtaaacctacataaattaatctactatctgcagcctgttttcaactgcatgtatcagtgtattagtcgatctaggataatattttgcatgtgtactcaagtaaactgtcgtctgtataaccccgttatgtacatggttgtatttctttctccaaagtgttatcgaactctctgttgatctctgatacatctgtatgtgtagcatcagagaaaagatcgagcacttgtgggttatgatctgacgatcgagtgtatgaacagtgctaatggtgtagtaagtttttgctt

SEQ ID NO: 25745 - DNA, 2131 bp, Oryza sativa
  ref <308>: DATABASE ACCESSION NUMBER: AK101187
  ref <309>: DATABASE ENTRY DATE: 2002-08-28
gtaaagaagaggagaggagacacgcaaaagcaaagcaaaccactcgccgaacaccaactcctcgccgccgccgccgaggaggaggaggagggagcgagcttgacgccggcgccatggcgggcgggggaggtagggagcggcgcggcggggggaggctgctcgtcggggtgctgctcctgacgctggtggtgtccgggcactgcctggagagcacgcaccaccgcgggctgaagcggcggcggcggaagcacgagatccactcgccgatcaagacggtggtggtggtggtgatggagaatcggagcttcgaccacatcctcgggtggctcagccgcacccgccccgacatcgacgggctcaacggcacgcaatccaaccgcctcaacgcctccgacccttcctccccggagatcttcgtcaccgacgaggccggctacgtcgactccgaccccggccacggcttcgaggacatccgcgagcagatcttcggctccgccgacacctccgccgtgccggcccccatgtccggcttcgcccagaacgcccgcgggatgggcctcggcatgccgcagaacgtcatgagcgggttcaagccggagtccgtgccggtctacgccgccctcgccgacgagttcgccgtgttcgaccggtggttcgcctccgtgcccacctccacccagcccaatcgcctctacgtccattccgcgacctcccatggcctcaccttcaatgcccgcaaggacctcatccatggcttcccgcagaagaccatcttcgatagcctcgaggagaacggcttgtcctttggcatctactaccagaacatcccggccacgctcttctaccagagcctccgccgcctcaagcacctcgtcaagttccaccagtacagcctcaagttcaagcttcacgccaagtggggaaagctgccgaattacgcggtgattgagcagaggtacttcgattgcgagatgttccctgcaaacgatgaccacccctcgcacgacgtagcgagggggcagaggttcgtcaaggaggtgtatgagacgctgcgagcgagtccgcagtggaacgagactgctctgatcatcacctatgatgagcatggtggattctatgaccatgtgcctacgccggttgtcggggttccacagcctgatggaattgttggccctgatccttactacttcaagtttgatcggcttggagtgcgcgtgccttctttccttatctcaccatggatcgagaagcgcactgtgatccatgaaccaaatgggccgcaggactcctcacaatatgagcactcatccatccctgcaacagtaaagaagctatttaatttacattctaacttcctgacaaagagggatgcatgggctgggacctttgagaactacttcaaaatccggaaaacacccagaactgattgtccagagaaactcccagaggtcacaaagtctctgcaaccgtttggccctaaggaagattcatctctgtcagagtttcaagtggagttgattcagcttgcttctcagctcaatggtgaccatgtactcaacacctacccagatattggcaggactatgactgtgggtgaagcaaaccgctatgcagaggatgctgttgctagatttttggaagctggcaggattgctctaagagctggtgcaaatgaatctgctttggtcaccatgaggcctgcactcaccagcagagcctcaccgtcctctgatttatcatctgaactctgatggattgttctcagatttatccacaattctgcatcatgatttgcaccgcgtcagcttttggttgatgagaactcgtacaatgtgctaagaaaacataggtaggttggtgtacggcaaagtgtgctagtattatgtaattgatagatcttaaacatggctttgtacatagacatcatgatacttgatatctcaagcttttacttcagctgtcctctgataacgctgagatatcagctcagaagtatctgataagatcctactctggataagctggagagggaatttgtaaaccatcgatattcagctctgtacctgcttattcagcagttgaactgcacttctgatgaaatactttatgtacaccagttatagtggtattg

SEQ ID NO: 25746 - DNA, 2212 bp, Oryza sativa
  ref <308>: DATABASE ACCESSION NUMBER: AK101188
  ref <309>: DATABASE ENTRY DATE: 2002-08-28
ggccgcttggtcattatccccccaagcgattcccgccaattccccaattccccaattcttctcctccccccaattccccaaaccctagcgaggcgcgagggctctagaatcttctggaaacgggagaaggagctctcgccaagcaccaccctcatggcggccgccgccgcggacccggccctgctcgacctgattccccagatccacgccctcttcgccgatccgctccgtgtgatttcatacaaatggctcagcaggaacttctcagtatcatccaatgattcaaagaggttgcttcaggagttcgtcaacaaacatggggctgatcttaaagtgatttacagtgtgtctggatggttaaagaagaaccccacaaattattgtgtaaaactcacttcaggccataaacttgaagaagcaaggcaagaatttaaagattcttgttcagttcaagtgtacagtatccaggcttgtattccaaaagatactgctgtactttggaatcctgaatttgtacaggcagaggagctttttaaccggccatttgatgaagaaaattgtttgagagataataggttttgtggtgttttgaattcttttgtcaagcgaactgctaatgggaagcttgtgagttcatttccgccaaagcctataaatagtgttgctgcagctgcaccgttgaaaactagtagtgctccaaaagaacaatctgctaagggtcaacagcaaggtctacctggatcatccagtccaaagaaaggaacaagtaataaggctgagaaggatatttcctcggtcttggataaagccaccaatgctcctgttgtcaaagaaccatcaattgctctgcagggaaacaaaaacaaggctcagaatgggaaggcgctgcccagtaatggtggatcacttgctacgatgtggggacgtgcatcagctaaacccaagactccagctaccactaatcctacagttttaccaagtgttgctgttacagctgatgcacaaatatgtgcaaaggaagaagcaaatgctgatagtagtgatgatgaacaagctgtacactacaagcgtggctctagtgcaaataacagaaagagaagagcagtctttgatctttcagatgatgatgaagatgacaatgttgtagccattgcatctcctgagccaccggaacagtgcattacaaatcctattgatgaggttgctcaagaaagtaaccccaaacaagaaaacttggaaaataaacaagaggttgagaaggatgtgaaatgttgcataggaaggacagagtctcctgagtgtaaaaccaaaagtagcaacactgtcagccattctgggatcaccttaaaagaaaagaacaatggtccaccacctaatgacaataagcaggatcatgctgctgagactgcttccaactcacctaaaagaaggaaagttttgaagacacgaatagatgagcggggaagagaagtaaccgaggttgtctgggagggtgaagcttctgcaggtgataaggctgagaagaatgtgagcgatactggtgctgcaaacagggcaactctctcaagcaagccgcagccagtagcaaagaccgaaaaaagcaatgcttcgagtaaaacagccggcaacaagaaacctgccaaggctggaaccaagcaaggcaacattatgtcattcttcaagaaggtataagccttctcgcttatctgacagagttattcaggaaggagtatctgttgttgccctggctaaagctaccgtgccaagctcccaggcaactgtagtattaattgattcaagtaaacagaccagcatgtttcagaattcagaagctcacttgctgtacatatcctgtgtgattttgtactggtactactacccatttttcagaattctgtatgaattctgaagatgctgctggatgagtatggcaacgacatggcttgtgaagtttgtactgtaggctgtatgcatccaggcacccgtgcggccgtgcctttgtcacttcgccgtgtggtcagattcaggtatgggcattgtagcctagtacgtgtacacgtgtactagttcatgggatgctttgcttgttttccctgacacatgcactgtacatcacctgtcagctgcatggtccatcatccatgacataccaggtcaacctcatgtagaaagttaaaaacaaacagtcatctgttaataacttttgcatccc

SEQ ID NO: 25747 - DNA, 3318 bp, Oryza sativa
  ref <308>: DATABASE ACCESSION NUMBER: AK101189
  ref <309>: DATABASE ENTRY DATE: 2002-08-28
ggctggcttttctccaagattattacacagagacagagggtgcagaggctggctgtgagtgagagcaggagactgggattgggaccctcctgtcttcttctttccccttcctcctgtcctgctcctcttcttcttcttcttggaatactcctgcttggtttggacttgttccaaggagggagcatatggattgattcaccagcccgcacccactgctgtgctaatcaatccatcatcaattcagattactgagggagatgccgtctgcttccgccgctcttgtgctcctcttcgtcgccttctcgctctccaatgctcagcctggtttcatcagcttggattgcgggggagacgatgattacacggatggcattgggatccagtggacttctgatgccaagtttgtctctgctggccagaaagcgaacctcttgctccaaaatcaacaattgcagcaatataccaccgttcgctcttttccagcagacaacaggaagtattgctacaccatgaatgtcaggaacagaacacgctaccttgttagagccaccttcctctatggcaacttcgacaacagcaatgtctacccaaagtttgatctctcccttggaccgaccccatggaccaccgttgtcattgatgatgccaccaccccagtcgtccaggaggcgattatcctcgctgctgctccaacactcagcgtttgcctctctaatgccagcactggacagccctttatttctactctcgagcttcgccaatttaacggctccctctactacaccactgatgaaaaacagttctttcttagactctctgcgaggatcaattttggtgctgaaagcaatgcatcagtcaggtatcctgatgatccatttgatagaatatgggagtctgatttagtgaggcgagcaaattaccttgtcgatgttgctccggggacggagagaatatcaactacaaaacccatcttcgtcagtaccaacgaagaaccacctcaaagggtcatgcaaactgcagttgttggcaaaaatggatccttgacctaccggattgatttggaagatttcccaggaaatgcatggggagtctcatattttgcagaaattgaagatttgaccccaaatcaaactaggaaatttaagttagtcattccaggcaagccagaattcagtaaaccaactgttgatgtggaagagaatgctcagggaaagtatcgtctatatgaaccaggctacacaaatattccacttccatttgttttctcttttggattcaagaagactaatgattcgtcagagggacctatattgaatgccatggagatctacaaatatatagagatttctgtgggatctcaagatgcaaacattatggccagcttggtctcacggtatccagaagcaggttgggcacaagagggtggtgacccttgcttaccagcatcatggtcttgggtgcaatgcagttctgaggcagcacctaggatattttcaatctcattgtcagggaagaacattacagggagtatccctgtggaattaacgaagctatcggggctggtcgaactaaagcttgatggtaactcatttactggtcaaattcctgatttcactggatgccatgatttacaatatattcaccttgaggacaaccaattaaccggtgcattgccaccttccttgggagaactacctaacctgaaagagttgtatattcagaacaataagctgtctggagaggtcccacaagcgcttttcaaaaagagcattattttcaacttctcaggaaacagtgaccttcgcatgggacacagtaacactggccgcactatagtaattattgtatgtgctgtggttggggccattttgattcttgttgctgctattgtttgttacctgttcacatgcaaaaggaagaagaaatcatcggacgaaaccgttgttattgcggcaccagcaaaaaagctaggctcatttttcagtgaagtggccacggaatcggcgcacagatttgcattgtctgaaattgaagatgctactgacaaatttgacagaagaattggttcgggagggtttggcatagtatactatggaaagcttacagatgggagagaaatcgcagtcaaacttctcacaaatgactcctatcaaggcatccgagaattcctgaatgaggtaacattgctttcaagaattcatcatagaaacctggtgagcttccttggttacagccagcaagatggtaaaaatatacttgtgtatgaattcatgcataacgggacgttaaaagaacacctccgtggaggccctgatgatgtaaaaataaatagctgggtcaagcgtcttgagatagcagaagatgctgcaaaaggaatagagtatctccacacaggatgctccccaactatcatccacagagacctcaagagcagtaacattctccttgacaagaacatgagagcaaaagttgcagactttggcttgtcaaaacctgttgtcgacgggtctcatgtatcaagtatagttagaggaacagttggatatctggacccagagtactatatctcgcagcagctaacagagaagagtgatatgtacagttttggtgtcattttacttgagctaatctcaggccatgaaccaatctcaaatgacaactttgggctccactgccgtaacattgttgaatgggctagatcgcacatggagagtggggatatccacggcatcattgatcagtcgttagacgcagggtacgacctgcagtcggtgtggaagattgcggaggtggcgacgatgtgcgtgaagcccaagggggtgctgaggccgtccatctcggaggtgctcaaggagattcaggacgccattgccatcgagctgcaacgggagctgccctccagcattcaccacctcatgtccaagacgtctccctccgaagccgtcaacacgacaggcagtctgcaagacctggagcagaatgcgtcgtttgatgagctgctcatgcgcccaggtctcaggtagaggtagcacatacggattacagactcttctaatactatatttctaatattcgttgataggttaagcaagctgtgcatgacttgtttagatttgccaccgagcaacgaattttgggtgaatttgtccttcaggtcgtcgtgcacttttgaaatgatcatgtgcattcattctcgttcattcttacattggctcttgttctcttctccccctcgaattcttgtatcaaaaacgaccaaaaaacaagatcgattcataataccgtgatatgattatcagaacgtttcctttcagattg

SEQ ID NO: 25748 - DNA, 2378 bp, Oryza sativa
  ref <308>: DATABASE ACCESSION NUMBER: AK101190
  ref <309>: DATABASE ENTRY DATE: 2002-08-28
gaccggcgccggagccggccgctggatccgccaaaccaccggcgccagagcctcggcggcctcgcttcctatcttcctcctcccatggctccactggattccggcggcgtcaccgcctcatcgcccctcccccccgatccccaaagccacccgtcgaatcgagtccgaatagtatgagcagctgcggcctcggtgcgattccggttcggattccagctgcggcccgcggcggatgctatctagtcgcggccgcggggacgccattgcgatctcagggcatcagatgcgcgcgccaaaccccacgccgccgcgcgactccgccatggctaggaggaggaaaggttcgtcctatcgccgccgccgccgccgccgccggcgggcgcacgcggcttgcggcgacaaccgcatcgacgacctgacggacgatctgctgctgatcatcctgcggaggctcgacacccgctccgcgctcgccaccgcggcgctctccaggcgctggtccggcctcgcgcgcgcgggcctcgaggctctcgatttcatggtcggcgacatcctcccgccgcgctaccaccggtgcatccagctccacgagtccgccagtggtgtgttcgatggcgccgacgagctcagaaccatcgttgctagcatcaggcggcacgagcgcctcgccatgcgaaacatggtcgcctccatcaacaacttcctcgacgccgatgatggttttgcccatggcgacggcggcggcggagctccacggaggaggatcagtaggctgcgggtggagttcatcgccacacactaccacgactgcatcaaccgcttggtcgccaaggctgttgatacttggggagttgaggatctagaggttcttggtaggacaacgtattggcggcatcattttcaggatgcccacatcttccgtcgccatggtctctgcaatgacccgcacagatcccgtttgcgaagcctgaagctggtggactgtgtgattcccccattgcaggggttccaagctctcaccaagctggtcctgcaagacttgcgggactccacacccgcggcagcctacgaagcagtgtgttcagctcatgcctacagttgcaagaggtgcacctcaagtcctgcccctgcaagcgcggcagtagtgttttcgttgatgcccccaggtcaatgatcaggcagcttgttctggagtgttgtggcgtccctgggtttgagctgcacgctctgccaatgcttgagagtatagttgtcatgcagacctgggtacggtacaagcttggatccttcccgcgcctcgtgcgcctgaacctcaaacgcgatggtctcaggcataaacttaacttttgcttgcctgcgaacttggatctcaagccgcatcttggattcactccagacataactgaccaggttatacgattcaccggatatgaaagatggtttcggccttcgtgcccttcgttgctgttaccaaagcttaccaggcttctgattgccgatgtgccttcatcatgggatatctcttggccccgactcctcctagaagcagcgccatgtctggagagccttcatatccatattaccccttgggaaggagagacttgcaatgatattttgtggcagccatccaagttgcagcacaaacggctaaaggagttggtgatcattggttttgaaggaacagagagacagatttactttgttaactttgtcattgaagtgtcaatggtactggagcttgtttccttgagtatggccgtgttcaggaaataggttactgggactggaacattgtgaggcaacaacaccgttggtgtgatgaggagagagcaaaaatactggatcagcttgctgataaaatttcttgctcagcaactccagttcaagtatttcttgagtgatctctcatgttttgtatccaaagcttaagttatcagacctagtaacctcaggaggcttttgaccgctgctgtgtctttttaccatggatgcctagagagtctcttgaatccatattgcccccttgaagttggcatgctcagctaatagagttgatgatagtaggatctgagggaacagaaagactgttttagtttgttaattttgtagtagaagtatcgatggtactgtagcttgttgctttgttaaaaagtgagcatgtatacatggttcatagagcctgggagatgactactgatgcagcaataccagatttctgatagaatttagtgctcaattactctaattcaagtagttttgggaaagccttctcatctatactttgttagttacatgtgaaagatgtcgaaaagcgactgtatattacatgcatgatgtggatatagttttgcctttaataaattgaaatgttgcgactg

SEQ ID NO: 25749 - DNA, 2276 bp, Oryza sativa
  ref <308>: DATABASE ACCESSION NUMBER: AK101191
  ref <309>: DATABASE ENTRY DATE: 2002-08-28
gaattagctcgttctcttgtgtcaagaaaaaaaaagaaagaaaaagctcgccgccgccgccaccgtcgccggcgcgatgatcaccggacgcgacatctacgacgtgctggcggcgatcgtgccgctgtacgtggcgatgttcctggcgtacgggtcggtgcggtggtgggggatattcacgccggaccagtgctccggcatcaaccgcttcgtcgccgtcttcgccgtgccgctcctctccttccacttcatctccaccaacgacccctactccatgaactaccgcttcctcgccgccgactcgctccagaagctcgtcatcctcgccgcgctcgccgtctggcacaacctgctctcccgctaccgccgcaatggcggcgccgccgcgtcgctcgactggaccatcaccctcttctcgctgtccacgctgcccaacacgctggtcatgggcatcccgctgctccgcgccatgtacggcgacttctccggctcgctcatggtgcagatcgtcgtgctccagagcgtcatctggtacaccctcatgctcttcctcttcgagtaccgcggcgccaaggcgctcatctccgagcagttcccgccggacgtcggcgccagcatcgcctcgttccgcgtcgactccgacgtcgtctcgctcaacgggagggaggcgctgcaggcggacgccgaggtggggcgcgacggccgcgtccacgtcgtcatccgccgctccgcctcggcctccaccacgggcggcggcggcggcgcggcgcgctccggcgtgtcccgggcgtacggcgcgtccaacgccatgacgccgcgcgcctccaacctcaccggcgtggagatctactcgctgcagacgtcgcgcgagcccacgccgcgggcgtccagcttcaaccaggccgacttctacgccatgttctccggcagcaagatggccagccagatggctagccccatggcgcagcacggcggcgccggcggccgcgcccagggcctcgacgagcaggtcaccaacaagttcgcctccggcaaggccgccgacccgccgtcgtatcccgccccgaaccccggcatgatgccggcgccaaggaagaaggagctcgggggctcaaactccaactccaacaaggagctacacatgttcgtgtggagctctagcgcgtcgccggtgtcggaggccaacctccgcaacgccgtcaaccacgccgcctccaccgacttcgcctccgcgccgccgccggcagccgttcccgtcggcggcgccactcccaaaggggtgagtggcagtgtcacgccggcggcgaagaacggcggcggcgagttggagatcgaggacgggctgaagagcccggcggcggggctggcggcgaagttcccggtgtcggggtcgccgtacgtggcgccgaggaagaagggcggcggcgccgacgtgcccgggctggcggaggcggcgcacccgatgccgccgacgagcgtgatgacgcggctcatcctcatcatggtgtggcgcaagctcatcagaaaccccaacacctactccagcctcatcggcctcgtctggtccctcgtctccttcaggtggaatatccaaatgccttcaataataaagggctcaatatcaatattgtcagatgcagggctaggaatggctatgttcagcttaggcttgttcatggctctgcaaccaaagatcatttcttgtggcaagaccgttgcgacatttgcaatggcagtgaggttcttgactggtccagctgttattgcagctacttccattgccattgggctcaggggagtactcttgcatgttgccattgttcaggcagcacttccacaaggcattgtcccgtttgtgtttgccaaggagtacaattgccatcctcaaatacttagcacagcggttatttttgggatgctcatcgcgcttccgatcacgatactctactatgtgcttcttgggatatagtgttcttgaagaaggcaaaaaagaaagagtagggaaaaaaataggattctaggtttctagaggaaaatgcaaaagaaatatgatatgggctttcttgaagacctgaagaactaccagagctgaagaatagggaaatgagatcaagtaggatcctagctagagagaaatgcaaaggaaagacaccccttgattacaattttttaattttttctgcaactgttttggcatcaaagtaaaggttagggccttgagtatgaagagttcagccgttaatttgacaagttgggttggcggtactaaagattcc

SEQ ID NO: 25750 - DNA, 3610 bp, Oryza sativa
  ref <308>: DATABASE ACCESSION NUMBER: AK101192
  ref <309>: DATABASE ENTRY DATE: 2002-08-28
gggggaagctggtgggcatatggagtgcgcggcgaaggggctggtggcggagccgtgtgccggcgaggcccgccggcgctgcggcggttgcggcgccgtcgcctactgctcgcgcgcccaccagactgtgcattggggatttcataaagaagaatgcgcaaggctcgcagagcagatgagccgcatcgatatgctgaaacaatttccattcacgttctctgtggaatctcctgctccgaatcatacattccctagtctaagatgtttccttttggaatcattcaaacttcaccaaaaaggactctggaaatcagaatgcatatgtgatccagaggttacttcagtcaaggacttaagcaaaacaactgactggagtatgggaagcgccctctgcccatgcacagagcctgaacataatgtatccacacccctgacaagctggaaagactactataggtggagatcgcttcctttgcaatcacctgttgctgttttacttcactggccacttactttatatcattgcgttcaactatcgcacctccaaacctcaaaatatgatggccaagacactctatgtattcactatttaggacctgagaaagaactacatcagcttgcggtgtttggggaactacgtgcactatttccaggtgtccatatttacattgaacttgtgggaccagcagttccaaaatctagggatggagagcttgtaactatttcaaactatgcacattgttgtgatgagagctgcttttgtaaatcttccattggctccaaagatttaagttgcagtgcagtgacattcaaactacgaaaagggctgtatcatgagagatatagtgatattgtgaaggattcaaagcctcatctcattgttgccccaaatgctggtatagctgcatatcctagttggattccaactattgaaataattaggaaagttgggattcctgcaattttcacggacttctgtgaagaagctgcacatctagcttcgtcctgcattacctccataactggtcaacccctcagagtcccaattcagaattgcaagtttgtatcaccatgaaatgttcagagattcaactcttaacaaataatatcactaactttttcaaagaaggcaaggataccatgaaatattttcatggacgaaattgccacctgtttttattttagtctttcagaatagatgccttggttacttgtaagaatgtaagatgcactcatcagctcatgcttgtaaatacagttgtcgtataattgtagacctgtagtaacttgtaagatactacatatataataccctaaagttgcagaaagacttgctagtaggtagtagcaatcccatgctggacatggtgaaatatggatcagttatcaacagcttttgtgccaaggtactaatgaggtagtgccgaagaagcttgttggagacaaactttctgcaatagtaccattcatatgggtagtctgtgacaagcctggaaacctctgcttcaagcacaacaacaaactcctagccctacttgcaaggatcagattcttgtccccatcagcattcagctcagtaacattttcccattttgacaccacatgggtcatgcttgcttttctccgccatacgtacatcgcagcctcaacacggtctgcaatctcaagtgcctcatgttctgagctcaagttgaggaagttgaggaggtggtctggtgagaactgatcccctgcagacatgtaccggtatatggcatcacccacgccaaccttcccactctgttgagtagcagaaatgcatttatcagggggaaatgataatttcagtaatcaggaccatagaaagacccagatcaagcagtttctctgtacctttggcagtgtttctatgtatgacagtggaacctgcatttcagagaggatgccgctgttgatctccatggccatcttgtggatttggcttgcttggtccctcttttgttgcagctcacggtgcatccgatcagacaggcctgactctgggacacatggttcagggagccaccacttgtcctcgctgcgctgaaacttcatgctgtcactgaaggactgctttctctgatctatgtaccagaaatctgtcttctcaaagctatccaatatttcctgcaaaaatggtgtgcaattattggtcatacattgtactacaaaagttgttcgaaaggagccttccggaattccgcaaatcgggactttaccaggagcatagtttccagtttttcaagtgctggaaggttcattagtatgtctgatcttggtgaggttgccatcacctgtagaaaacagaaatttgtgcctaagtagacatgccatgaagatgaaacttatcagagtgtgagacgtgatattcttgcaatggaattacatcatgagtgcttccatctggcatggcctggacttttggtgagaattcaacaatgtattcgcagatggagaggaggcagtccatctccctgttccacatcgccttcttctcaggaggcagtggctgcaacctgtggcaggttccaaacacagttgctgcagccaagaacaagcacagaggtcaacccactgttgcctgcatcaaagaccaacttaacagaagattcatctgcaattctcagaactaccatatagattggtgatggcattggagatggccacagccgtgcagacacccttcccactcccagacatgtcctctccaagaagcagcttggtgtacttctccttcatcagctccatctctgaacaacacccatcaatcaaccaccagaaacaccagaggacactaccagaaatcaaaacaggttggcatatctataccttcatcctccagggacttctcgttcacaacttgctgcagcttcttcatgctgagcttgctcaccgatggcgagaggcgtggtgccgtggacgtcgtgcggctcatgcttctccctcgtggcggcgatggcgtatagtgctcctgctcctcgccaccgccattgtcggagaacgacgacacacggaacagcggtcgcgcgtagtcgcgatcgtagccgtgtttgtggaagccagggaagcctgaacctccactcatggttgcagctgttcttgctgcctgcttctgaagacctgcaagaaagacgatgaatgggaatggcacaagaatggaggcatgccaagaacagagaggataggtacctggtgttattgacttgctttcccttttttggtgatcatgtcatggctgtcacttacaagtgtatggaacaataataaaggcataggggctatctttccttgacatgggctgttgcaatcaatatggtttgcaattatgcaggcatgtgagcgatttgcccccacagtgtaggacaataaggttggattggttggatgtcttgcaggtttggtgaatgtgttaactgtcaggaaggtacaaaattttggcacttggtgctgtcacattgtacccagattttgactcacattttcggtgaccatctatttcttcaatttaagtaattgcctctcaaattgtctggtggatttggaatgtatttattgcctccatttatttggaaatgcatggttgtttttcacc

SEQ ID NO: 25751 - DNA, 2264 bp, Oryza sativa
  ref <308>: DATABASE ACCESSION NUMBER: AK101193
  ref <309>: DATABASE ENTRY DATE: 2002-08-28
gaggccacacaccaccaacacaaaacatttccttgtccctcgccttcctcgcctcgcctcggctctcacacgacgcctcttcctctcgctactactagctcaagctaagctagcaagagcattccttgggctttttttcttgtccggggttgagaggcaatggcggtgatgactgatgtgtcgaccaccgggacggcactccggaccccggcggcgggggcggtgaaggagggcgacgtcgagaagctccggttcatcgacgagatgaccaccaacgtcgacgccgtgcaggagcgcgtcctgggggagatcctcggccgcaacgccggcacggagtacctgaccaagtgcggcctcgacggcgccaccgaccgcgccgccttccgggccaaggttccggtggtgtcgtacgacgacctgcagccgtacatccagcgcattgcgaacggggaccgctcgccgatcctgtccacccaccccgtctccgagttcctcaccagctccggcacgtcggccggcgagcgcaagctgatgcccaccatcatggacgagctcgaccgccgtcagctgctctacagcctcctcatgccggtcatgaacttgtatgtgcctgggcttgacaaggggaaggggctctacttcctgttcgtcaagtcggagacgaagacgccgggaggcctgacggcgaggcccgtgctgacgagctactacaagagcgaccacttcaagaaccggccgtacgacccgtaccacaactacacgagcccgacggcggccatcctctgcgccgacgcgttccagagcatgtacgcgcagatggtgtgcggcctgtgccagcgcaacgacgtgctgcgcctcggcgccgtgttcgcctccggcctcctccgggccatccgcttcctccagctcaactgggagcagctcgccgacgacatcgagtccggcgagctcacccctcgcgtcaccgacccgtcggtgcgcgaggctgtcgccgccatcctcctcccggaccccgagctcgccaagctcatcagcgccgagtgctccaagggcgactgggccggcatcatcacccgcgtgtggccgaacaccaagtacctcgacgtcatcgtcaccggcgcgatggcgcagtacatcccgaccctggagttctacagcggcgggcttcccatggcgtgcaccatgtacgcgtcatccgagtgctacttcggcctcaacctccgccccatgtgcgacccctccgaggtgtcctacaccatcatgcctaacatgggctacttcgagttcctccccgtggacgagaccggcgcggcttcgggcgacgccacccagctcgtggacctcgcccgcgtggaggtggggcgcgagtacgagctggtgatcaccacctacgccgggctgaaccggtaccgcgtcggcgacgtcctccgcgtgacggggttccacaacgcggcgccgcagttcaggttcgtgcgccgcaagaacgtgctcctctccatcgagtccgacaagaccgacgaggccgagctgcagcgcgccgtggagcgcgcgtcggcgctgctccgcccgcacggcgcgtccgtggtggagtacaccagccaagcgtgcaccaagcgcataccgggccactacgtcatctactgggagctcctgaccaagggcgccggcgccacggtggtggacgcggacacgctgggcaggtgctgcctcgagatggaggaggcgctgaacacggtgtacaggcagagccgcgtcgcggacggctcgattgggccgctcgagatccgggtcgtccgcccgggcacattcgaggagctcatggactacgccatctcccgcggcgcgtccatcaaccagtacaaggtgccacgctgcgtcacgttcccgcccatcgtcgagctgctcgactcgcgcgtcgtgtccagccacttcagcccggcgctcccacactggactccggcgcgacggtccgaatagtcggtcaaatccccacctcgtcgttggaccgtgtccaagaatctgaagtagtagaagccggatgcctccacctaaaaacacttatctgttatttttggaattaattttgatggttgctgtcaactctgtcagttagtggcaagagggtacctctgatgtgagggagagaactgcagaacgaacggaagaaagtgttgatgtaagaggttaccactagtagtactgtttgtctgtatcaggaatgtgattataatttaacctgtcctccaaaaccgtacgagtcctgc

SEQ ID NO: 25752 - DNA, 2639 bp, Oryza sativa
  ref <308>: DATABASE ACCESSION NUMBER: AK101194
  ref <309>: DATABASE ENTRY DATE: 2002-08-28
gaaatttagagaccagagcaaaacactcgtcgtcgtcgccgtcgcgtccgccggagcatgcttcgccctcggcggcggcggcggctttccgcggccgcgacagcgagtcggcagatgcagcagggctatctgagccaaccacgggtggaatgcggtgattttgaattttgtctaccttggcattggagcaggatttgtttcaactcttcaggtatcatgttggacaatcactggagaaaggcaggctgcacgaatcagggcattgtatctcaaggcaatacttagacaggacattgccttttttgacaaggaaatgagcactggacaagtggttgagaggatgtcaggggacacattcctcattcaagatgccattggagaaaagagtggcaagtgtatacaactcctttctaccttctttggaggcttcattattgcatttgtgagaggatggctcttggcacttgtgctgctctcatgcattcctccaattgcggtggccggtgcttttgtgtcaaggttgatgacaagaatctcaacccgcatgcaagaaaagtatggtgatgctggaaacattgctgaacagactattggggccattagaaccgttgcttcattcaatggcgagaagcaagctataaacacatgtaacaaattcataagaaaagcttatgaatctactctacaagaaggtgttgttaatggccttggattaggtaccgtaatggcaatcttgttttgcagttatggtttggcagtttggtatggatcgaaactgatagtcaaccgtggatacaatggtggcatagttataaatgttctaatgtctgtcatgatgggtgcaatgtccttaggtcaggcaacaccatcaataacagcttttgcagaaggtcaaggagcagcatatagaatgtttaagacaatcaaaagacagccagatattgatgtatgtgataccaaaggtatcatattggaagacatcacgggtgatgttgaactgaaggatgtgtacttcagctatcctaccaggccggaatatttggtattcaatggattctccttgcaaataccaagtggcagaacaatggccctagttggagagagtggcagtggaaagtcaactgtgatcagcttggtggagagattttatgatccacagtctggggaagtcttgattgatggaattgacattagaagaatgaatctgggatggatacgaggaaaaatcagtcttgttagccaagaaccagtgttgttctcaagtacaatcagggaaaacatcgcctatgggaaggaggatcaaactcttgaagagatcaagagagcagtagagcttgcaaatgcagcaaaatttgttgataagttgccaaatggtcttgagacgatggttggggaacgtggaattcaattgtccggagggcagaagcaaagaatagcaattgctagagcaattataaaaaatcctaggatcttgttacttgatgaagcaactagtgcattggatatggaatctgagagggtagttcaagatgctttgaatagggtaatgcttgaaaggactacaattattgttgcacatcgcctaagtacagtgaagaatgctgacgtgatttctgttctacagcagggaaagatggttgaacaaggttctcatgtagaactgatgaagaaacctgaaggtgcttatgctcagctgatccagctccaaggggcacagcaggatgctgaaatccataatgacgacactgacatgataataagaagcgattcaggctctaggtctataaatgtaaaaccaagaagccaaagcacctcatttaggagatcaattactaaaggctcctcttttgggcatagtggcaggcatcctatccctgctccccttgactttccagatcccatggaattcaaggatgatctgggcatggaggagactacagacaaagtgcctcgtggccagaagaaagcttcaatcagtcgactgttctatctgaacaaaccagaagcttttgttcttgtacttggttctgtaaccgcggcaatgcatggactcatgtttccaatatttggcatactgatctcaagtgcaataaagatgttttatgagccaccatcagaactcctgaaggactccaggttctgggcaagcatgtttgttgtggtgggagcttctgcatttgttctgattccaaccgagtacttcctgtttggattagcaggtggaaagcttgtggagcgtatacgttcactgacattccgaagtgtcatgcaccaggaaatcaactggtttgacaaacctgaacactctagtggatcgattggtgcaaggctgtctgttgatgctctgaatgtgaagcgccttgttggagacaatttggcacttaatgtccagactgtatcaactgtcatatcaggttttacaatagcaatggtggcaaactggaagctggcattgattataacagtggtagttcctttggttggtttccaagcctatgctcaaatgaagtttttgaaaggtttcaacaaaaacgcaaagctgaagtatgaagaagcaagtcaagtagcaactgatgcagttggaggcatcagaactgtggcatcattttgtgctgagcagaaagtgatagaagcatatg

SEQ ID NO: 25753 - DNA, 1123 bp, Oryza sativa
  ref <308>: DATABASE ACCESSION NUMBER: AK101195
  ref <309>: DATABASE ENTRY DATE: 2002-08-28
ggcgagtcggcggcgacaacaaatcgaaaatcgaacgggagaaattctctctgattctctctcgcgggcggcggaagcaatcgtagttagcagaggccggcgagcgagccgccaccggcgatgggcgacagccagtactccttctccctcaccaccttcagcccgtcggggaagctggtgcagatcgagcacgcgctgacggcggtcgggtccggccagacctccctcgggatcaaagctgctaatggagtagttattgccaccgagaagaagttgccttctattttagtggatgaaacatctgtgcaaaagattcagtcgttgactccaaatattggtgttgtctacagtggcatggggccagacttccgtgttttagtgaggaaaagtcgaaagcaagcacaacagtattatcgtctgtacaaggaaactatacctgttacacagctagtccgagaaactgctgctgtcatgcaggagtttacacaatctggtggtgtaagaccatttggtgtatctttgttgattgctgggtatgatgacaatggtccccaattgtaccaggttgatccatcagggtcatacttctcctggaaagcatcagctatggggaaaaatgtgtcaaatgcaaagacatttcttgagaaaagatacacagaagatatggagcttgacgatgccattcatactgctattttaactctgaaagaaggatatgaaggacaaatctccgccaacaacattgaaattgggataatccgatctgaccgtgaattcaaggttctgagccctgcagagatcaaggatttcttggaagaggtggaataatttgtctcaacaatctcatgtttcaaaccagtggacacctgagcagctgcctcgaagttatatcccctttcattcatgaactgattggcaccagtgacacgagacaaatgtttattcagattctcatgaatgaaaatgtgtttttaggaacgtatttgatttggcacggtgtcttctgtatcctcttgtgcccatcctagtctcctcggccagtgctacaactatttggcgtctccttacttttgtagtctgttttacttcttgccaaatgaagcacatgccatcttttgctctt

SEQ ID NO: 25754 - DNA, 1838 bp, Oryza sativa
  ref <308>: DATABASE ACCESSION NUMBER: AK101196
  ref <309>: DATABASE ENTRY DATE: 2002-08-28
ggttcattctccaatttcccctaaattgtgacatggtatcagagcaagagcaagggatcaaaccctaacgtcgatccggagtccacgccggcacgccggtggcagctcgccaccggcgagcccatccaatccgtgcacatcctcgtcagcttcgtcgtccaccaccgtcgagccgtcaatcgtggcagccaatcgtttcgtcgttcgtccacaagcagcaagcagatccagtcagcacaagcaacaagcagcatcaagcaatcaaatccacaagcaagcagcggatgcatgaacaagcattcagatccagttcttcgtcaccacgtcagtcgtagccaggccgtactcgtcgcggatcttgtcgtcgcgtctcgccgtggctcgtcgttgtcgccgcattcccattggccggtcgcggcgctctcttcatcgccgccagcgccgtcctcctcccatgtcagtcgtccagctttccgtccgccgcctgcgcgcgtgaccatctgcatcgtcgccgcacaggtcaaggtcctggtcctcttggtctagcctgctctgttctctctgcttctccacatagatgcttggagactggttactggacttaacagcaacaagccatcgtcttccctaatatcaagtagcagcgacagcaatttgcaagtgtcatgcagatccaccttgttccatattcaaacatcaacaaatagcagtagagaagcccatatcgagttatgcttccctcatcatgcagccggcctctgctcttgccggatttgtgaagccatccatagtctcaactatcttgattgttgaattgttccatcaacagatctattttgtgtttgctatgcttgcttactgctgccatcaacaagtcaattaatatcctttggtcttgcaaacatatcattgtgcttcagtttgagataggcaacagaaaaccaaggcacagccctgtgcatgtccttttgattttgatattgcttcttgtcatctgcatcaattgttctcttatgtcttttgctagtatcctaagtcatttgctagtatatcaatgtcatctacaaatcaatttcctatgtttcctatcaagtccatcaaagtccatcggttcgtcgaagtcatgcttgtcaatcattatcactatctcgctcgctccatgtcgaagttagccttctatcatcaccagaagctccacgtcggagctgatctttgtcatatcaccagctccccatcggagttgacatcatcatcaatcattgaagggccgaagaacagtttgtgaaggtccttcatctcgtcatcatcaccgtctctgaatcagtgaagagccaaagaacagtttgtgaaggcttttggtactaagggctgaagaacagtttgtgaaggctcgaggtctacttcattgaggataggatggttttctcttcttctaattcattcaagagcaatgcttcgacaacatcttcaaacatggactttgtatttatagtagtgtgtcatttatcttgtgtttagtttcaaatgcaatgctattgtatacacattgcatttgagcaggggtgttgagtattatgtgtttaggggtatattagtaatttcctatctctattgtactcatatatgccctttgggctaacacaatagcaactgttcattctccaatttcccctaaattgtgacaatagggtatgatccggaaacaataggccaagagaacccattattagtcatgggtcctgtgtttgtggtctagattactgtaactaaccggaatccttttgcgcacttctgcaagttaaatggtatgatccgtaagcgggatgcttgttcagccc

SEQ ID NO: 25755 - DNA, 1881 bp, Oryza sativa
  ref <308>: DATABASE ACCESSION NUMBER: AK101197
  ref <309>: DATABASE ENTRY DATE: 2002-08-28
gacagagcgttcgtcactcgcatctcctccgcctccggtatccaacctcccgcaccaaatcccaatccggatcccccacgctaaaccctagctttaaacccccgaatccaaccaatccccgcgccgattcccgccatttcgcgcacctcgtgccaggatctgctcctgggcggcgctcttttagaaaaaaacctggcagatttcgacttctgcaatggagcccgtcgatttcggtgggggcaaaggttatggaaggaatctctgtctgagcaacgatctgatccttctggagtaaggttttgtgctgggtggatttgggattcgatgtggctggagttgagctcatctcggggagaagggattcggacggtgtttgatctttctgtcgtgattgctttgcttcgggtttgctcagcgctagaagatttgctcgcagaatcccgcgcggagttttgaagaaagcttggtatttcctggttcgttgtggtttgtaagcgatgcagttcgaggacgggggagatgttcatgttggtgccggtgagggtgaagatggtggcagggtcacagtggatgagcttaccagatgtctacgttgtggcatcagtgcaaatgcgacgcctcatatgcgccgtggaccagagggacggagaactttatgcaatgcttgtggtatagcatgggcaaagggaaaagtgcgaaaagttattgattctgatacccccatggataatgccatgtttgcacaaatggttccagaacttagcatggaattcgatgacgaagataaagcatatgagttctacaacaggtacgctggacatgtgggattcagtgttcgtaaaagttcatcggacaaatcagctgaaaacatcacaaggtcaagaacctttgtatgctcgagagaaggttttcgtaaggacaagaaaggagctaaggaagttaaaagaccacggccagaaacaagaatagggtgtcctgcacgaatgtcaattaagattacatctgatggtaaatatcgtatatctgaattcgtaccagatcataaccatcagccagcacccccatcaaccatgcatatgctgaggtctcagagagtacccactgagctgcaaacaactgaagcagactcctcagaagaatcagcgacaccatcaaggttttctagttgctctttggtgaagcaagcagaagtaattagacataccaattttctccctgcagaatacaggtgctctctttgttcaaagcgcaagaaaaatatgcaacctggtgatgcaggagtaactgtaaagtacctgcaaagcatgcagctaagcaacccttctttcttttatgctgtccagcttgatgaggatgacaaactgacaaacattttctgggccgattccaaatctagaaccgacttcagctactacagtgacgtggtttgtttggacacaacctacaagataaatgaacatagcagaccattaacactattccttggagtgaaccaccacaagcaaatctccatatttggtgctgccttgctttatgatgaatcagaagagtctttcaagtggctatttgatacattcaagattgctgcaaatggaaagcaaccaaaaacaatcttgacagattggtctatggcagcaactacggcttctgcgataacagcagcatggcctggaacagttcatcgcctttgtccatggcaagtgtaccaaaactctgtcaagcaccttaatcacatctttcaaggctccaaaacatttgcaaaggatttcggaaaatgcgtttatgactacgatgatgaagagaacttcttgcttggatggaatactatgctagagaagtatgatctacgaaacaatgagtggattaaaaaaatatttgatg

SEQ ID NO: 25756 - DNA, 3413 bp, Oryza sativa
  ref <308>: DATABASE ACCESSION NUMBER: AK101198
  ref <309>: DATABASE ENTRY DATE: 2002-08-28
gatccgtttccctcgccgccgacgagtccccgccgccggctgcagcccaggtatggaggaatccgacgcggcggccgcaagcgccaaggcccccaacggcgaggcctccggtggcggcggccgaccggtggaggtggaggacacgctccccggcgtgctccgcagcttcgtcgacggcgtctgctcgcagggcggcggcggcggcggaggggagccgctgctgcggaggatcagggcggcgtcctgcgagaccgccccgcggctgcgcgaggcgtcgaggaactcggcgcgggacctgctcgagtggaccagaaggggcagcggcctccgcgccatcctcgtcatctcggtgagcgagccccacctcaccggccgcgcgccgcccccacttccctttcccctctcggcttggacgccttctggatccttcttttgcatttcctttgactaatccccatagagatgcgcgcgaagtgatttccatgtctttaatttgtggcttgtctcctttgttattaagtaaatacagttttaactgatacatgctgtcattagggacttgatttgttgccgtgtgagcatgtgaccattcgattatcaagctctaatggccacaatgttcttacatttcttcatttaagtttcaatgtgttacagaattctgtaatctgtagtgtaataaggaaggatgggatgaattgtaccatattttacagaaaacacgtcatagattactgccgctggtcggttagcaggtatgatagggtatgttttcactatccagagaaggatgtgtgatctctatttacagttaaattcattggatcacatggctagcatgcatcagcgtaatcaatctgatttatcttgtatggataaacaatgtaatttcaaatggctctacttgaggtgtgttcattgaatggttgataatttgatgatcatgctttctttttgtgttcagtaactgcagaagtgtattgctgtgggatgtgggcatgaactcatttgctgaatttgccatttccttatttgattggatcatcttttacttttgccatttagtttaagaatatgtgaaatgtattttaagttaagctaccctcatttcatctgttcctggtgtggcaggttggaacgatcacacttattgcattgactggccttctaatcttcatgttcttcctgctggttgcaaccaccaatgctgttgttgtttccgtcctgatgtcgctggcagctgctggaggattcctggctatgttctttgcttgcttggttgcagtgtatattggagtagtatcagttgctgtttttgtcatttccgccacagtcatctcagcaattgtcggcgtcatgattgctactggtacaaacttactctctctttctgtcatgaaaaccataaaatcccttagaggtgtccatatttacaaactagtttttaggtgtgttagttaatctaatctgtaatcatacatcttctgttagcacattaatagccaccaatatatcatgttttgcaacattaacacagttatcctttgttgcccataccactttaacatatctggttggtcatgtttattaatactataaatataaatatgtcattattaactatcctgtcccaataagtccagtgagaaaaagtatttaaaacattctgtcttcagttcacttagtcattttgtaatgtactaacatgttattgggtaagcaccgccaagataacagctagccagtggctgctgctttaggggagagaagagtgactagacagtccaagtttgcctattcttttccaaataaacattaggtgctcctgacgtagagcatgataagtaacaatagaggcattttttgctgaaagaagggaactggtactaggaagacacgtctgactgggcacaatcttgtactaacacaatgtcaacacagtaatttagcatgtgtgagtttgatagtggccactggtttgcctatgggcttcccttggcatccaacgaaattatttgtaataaattgctcagcaattaagaggaaccacatgttatttacatccactggttctcttaatttgttagagtaaattataattgtgaagcaagtttttcaacttgaagtttttttttcacgttaacttactcaagccaataagtgaactgtttatagtaatgctacgtaattttggtgggtcattaatgcacttgatagtgttctctaattagctaggagtgccatctggaggcatcttaacctctattatgtttcatgttagatccccttataatgtgtacagagtgaattccatgggtgaaaagtctgttaactagttctagtgaaggggctgtgtaataatttctgctttagtaaatctcaggcgcattagcacacgtgacgtactagaaagttatgcccacaaccatggaacgttgaatcgtatattttagagtgaatatgtagcatgagatcaaattacatccacttagcaatgatttacatgtttggttttaagaatcaactcccatacaacactttaccaaaagcaatgtatttttgaccggtggtgtagaatatgttgccaactccttcttaacttttggaatggtagacatcaatcaccacggcactatcttgcacctttttgcttctggagaataagagaaacatagacacgaacacgggtggattgcgataagcgggaataaagtgacataacaattaggtactactttagcaatactactttagcaaaactagctattgatggtgaatggttgaatgcttcaaaatctatgaagattgtgatgctgcagatctagaaatgtgaacacatattggattccttccctaaaagggggctattgtttttgacaaagcagcttctctgcatgaggctgctcttttcggatctattctttgccaggacatggcaatagattattacctcttaattaacaagctgtctgcatcacctgtactaatgtcctggctgctgcaggttggcttggattcttttggatgatttggtttgctgcaaggaagagcatggacctcacgaagcactcgatcggcgtgacaaattcggctatccagtcatactctgcttctcgccatgcaaagcagaagcctatcgactgaggcgatctgtgattcggttgtgagctatgtggctgccatatcgtctacgagttatgtgctgttgtctatgcctctatgtgaattacggcttgtctagtttttgggagtgtatagaacatgcattgtagcagagtacagctatggatgatctctctgtatattggtactttttagtgtgaggcactctctgaaacctctctagtttgtatgatttggcaccgtagttggtatatggaataagctgtgctgcaaagcacttgttcgttccc

SEQ ID NO: 25757 - DNA, 2405 bp, Oryza sativa
  ref <308>: DATABASE ACCESSION NUMBER: AK101199
  ref <309>: DATABASE ENTRY DATE: 2002-08-28
gctccttcctcctccgttgctcttcgacgattcaacccagccgccatggagagcggagggaggtagctgactagctggggctggggatttccggcgaacggaggtgaggttggtgccgctccggccgctacttccgcgacccaaagaatcggcaagtccatagataccggacctccgcgaatgccccgcggccatagacgccgccgccgctgcgcatgcgccaccaccacctcgccgtcgccgccgcgaggtcccacgcctccctcctcaagtccggcgtcgccgcccccacgccctggaaccagctcctcaccgcctactcccgctcctcccccgatggcctcgccgccgcgcgccgggtgttcgacgaggtgccccgccgcgacgaggtctcctggaacgcgctcctcgccgcgcaagccgcgtccggcgcgcacccggaagcatggcgcctcctccgggccatgcacgcgcaggggctcgcttccaacacgttcgccctcggctcggccctccgctccgccgccgtagcgcggcgtcctgccatcggcgcccaactgcagtcgctcgctttgaaatccggccttgccaacaatgtgttcgcggcaagtgcattacttgatgtgtatgctaaatgtggccgcgtgagggatgcccgacaggtgtttgatggaatgccagagcggaacactgtttcttggaatgcactcattgccgggtatactgaatctggggacatggcatctgcactggagctgtttcttgagatggaaagagaaggtttggctccagatgaagcaacatttgcgtcgctgctcacagcagttgagggcccaagctgtttcttgatgcaccagttgcatgggaagattgtgaagtatggatctgcgttagggctgacagtgttgaatgcagcaatcactgcatattcacaatgtgggtccctgaaagactctagaaggatctttgatggaattggggacattagggatttgatctcatggaatgcgatgcttggagcttacactcacaatggaatggacgacgaggcgatgaaattctttgttaggatgatgcaagagagtggagttcatcctgacatgtatagtttcacaagtatcataagttcatgttcagagcatgggcatgatgatcatcaagggagagtaattcatgggttggtgatcaagagtgctctggaaggagtcacgcctgtttgtaatgctctgattgccatgtacactaggtacaatgagaattgcatgatggaagatgcatacaagtgttttaactctttggtgcttaaggacacagtgtcctggaattctatgctgactggatattcacagcacggtttgagtgccgatgccttgaagttcttcagatgtatgtgttcggaaaatgttagaaccgatgagtatgcattttctgcggctctgcggtcctcttctgaacttgctgtgcttcagttaggtaaacaaatacatggtttagtcatccattctggttttgcttccaatgattttgtttccagctcgctaatcttcatgtactctaagagtggcattattgacgatgcacggaaatcttttgaggaggcagataagagtagttcagtgccttggaatgctatgatatttggttatgcacaacatggacaagctgaaaacgtagacatacttttcaatgagatgctgcaacgtaaggctcctttggatcacataacgtttgttggcctaattacttcctgcagtcatgctggtcttgtagatgaagggtcagagattctcaatacaatggaaactaagtatggagttcctcttcgaatggagcactatgcatgtggtgttgatctgtatgggagggctggacagcttgataaagcaaaaaagctaattgattctatgccatttgaaccagatgccatggtatggatgaccctattgggtgcttgcagaatccatgggaatgtggaactagcaagcgatgtggccagccatctatttgtggcagaacctagacagcactctacctatgttctcctgtccagcatgtattctggtcttgggatgtggagtgatagggcaacagtgcagagggtaatgaagaaacgaggattaagcaaagtccctgggtggagctggattgaggtgaagaatgaggtgcattctttcaatgcagaggataaatcacacccaaagatggatgagatctatgagatgttaagggtgttgcttcaagtagagcagatgctttctaattgtgaagatgaagatattctcatgataacttccagtggcatatgaacttgaattttgatagtccactattgtgtacgatatgttctcatccagatagtgttattccttaagtaaacatatatcacaaatattatttttctgacc

SEQ ID NO: 25758 - DNA, 1794 bp, Oryza sativa
  ref <308>: DATABASE ACCESSION NUMBER: AK101200
  ref <309>: DATABASE ENTRY DATE: 2002-08-28
gcctgccgctacctggcgcagcgcggggtggtcccctccctgcccgccttcaacgccgtgctgcacgcggcccagcgcaccgggcggttcggggtcgcctgggaggtgttcgagcttatgacgctgaagcgggtgtacgccaaccagagcacagttgagcttgtcatcggcgtcctcagccgggagggtgcgcttgccaggatggctgcactcgtagagaggattcacggtaagaagtgtgcaccaggcgtggtggcacacgtcgcgctcacgctgaaaatcttcgaggaagggaggactgagcaggggatcttgctgctcaggaggatgctgcagaggaacatggtgtttgacaacattgcctactcgctgatagtgcatgcccattgccaggctggtgatctgaagtccgcatgcgagcaacgggatgacatggttcgccgtggctgtcgcctgaattcgttcgtgtatacttgccttatcagagtacattgccgtgcaggcgatgttgatgaagccatgcaattgtttgaagaaatgatctctattgtgttgaagccgtatgatgctacatacagccatctcactgctgggtgtttcagacaagggaggatgaaggagggctcggagtacatggacaagatgctccatcaaggttctgtgccggatattggcacttgcaatgatatgctagaggcgctttgcgattcaggacatgtcagcaaggcaaacgagctgctaacggcactgatggacaaggggtttgttcccgatcaaaacacatacttgaggatgaccaatggatatggcaaggttggtgatgctcaaggtattatcaagatttatcatgagatggagcacagggggcttaatattggtgttgatgtttttagctccctcattagggccctttgcaagtgtggagatctcaaggaagctgagaaattcttggctattctggaaagaaagctgttggcaccaactagtgaaatatatgatcttttgatcagtggtaactgtgagaagggtaacactaagaaggcactttggttttatgacaggatgatgacagggaacgacaagctagtcccctctgctgatacttttatgatgttagtgagaagagttatcaaaccaaagtctacctgttcccctaattgctgatctcccaaataagatctaattgcatggggaattgatgggagaaaacacaggaaatgctattattacccaacatgatttgtcttcccatctcttctactctatgagaatgctgtgctgcagctgagtgctcatgccgcctggttctccaagcaagagggccaaggaggggacgccgatgttggagcgttgcctcccacatttcgccgttgctattggcagcgtcagctcagatgtggtgcaggcagctagtacttactgctgcacggttgagtccccgtcacacaaagtttggcaccatgtctctcttttagcacagtgctaccagccagctccgaggtagcaacagcaacagcatttgcagtgccagattgatgtgcagctttgctcacgcaggagcaagcaaccaagaacgggagtaccggagcatgtgagctatgtcgtcgtcgacagcggcagcgtggcgccgggcaagatcgccggcgccgccgtcgccagccggagccgataaataacacaagtacgcagtactactacctcactaattttgcttctagcacgtcgtttgctcattccatttcacggctgttatatacgcttaaaaactgatctgcatgcaaatttacatctcgc

SEQ ID NO: 25759 - DNA, 2058 bp, Oryza sativa
  ref <308>: DATABASE ACCESSION NUMBER: AK101201
  ref <309>: DATABASE ENTRY DATE: 2002-08-28
gactcgtcttcaaacgtcccaactaagttatagcagccaagagcgaatcgcctctggcctctgctactttttcatcccccgcacggaaggatatctcaattgtgaatcgtatcgcatggtgtccggggaaaaggagaagtggaagggaagccagaagggagacgacgagagatttgtccgggcggcaagccaaggcggccgttctttccgtcgtgaacgcttcgtgcaaaacatccatctgatttatcttgcgaattggattgcttaacctaatctgggaattcaagtcagtacgtacgatatgccggcaccatcggcatccatccatctgggagttccaactccgtacataacatctcatggatccaaaattgctcgcctacacatgtatgactggattgtgctgattcttctagtcgtagtagatggaatactgaacataatagaaccattccatcgatttgttggatcggatatgatgacagacctcagataccccatgaaagacaacacagtcccattttgggcggtcccgataattggtatcattggaccaatgattatcatcactggaatatacttcaagaagaggaatgtgtatgatttccatcatgccatactaggtctcctattttcagttcttatcacggcggtaataactgatgccattaaagatggggttggtcgaccgcgtccagatttcttttggcgctgttttcctgacggagtacctgcttatgataatttcactacaggagtgctttgtcatggtaaggcgagcgttatcaaagaaggtcacaagagttttccgagtggccatacttcttggtcttttgctggccttggtttcctgtcatggtatctggctggtaaaataaaagtttttgacagaagaggccatgttgcaaaactctgcattattattctccctctgctccttgcagccttggttgctgtttctcgggtagatgactattggcatcattggcaagatgtgttcaccggtggaattttggggttggtggtttcttcattttgctacctccaattttttccaatgccatctgatgaaaacggattatggcctcacgcatacgcccggcacattctcaaccctgatcagctggagaacaacgcgcaacccacgtccgtggatcgccctaactctctgccgaacgggtcctttagaagccctaatggattggaaatgggaaacacgggccaaggccaagcattagatttcatggaagctggtcgtagatatcaataacgagataaaaacctgctactgttgtagcagacatacctgacgtactttttgatagactgagaattatacggagacctttcaggttcactttggtacatataccgtgtagaattgttacttgtacatttcaacatgatgatgttagctatttctcatgtaaatctataccagattaaaataatgcacctacatttgggtatccggaagtatgcctgacagtagatggtcacattgtcgcttggcttatcatacagaatagggtttggacctctggccggcttgtgaccagggggttggaaaaataatggcaggtgccctctctgcatataagagaagatgatacggctttgcacctcgtcgccgagtgcaggtatacgagaaggatttgaaacctcgttgcgacatgggtagggtttcaccagctagaactccgacgctgggggtggtgcaaccggtcaaagattggtggaaaatactggcctctgtgtctggcgtccctaagaagggactctgcaccctgattctactcatcgtatgggaagtttggaaggtgcgaaataggaggatatttgattataaggaagccacaacctcgtatctcctttcaaagataaaagaagaggctggcatgtgggccttggcaggcgccaagtgtcttggagagatcatcccgcagtttgtatagtgtacagctttccttattttttgctttttctttacccttaggggttgtattttttttcttgctatattcaatgaataagcacattcttgtgctagttccttcc

SEQ ID NO: 25760 - DNA, 4080 bp, Oryza sativa
  ref <308>: DATABASE ACCESSION NUMBER: AK101202
  ref <309>: DATABASE ENTRY DATE: 2002-08-28
gaagacgaacgtgcttcggttacttcgccggcggagtggtggttggcggcggtggggggcggtgagccggcgacggtcggcaccgcacgtcgaagcgcccggcgtccgcggtctgccgctcccggtggagctcggcgaggtggcggaggcgttgcagcctaggagaggaagcgctcggttgaggcggtggacggcggagtagcggcggccgtgggggcaggtgccggcgccaccgccaccgcagccggcttaggcggaagagacggcgggcctaacctgctactgtcccgtccccttacgcggtcacaagccattgacgccaagctggttccccttggcccttgccacttccacgccggcagcaacatccctgctacttgaggccagaaatgtacacctcagatgttagtgttatggcatggagcataacttggaaagttaagtgttcatataactacatttttttataggaactctcatataatatcatgagcattgccactatctgaaaacgaggcgacagtgtgaaattttgcttaccaggaggctcagcaaggcggaggtacaggttctcaccaaggctggccttcttctctgagtcgacaagctcccctgtccaaaccaagcatcttgacgggtcagccatggtgccgccactgctcaagttggcgtaagcatatgccttgcaagagcagttgctgctgcactcggccgcgcactggtcgaagctcctgttccggatctgcaagaacttgtcggggaccttcatgtcaggcaatgacacgaagcggtgaccgccctctccgcatctcagctcttcctttctccggcatcctgattgcgagatgctgggatctacaggctcgaacccatcgaggcaccggcacgccgggacggcccccgtgaagtcgcagtagccaaacgggccgcacgagccatagacctcgcagctgccggcggcggggcgctggaagatcaacatccatgacgacgagctgttgtcccagctcaggaacatcatcgtgcccgtgctgtcaagtgtgaggcgtgtgtagatggagctgtcggagacagtgtatgagtagtagagcttgttccctgagtcgatgagtgtttgatacatgaataagctgctgttactcggatactgggcgccggacaccgtcacgctggttctgacgccgttacggcagtatggcttggtcccgttccaggtcatgccctggaggtccgagctggggtcgaggctgaaggagaaatctccagtggatgggtcatcatggctcctccacgcagtgaggcgtccgatgatctcggacttgtagctcatcaagaacatcatgcctgcgaggatggtatcagtcgggtgatcgaagctttgccatatgtcggtgccgtttggcaaccggagaacgaagttccccgtgtcgagcagcacggcggaggctccggtggcgctgatcttggttgtccaaagaatgtggccttgggagtccgacagcaccatgcctgagctgttggtgatggcaagggtcgctgacgaaggggtggtgattgggttgtcgcggttggcaacccacacaacggtgcgctgggggatgttgtggaaccagactccaacatagaggctattgctgaagttggccggggggaagaagccgagggcaaagatgccgcccttggagatgagcatctcgctgggaaagattggctttcccagtgtcagctggtcatcggttttgcatagaggaatcgagagcagcaggaggaacatgagaaaatagaccatattgcctgttagactttctgcttcgtttgcttgtcatgggtcaagttatatctttcattcataatgcagatatggactggtgtagttggagttcaattcccttgctgtcacctcatctgaagatcaggagaaatgtgagatggctaagtcctgattcagactcatggacagagacagtaaaggaccctgtctgaattctgatgaccaggtcacctggtcatgatactccaagtcgtgtgacaatgctgcacgaaaacgaaagaatgctgctgccatggactttggagtgataggctagtgcaggcaaaagcgaaacctcacgtgcgttccatggctccacgtggtgtcacaggcccttgatgctgccactctccatttgaagaagtacaataggggaagaaatggtgagcataccaggagagtcggctaaccggaggtataggttgtcaccaaggcttgccctcgccatgtcagcaagatccccagtccagagcaagcaccttgactgatcggacatggtgtcggctttggtcaagttgccataagcataatcgtaggccatgcatgagcagttgtggctgcacttggccatgcactcctcgaagcttctgttctggacttgcaagaacttgtcagggagcttcattccagacatggtcacgaaatggttcctacctccgcatcccaactgttgctttcttcgacatcctctcgaagagttgaaatcacttggctcgaatccatcaaggcactggcatctggggatggccaatgtgaagtcgcagtagccgaatgggccacatgaggcgtagagattgcagtcaccagcggccgctggctgttgagagatgactgtccaggacgatgagctcccgttccaactcaggaacctcatgttgcccatgtagtcaagcttgattcgtgtgtatggggagccatcagaggttgtgtacataatgtacaactcatccctagtgttcacaagtgatttgtacatcaaagtggcaatgttgctcccgtatgcttcaccggacactaacactctattaagtgaaagtgcaatgaaacggtaatatggcttggtcccgtgccagatgaaggcctgaaggtttgatctggggtcgctgtggtaggagaagtccccggtggatgggtcattcggtcccttccaagcgacaagtcgcatggcgacttgtgccttgtatctcaggaaaaacttcttgttggggagaagggtatcagttgggtgatcaaagctttgccatgcggttgtattgtccggcagccgaagaaccaagtttcctgagtctagcagcactgcataagctcggtcacctctggtgttgatgttggccatcgtcgttcaaaaggtgtggccttctaaatctgacaatacaaagttagaactattgctgatggcgagcatcgcagatgaaggggcagtgatcggcttgtcacggttggcaatccaaacgtatgtgcgctctgggatgttgttgtaccatatgccgaggaataagctctggttggaagttgctggggagaagaagccgagtgcgaaaaccccgttctgggagacgagcacgtcgccagggtagagtttctttgcttgtgtcagctgatcatcgcacttgcagaatgagaagatgaaaagagggaagcaagccataccattcatttggtcttgttcttagctttgcctagttgcctgcaaagcgtagagaaatagcacacacacatatgggtgtttaattatctgatgcatacatgattctcctgagtcttgactcttgactcttgaggagcacgcggttggaccaaaggaagcagcgtaataacgaatggccgagactattctgtccgtcgagataaagttttgctacgaattcaaactgaactgtggggagactacggtgaagtggcctgacgagagcataggcgtagctggtattagtactcagtgttgtgatgctaacttgtgcagtttgtggctggctggctggctcggtggcaccgggacaacctcgcaactagaaatatcgacgcttgaacgcttgtgcacaacagaaaacttactacaactatttctgtagacgacaacatgaaggttggaggatcaacgatttatgctcaagaacaattgatggagactactgaaggatcaaggaagttgtttgcgttacgcaaggagacgacagggattaccccaagagactttccttcttttttttttgtaaaccattgaaaatgaaccatacacccacaaagcaatcatattcctaggttcttgc

SEQ ID NO: 25761 - DNA, 640 bp, Oryza sativa
  ref <308>: DATABASE ACCESSION NUMBER: AK101203
  ref <309>: DATABASE ENTRY DATE: 2002-08-28
ggaggtgagagacagcgcgcgccaccgccgccggcgccgctattttcgtgttttttgatttcacggtgcgcgcggtggccggccggagatgcaggcggtggcggcggcggcggggatgatgcggcgggggagcctgacgatagacccggcgggggaggaggaggcgccggccgagagggtggggcggctggtgcgggagagccccgtggtggtgttcgcgcggcgggggtgctacatggcgcacgtcatgaggcgcctcctcgccgccgtcggcgcgcacgccaccgtcatcgagctggagggcggcgcggcggaggaggaggaggcggcgctgggcggcggcgccgcgctccccgcgctcttcgtcggcggcgaccccgtcggcggcctcgagggcctcatgggcctgcacctcagcggccgcctcgtcccgcgcctcagagaggtcggcgccctgtgcacgtagcccgcggggccgccacgtgtcccagtcgtcgtcttcctccgtcctatcctctctaccatggcttagctccatgccttccatgtacataagctgggttatctccgccatttcagaaatctagagggggtggggtgaaaaattccacgccgaaataatactaaattttgtttgggc

SEQ ID NO: 25762 - DNA, 2453 bp, Oryza sativa
  ref <308>: DATABASE ACCESSION NUMBER: AK101204
  ref <309>: DATABASE ENTRY DATE: 2002-08-28
ggcgtgatttggaaaatggggaattccacagggtttctgagacattcgtcgccgccgcgcgcattggcgaggcggagagagagtgagagtgaggaggagtttgggtgatctctcccccgtcgctagggcattcgcttcctccctccttaagcacgcacgtatgcggactcggtttctgaagtgtcttcaagaaaagttccttctctgggcttagcatatctggtgcatctactagtttgttagattgataagatctgctgttacaaatatatttttcatagaaatgctccctttgcccccagtctggagattcctcataagcacgttgacagggcacactcttcaactcactaagctttgtatggatatgtgacttcaattctggacacagttcactcttatttttgcaatcatcatggtacccatagagttctcccacaaaatctgctaaagaaagttcaagatcatcttcttctgcctgtttcatggatttggaaccacttggatccagcaaaccagacggagaagccatggctgtgcttgtgctgtgacttttggctctgttttgtttggtgctctgcattgaacttttttccagacagacatcatgtcccaggtcagctaatattctttgaacctcttccttgggaatctttttcacctgttttaccttacccagctcgtcctccatgagtcttttgacggtttgtttccttgtgtcgcattcctctatgttctgaggaatataagaacaatacacttattccaagaagtaatctttaacatgcatcaaaagaaataggtagtactgtctacatgataaacataagcttgatggaaagctatatcagttaaaactatttgatgtttaccatgccaacatacacttgaagcaaatctggttttagaactcacccaacagattacaatgtaaagattgctagtactgtctactcaaattttttcttctctgctggttaatgcagaatgcttgaatcaagtccctttcatcaaagaaggaataatggttgctaaatccaagcctacacatgataagtaggcaaaaagaagtatatgtgggatcattttgtcatgcttttttttttaagtttattgttccacaacttgcattaagctaaactttcccgtgcatgttttcgaagcagtaccaagttcatatgttgcatttggattttggacgacttcttttctccatacttgctctagatatgttctggctctgaagaaaacacttagcatgaaggaattgactgccattaacatcaatatggcactttcagttccattcatcaaaattattttgttacacaagtaactgaatagtcaagtatggttaggatcactagacttctgttgcatattcgtggtgttaacaaaagcagacaacagcaaccaccagcgtgagcatctatgctttttaccattaaaattacatacttactaaaataacttacatcctccccatattcatctgtttcttcaaagtccctggatttctttcttgagtgcctcctacctgcgaccatgcagagttgtaagaagatatacaaattatgataactaaatatttttcttgaatgccttcatatttgccagatgattccgaaatgtagattagagggatttattgacagtctatgacatcagaaaaatgtttactgaaggtcaaatatcatagattgattgtattgccatgcaggtgctgcattacttatattgctgcacatagttgacacaatttcacaaactgcttagtaatggtaatcaaacaaacgagaagcaaaattgtcgactttcatatttactgacagtaatcagttttttttctggagataataataagaatgctttacatattctgttttcagtctcttgtatagcagatgaccacaatgcatattaaatttcaaaaccatatcctcagagttctaccagcaaagtaagtggctcagatcatgatcacgatcctatttgcattgtcatcatgttcatcaggtattacattttactttaaccatgaacctggagagaattacctgaaagcccaccgaaagtgtgccttctgcttccttgcttcctgtccaacagaaacttagcgtcacgtcggaaatagagcatgccgatgaggccccacatgcagcctatgttctcctgacgcctagccagtctttgacttctcttccccatcaggtttggttcctgagagaaactctgcagttagctgatgaacacttaggattcatcccgatgaaccatgcaagccaagaatgaaagaacaaaagaaatgagattttgcaggagcaagagaagatgaaatgcagcaaactggcagcataaaaccaacaggttccagtgttctgttattaatttgtgtactgtcaaaaccaagcaaaattatcaaaggaagatatgctaaaaactcctcaaatcct

SEQ ID NO: 25763 - DNA, 2925 bp, Oryza sativa
  ref <308>: DATABASE ACCESSION NUMBER: AK101205
  ref <309>: DATABASE ENTRY DATE: 2002-08-28
ggccactctccattcttcctctcctcctccccccgcttctcctccccacctccgcctccgcctccgatccgccgccgccgtcggcgaccgccggagccgcgtgtagcacgccgtctcacccccgccccccccccccaatcgctctccatttccctcccctttcgctcgctgctgctcccgcacgccgccggtgcccggatcccgctggccgacgtcgcccctgccgccgagctgcctcctcctccccttctctcgccgctcgaaatgatgttggagctctggtggtaattaaccatggatgcaatggaggccgaggaaggtccttttctggctaatgatgctaagttgcatgccggaatgtacagagcatttcatcctgcggtctcaaaacttgtagcgattttccctttcattgaagcatcaagacccagaagcaaatctggcatacaggcgctatgctctctacatgtagctctagataaagccaaaggtcttcttcaacattgtgcagattgcagcaggctctacttggccataactgcagaaactgtgcttttgaaatttgagaaagcaagaacccaacttcaggagagtcttagacgcgtggagggcatagtaacagaagaaattggttgtaagattgtagagattattgctgagttggaagaagtggtatttacattggatcaatcagagaaggaagctggtgacgaggtgatcaatttgctccagagaaacaggaaaatgaatagttccagtgatagtggggagcttgaggtttttcatatggctgcactaaagctgggaattacgtcttccagggcagcactcactgagagaagggccctgaagaagctaattgagaaggctcgttctgatgaagataagcggaaagagtatgttgtgtcatacctgtacaatctaatgaggaaatactcaaaatttttcagaagtgaggctggtgatgatactgattctcaaggatcgtctccatgctcgccgacaatattaggcatggaggacatgtatggaccctatggtaatggccgagcattcagcagacaactttcgagtattcaatcattcaattcaaggtttggatctttcaactctaggcttgggtcattcaattgtaggcgtagtggtccaaggtccgaaaacatgtcgatccctcctgaggagctccggtgccctatttccctacaactgatgtacgacccagttatcatttcatcagggcaaacttatgagcgtgtttgcattgagaaatggtttaatgatggtcacagcacctgtccaaagactcagcagcaattatctcacctgtctttgactccaaattactgtgttaaggccctaattgccagctggtgtgagcagaatgattttcctgttcctgatggtccaccaggatccttcgatgtaaattggagacttgctttatctgactccgaagcgactggctgcgtgtctcttgaaagttttgactctatcaacgtgaagagtgtcaaggtagttccattggacaacgtgagaaaagaagagccagcaaacaacgaatcgggaacattggacgacagctcttgttatgatttcgatatgaatgaggggtaccgaaacttactgctaatgcttcatgaaaaaaccaacttacacatccagtgcaggttggttgagcagataagatatcttctgaaagatgatgaggaagctagaatccagatgggctcaaatgggtttgctgaggcactagttcagttcttgaggaacgctgtgcaagatggaaatgagaaggcacaggaaattggtgccatggctctttttaaccttgctgtcaacaataacaggaacaagggacttttattgtctgctggagtaatcgatcaacttgagcagatgatatcaaatccacgcctatctgctccagccacggcactataccttaacctttcctgcctacctgaggcaaagaacatcattggttcgagccaggctgtgtcattcctagtagaccgtctgttcagtcatgaggcccgcgacacaaaaggcagctcttgcaagcatgatgccctatacacactatacaatctctccaaccaccaggccagcgtaccgtcgcttttgtctgcgggcattgtggaagctcttcactctctcctttcggagtccctggcgtctgagggcctgggttggacagagaaggcccttgcagtgctcatcagccttgcggcaacccaagctggcagaaaagatatcatgtccaccccaggtctgatcagcaccttggcgatgctgctggacaccggcgagccaacagagcaggagcagtcggtgtcctgccttttggtgatgtgctcagccgatgacaagtgcatcgcaccggtgctgcaggaaggagtggtgccttccttggtttccatctcggcaaccggcacaggcaaggggaaggagaagtcccagaagctgctcaagctgttccgggagcaaaggcagcgagatggggcacagcctgtgccgcagcaagctcagcagcagcagcagcagcagcagcagcagcagcaggcgggagagaccggtaacggcaccatggtgtgccgccgcgactcaaaacagctgtgcaagtctaaatcgaggaagctaggaaggactctgagctcactgtggaagaacaggagcttctccctgtaccaatgctagcagatttttgagctgagtttgatcagtggatatgtacatcttttcttgttccatgtttctcttgatctttcttttttttttgccttctttgttgtttccttgtgtaaagtaaaactatcttcccccccttctcggtggggtgatgtaggccatttcctctttgtttttctttgccaagatatgtgcatagctcatctttcactctacttaacaagttcagatcagatc

SEQ ID NO: 25764 - DNA, 1965 bp, Oryza sativa
  ref <308>: DATABASE ACCESSION NUMBER: AK101206
  ref <309>: DATABASE ENTRY DATE: 2002-08-28
gacgtagaagtacgtagtacttcacctcctgtacatgtttgcagctgcagagccccccacacgcacgcacgggaccagcccgccccagggtgaaggaaaggaccatgcaacatggcgagtaggcgtagtgtactgtgctgctctactgctctgctacaccaaacacacacatctgcaaagatcaaaacgctcgcgaaggtgacgctaatgatggagatgtcgatgccacgaggaggaggaggaggaggagaaggtgtagtgatggtgtaattgccggatgctggtgcatccgatgaattaaccagagtgcgttgccgtttgcattcttgcagagtttggtctcgcttaacgcgcgcttttgagaggtaaaacgtaagggtggctgcgttggccggccgcgcgcgcgcgtcatggaggcgtctcttgttctgctctgcctctgcgtctttcttgcgagcggcggagaagggaggtcgccggcgggcacggtcctcccgctgcaggtgcgggtgcaggaggtggagttggaggcgccggcggcgaacaggctccggttccggcacaatgtgagcctgacggtgccggtggccgtcggcacgccaccgcagaacgtgacgatggtgctcgacaccggcagcgagctctcgtggctgctctgcaacgggagctacgcgccgccgctgaccccggcgttcaacgcgtcgggttcttcctcgtacggcgcggtcccctgcccgtcgacggcgtgcgagtggcgcggccgcgacctccccgtcccgccgttctgtgacacgccgccgtcgaacgcctgccgcgtctccctctcctacgccgacgcctcctcggccgacggggtcctcgccaccgacaccttcctcctcactggcggcgccccgcccgtggccgtgggcgcctacttcggttgcatcacttcctactcgtcgaccaccgccaccaacagcaacggcaccggcacggacgtctcggaggcggcgaccggcctcctcggcatgaaccggggcaccctctccttcgtgacgcagacgggcacccgtcgcttcgcctactgcatcgccccaggcgagggccccggcgtcctcctcctcggcgacgacggcggcgtggctccgccgctcaactacacgccgctgatcgagatctcccagccgctgccgtacttcgaccgggtggcatactccgtgcagctggagggcatccgcgtcggctgcgcgctgctccccatcccaaagtccgtgctcacgccggaccacaccggcgccgggcagacaatggtggactccggcacgcagttcaccttcctcctcgccgacgcctacgcggcgctcaaggccgagttcacgagccaggcgcgcctgctcctggccccgctgggagagccagggttcgtgttccagggcgcgttcgacgcgtgcttccgcgggccggaggcccgggtggcggcggcgagcggcctcctcccggaggtgggcctcgtactccgcggcgcggaggtggccgtgtccggggagaagctcctgtacatggtgccaggcgagcggcgcggcgaggggggcgcggaggcggtgtggtgcctgacgttcggcaactcggacatggccggcatgtcggcgtacgtgatcgggcaccaccaccagcagaacgtgtgggtggagtacgacctccagaacggccgcgtcggcttcgcgccagcgcgctgcgaccttgccacccagcgcctcggcgccggcgcgtaggctttacagtactaatcgatgcgtcgtccatggcgagaactcgccgtggccaagtaagagtgtagaggcctagtattagagatggtctctccgatcacctgctgtgcttcacatcactgctggcgtgtgtagtagtgtacggagtagttaaagggtgtgtttatgtcgaaactagatttcggcaataataaaagggggtggctatcaagct

SEQ ID NO: 25765 - DNA, 3122 bp, Oryza sativa
  ref <308>: DATABASE ACCESSION NUMBER: AK101207
  ref <309>: DATABASE ENTRY DATE: 2002-08-28
gattaattaatcttctttaccctgcacctgaggaggaggaatggctgatgccccaggcgattgaatcgaatcgggggaggagggggaggtggggagcgggggggaaatctgagtgatcggttgttcctcgtccgatcgccgccatgttctcgcgatcctacaccaacctggtcgatctcgccaacggcaacctctccgccctggactatggtggcggagggggagggggcggcggcggcaacggggccgggggccggccgccgcgggcgaggcggatgcagcggacgatgacgacgcccgggacgctggcggagctcgacgaggagcgggccgggagcgtcacctccgacgtgccctcgtcgctcgccagcgaccgcctcatcgtcgtcgccaacaccctccccgtgcgctgcgagcgccgccccgacgggcgcgggtggagcttctgctgggacgaggactccctcctcctccacctccgcgacggcctccccgatgacatggaggtcctctacgtcggctccctccgcgccgacgtgccgtccgccgagcaggacgacgtcgcgcaggcgctcctcgaccggttccgctgcgtcccggctttcctccccaaggacgtcttggacagattctaccatggcttctgcaagcagacgctgtggccgctcttccactacatgctccccttcacctccgaccatggcggccgcttcgatcgctcccagtgggaggcatacgtcctcgccaacaagctcttctcccagcgcgtcatcgaggtcctcaaccccgaggatgactacatctggatccacgattaccacctcctcgccctcccgtccttccttcgccgtcggttcaacaggctccgcatcggtttcttcctgcacagcccgttcccttcgtcggaactctaccgttccctccctgttcgcgacgagatcctcaaatcactgctaaactgcgatctgattgggttccacacctttgattacgcgcggcatttcctgtcctgctgcagccggatgctggggatcgagtaccagtcgaagaggggatatatcggtctcgattactttggccgcactgttgggataaagatcatgcctgttgggattaacatgacgcagctgcagacgcagatccggctgcctgatcttgagtggcgtgtcgccgaactccggaagcagtttgatgggaagactgtcatgctcggtgtggatgatatggacatatttaaggggattaatctgaaagttcttgcgtttgagcagatgctgaggacacacccaaaatggcagcgcaaggcagtgttggtgcagattgcaaacccaaggggtggtggtgggaaggaccttgaagagatacaggctgagattgatgagagttgcaggaggataaatgcacaattttcacggccaggatatgttcctgtggtgattatcaatagagccctttcaagtgtggggaggatggcttattataccgtggcagagtgtgtcgttgtaactgcagtgagggatgggatgaacctcacaccatatgagtatattgtctgtagacagggatttccagatttggatggttctggggatgatgggccaaggagaaagagtatgttagttgtgtccgaattcattggttgctcaccatcacttagtggagcaattcgggtaaacccttggaacattgatacaacagcagaggcaatgaacgagtcgattgctttatcagagaacgagaagcaactgcggcatgagaagcattacagatatgtcagctcacatgatgttgcctattggtccaagagctatattcatgatttggagagaagctgcagggaccattttaggaggaggtgctggggtattggactaggatttggatttagagtagttgctcttgaccgcaacttcaaaaagcttactgtggattctatcgttactgattacaagaattctaagagcagggttatactgctagactacgatggaacgctagtaccacaaactacaatcaacaggactccaaatgaaagtgttgttaaaatcatgaatgctctttgtgacgataagaagaatgttgtttttattgttagtggacgaggaagggatagccttgagaaatggttttccccttgccaggatcttggcattgctgccgaacatggctactttatgaggtggaccagagatgagcaatggcaattgaataaccagtgctcagaatttggatggatgcagatggccaagccagttatgaacctgtatacagaagcaaccgatggatcatatattgaaaccaaagagagtgctttggtctggcaccaccaagatgctgaccctggttttggatcttcacaagctaaagagatgctagatcatttggaaagtgttcttgctaatgagcctgtctgtgtaaagagtggccaacagattgtggaagtgaaaccgcagggtgtcagcaaaggatttgttgctgagaagatcctatcaacgctgacagagaacaagagacaggcagattttgttctctgcataggcgatgatagatcagacgaggatatgtttgaaggaattgctgatatcatgagaaggagcatagttgatccccaaacatcattatatgcgtgcacagtcggccagaagccaagcaaggctaagtactatttggacgatactaatgatgttttgaacatgcttgaggcgcttgcagatgcatcagaggagactgattcacaggaagatgcagaagagataacatctatcccggacccggaataggcgtgatgatgttttaaatctcctggtgatgtcaatgcgtcaattgccaccagcagtcttcctgactaaaattgaagctgattgccatcagcaggaagtgcaactttagtaatactcagttagacaaatcaatgtcaataatcttagcgctgctcgattttctgccatttttctgatttctcttatgatagttttggagtaattctcataatattggtagatagaaaggagcctggggggaaagaatccatggcgtagtacatcatttttcttttaccttgcttgttaggtacagtatggaagattggagtatttgcgggagtacaagtcggaaatttggtg

SEQ ID NO: 25766 - DNA, 1845 bp, Oryza sativa
  ref <308>: DATABASE ACCESSION NUMBER: AK101208
  ref <309>: DATABASE ENTRY DATE: 2002-08-28
gctagggtttttggttggctgtggtggggggtggggggggaagaagatgatcaagcagatccttggccggctgccgaggaagccagggagggccggcgatagccgggacgccgctgggccgaacggcaatgagccgtctaactcgtacagcgtcgccaggagcgtggagcaagggaacaagaggagtggaaatggggattacgtggtgccggctgggctgacgcccaatccgatgatgaatgggactgtggtgtatcactccaacgagccgctgccggcgttcaaggacgtgccggcctcggagaagcagaatttgtttgtcaagaaggtgaacctgtgctgcgcggtgtacgatttcgcggatccgacaaagaatctgaaggaaaaggagacgaagcggcagacgcttatggaacttgttgactatgtcacttctgcaaatggcaagttctctgaagtcgtcatgtcggagattaccaagatggtgtcgattaacttgttccggagctccagccccacccctcgagagaacaaggccatcgaaggagttgatctggaggaggaggagcctctcatggacccagcatggtcacatttacagatagtttatgaggttttcttgaggtttgtcgcatcacaggagacagatgcaaagctggctaagagatacatagatcattccttcatccttaggctactagatctttttgattcggaagaccccagggaaagggattatttgaagacaatcctccatcgcatatatggtaaattcatggtgcaccgccccttcatcaggaaagcaatcaacaatattttctacaggtttatatttgaaacagagaagcataatggtgttgcagagctgctggagatcttgggcagcataattaatggttttgctcttccacttaaagaagagcacaaattgttccttgtccgggcactgatcccacttcacaagccaaaatgtgtatctatgtaccatcagcaattatcatactgcatcacacagtttgttgagaaggactgcaaacttgctgacactgttattaggggcttgctaaaatattggcctgtgacaaacagttcaaaggaggtgatgttcttgggtgaactagaagaggttctggaggcaacacagcctgcagaattccaaagatgcatggttccactcttccgtcagattgcctgtagcatgaatagctcacatttccaggtggcagagcgggcgctgtttctttggaacaatgaccacattgagaacttaattaagcagaattacaaggtgatattacccattatctttcctgcgcttgagaggaatgcaaggggtcactggaaccaagcagttcgaagcctgacactgaacgtacgcaagatcttctcagatcatgattctgcatttttcggggagtgcacacagaagttcaacgacgatgaactcaagcaggaagaatctaattcgaagcgagaagctttgtggaagcgcttagaggaagcggctgtccccagatccgacaataacaaccctgtgggcacgcctaatggcaaattcagtcaagcagctggctagaaaataccatagcaattacagtcttgcaatcctttaaccccatgtgcgattctctggaacttggtttgtgattttagtgttgaaaattttttgttggtgagttggtttcccccttgttctaggcgggtaggatgtctttggtttcctgagaactgcatgatgaaaaatgtacacatacagaagaatttctgcgagctttgccctatgtgtagtcacattaatcagaattatcatatagttgaataaacagtgttaagtttctgttgcgg

SEQ ID NO: 25767 - DNA, 2020 bp, Oryza sativa
  ref <308>: DATABASE ACCESSION NUMBER: AK101209
  ref <309>: DATABASE ENTRY DATE: 2002-08-28
gattttccccttcctgccttgcctcctcgtctccttctctgctgctctccaagctcttcctgcttccatcaggttgtctcgagaaagattggagtttttggtggtttgggttgtgcggttcttgcttttgttggcgcaagcgcatggctggttctgggacatagtgagctgagatagagttcttgtgttcggtggagtttggctttggtgaatcttcgattcaagtctggagatggcgcgttttcaggaaaccaaggcgaggaatgatcaaggacctgttgctgatcatgttgggcaccgaaacctcatggaaaacctcacagatcctctggattccagtggcatggacatgatggacgaagcgcgaattcctaaggcgcggaagccatacacgataacgaagcaaagggagaaatggaccgaggacgaacataagctgttcttggaagccctgcagctccatggccgagcctggcgacgcatccaagagcacataggcaccaagactgccgtgcagatcaggagccacgcacagaagttcttctccaaggtcatcaaagaatcatctggggacaattgcaacagcttgggtgctgcatcatcaattcagattcccccgccgcggccgaagcgtaaggcctgttcatccgtacccacgcaatctagggagcacaggccagcaagaacgtccctgcactgaaacagctagagaaggcctcaggctgcaggtgcagtctctctacgaccaggacaatgggtcgccgacgtcagtgttaacagtaccacagatacgggctgatacactgggaagtgagagtggtgggtcgccaacctcgacgattgatattgaagagagatgtcctacaccaagcatagcaactgctgagttagctatggagttgcctcctacaaatgacgaggaggtcaagggcaatggcgatcatgaagaagttacatgtgacagatcaggagttccagtccttaggctatttggcaagagggttatggtgaatgatttacatcagatgtcagcccctgatgccgggaacctgcaaactgtggcagacatggaagtggacgcttcagctgagacaccaactagtggaactgggaaattctcttcccatggtgcagcagaagcaaatacatggaacccatggctgactaacacacagcagtttctgtattatcttcctaacggacaaattttctccgtgcattctgctctcccatgcttcacctaccataatgagggtgttacttgcacccagttttcaaacccacaggtggtagcctcagatcagcagcatcaacaccaaacttctgaagctgtagattacaagggtatacagagggaaggatcttggacggagtcaaatacatcctcaagcagtgtgcctgaaacagcaactcataattcagagactacagaatcatatagaaacggaaacagaaacgaagatgaaatggtaccttctccagattcaagaaaatgtgtgagcccaggttccaactgcaggcgaggctttgtgccgtacaagagatgtgttgctgatagtgaggcgctgctgaagtcacaggcgcctcaggaggaggcagacggagagatgacgaggctgtgcttataaatttttggagcctcgtagatcactgcaactatagatgcttgctactaatattttgttcacagatgagtaggaactgatgtactgcaggaggggctgctttcctgttacaagaggcagattgaaaccgcgttagtactccacaaaacagggagtggccgtggttcttgtctggccatgtacagttcaaatattctatgtttccattttcctcgtcgtgtgtttgtaatttcgctcccattgcgggagcgttcagaggtcaatggctgtcatgcaatgacaagtattttgatagagttgtagaagggttgtactgatgtaaattatacagtaacttattatctgtaagacaataacaggcgagctaaagaaaacaacgttggaaagctttgttc

SEQ ID NO: 25768 - DNA, 1093 bp, Oryza sativa
  ref <308>: DATABASE ACCESSION NUMBER: AK101210
  ref <309>: DATABASE ENTRY DATE: 2002-08-28
gacccacccacgcgccgcgccctaaccctaaccctaaccctaaccctactcctctcgctcgccatgtccgagcccgcgtcgcccccaccggccatgcccgaggacgccgcgccgccgcagccgcagccggagccggcggttccagcgggggaggaggccgccccgtctctggagaggaaggaggagttgctgccggtggaggagaaggtctcggaattagatgaatcacagtcacagcttatggggagacttcggggactcaaggaggatttgctgaattggaggagcagtttagatacacaagtgacaaaatacaaaagcgaactctctgatatcaaaactgcgctgaatagcgaaattgaacagctgagatcagattttcaagaattgaggaccacccttaagaagcagcaggaagatgtatcaaatagtttgaagaatttggggctacaagatgctactgacaatgatgggaacaaaggaagtggtgaggagaatgcaagtgagggtgtctcagataccctagggaacctgaaattggatgatactccaaaaaaccatgatgaaagcagtgatgccaatgatgaaaagaatgaaaccattgctgaagatggcacggtcgataaaactgttaaggctgagagtgcaagtgatgaatgaagtagcggaggaaccagaagtagaacttgggccgcttctttttcgtggctcagctgtagtaatttttagaacagagataactttggttcctgaaacgagtccacgctctctgatggcttcgtcgtgtagtgttgttaatcgctgtcatgacttgtgaaatcccagttctctggaatggccgtagtaacaattttattgctatcagcaagttatctaaagaatagccactggaattttgcctttaaaaattccagatatttttctcaaatcagttatctatgtgatgccagccattttaaggcggaagaatgatgggttttttttttttggtaggccatggttggtattgttgactgtggctatggatgaaatagtattcatttgaacggtgagtttgaatcaaatcagccaatataaaattggttagctttgt

SEQ ID NO: 25769 - DNA, 1460 bp, Oryza sativa
  ref <308>: DATABASE ACCESSION NUMBER: AK101211
  ref <309>: DATABASE ENTRY DATE: 2002-08-28
gggccgccgctcgcgtcccatctctccctctctcctcccacccatggccgccgccgccgaccgcctcctccacctcctccgcgccgcgcctgcttccccggcccccgccgccgtcccgtcgtcccgcacccgagccaccttctaccaccagccgcggagcctccgcctggcggcaggggcatccggtatgcgccgcgttgccgtggcctgcagctccgcgggcgcgggcgggagcggggtcgagggcgatgaggaggggatgacgtacaagggcgccggcgtggatatcgacgccgggacggagctcgtccgccgcatcggcaggttggctccagcgataggcggcttcggtggcctcttccccttcggtgaccaatttcttgttgctggaaccgatggagtcgggacgaagctcaagcttgcgtttgaaactggtatccatgacacaattgggattgatctggtggctatgagtgttaatgacattgtgacttcgggtgcaaaaccactgttcttcctagactactatgctacgagcaagctcgacgttgatctagcagagaaggttatcaaggggattgtcgatggatgccggcaatcagattgtgctctgctaggaggagagacagcagaaatgcctgatttctataaagaaggtgaatatgatctaagtggctttgctgtgggtgctgttaagaaggataaggtcatcgatggtaaaaatatcatggagggagatatcatcattggtcttccttctagtggggttcattctaacgggttctcccttgctagaagagtactggagaaaagtggactttcgttgaatgaccagctccccagaaatgatggcatgataactactgttggtgaagctctcatggcaccaactgttatctatgttaagcaggtgctcgagattattaacaagggtggtgtaaaaggaatagcccatattactggtggtggcttcaccgataatatcccaagagtatttccttctggacttggggcaaagatttttactgcagcatgggaagtgccacctgtattcaggtggattcaagaggttggaaaaattgaagatgcagagatgaggcgcacgttcaacatgggaattggaatggtccttgtggtaagcaaagaagcagctgatggaattctcgaaggtacccatggaccgaaccacgcatatcgcattggagaggtgatcagtggtgaaggagtccactacgtctgatctaattaatgatctttataatgctttgagtagtttgaggtttgttcatccgacaggcaaaccagcctaatttttgtaatcgcataacataaagggggccaagtcctggagcaacagtgagtttagtcctgtaagataagaaaacatggggcgtactccttttagttccacatgagaacttgcccccaaacggcagaacctattatttggacttgcatct

SEQ ID NO: 25770 - DNA, 2254 bp, Oryza sativa
  ref <308>: DATABASE ACCESSION NUMBER: AK101212
  ref <309>: DATABASE ENTRY DATE: 2002-08-28
ggaggtggaggagggcggcgggtggcgatggcgatggcgaggctgacgccgaacggcgtggcggcggcgctggcgggggacacgaacctgaagccggtgctgcagatcgtcgagctgcggggcgtccaggtcaacggcgcgggcgtcacgcgcggggagaggttccgggcggtggtctccgacggcaccgccgcgtcctccgcgctcttcgccgcgcagctcagcgaccacgcccgatccggcgccctccgacgcggcagcattgtgcagctcagcgagtacgtcatcaacgaagtcggccccagaaggattattgtcattctgaacctggaagttcttgtttcggagtgtgagataattgggaatcctacagcgctttcagaaactggatctcctatcccaaatccgacaagagtagagcaatttaacggagcacctcaatatggtttgatggcagggaactcatcaaatacaaccacaaagcctagtgacaatgttccattgttccaaaattcgatggcaggaaactcctctaactttgccactaggcccagtgacaaagttccggtcttccaaccaacagtccagccatcttatcgccctgcacctaattacaaaaaccatggagcaatcatgaaaaatgaagcccctgctagaataatccccatatctgctttaaatccttatcaaggccgctgggctatcaaggctagagttactgccaagggagatatccgccgataccataatgctaaaggtgatgggaaagtattctcttttgacttgcttgattctgatgggggagagatacgggtgacatgcttcaatgctcttcttgatcgattctatgaagttgtggaagttggtaaggtctatgtggtatcaagaggaaacttgagacctgcacagaagaactataaccatcttaacaatgagtgggagattttattggagaatggatcaactgtggatctttgtcctgatgagaacagttccattcccacccagcggtttgacttcagaccgatcaatgaaattgaggatgcccagaacaatgctatccttgacatcataggtgttgttacatcggtcaatccttgcaccacaatacagaggaaaaatggcatggaaactcagaaaagaactatgaacctgaaggatatgtctggtcgaagtgttgaggtaaccatgtggggtgacttttgcaacagagaaggctcacagcttcaaggaatggttgaacgtgggatctttcctgtgctggctgtcaaagcaggaaaagtgagtgatttcagtggcaagtctgtcggcacaatttcttcaactcagctcttcatcaaccctgattctgctgaagctcatagtctcaggcaatggtttgatagtggaggaagagatgcttctactcagtccatatccagagatatcacgcctggagcatcaaggaatgagatccgaaagacagtagcacagatcaaggatgaaggtcttggaatgggggacaaacctgactggattacggtgaaagccaccgttatattcttcaagaatgagtccttcttctacacagcttgccctaacatgattggcgacaggcagtgcaataagaaggtgacaaagagtactaatggcaattggacctgtgacaaatgcgatagggagtttgaagagtgcgactacaggtatctcctgcagtttcagattcaagatcactcgggaacagcttgggtgacagcattccaggaggctgggcaggagttgcttggctgctcggcaacagagctcaacgcacttaaggagcgcgaggaccctcggtttgcagacaccatgctcaattgcttgtttcaggaatatctgctcaggctgaaggtcaaagaagaatcatacggcgatgagcgcaaagtgaagaacaccgcggtcaaagtggagaaggttgatccttcgggtgaaagtaaatttctgctggatttgatctccaagtcctcggcgctacattagcagactgtgctactctatcagctgctcgctcgtgcgtggtgaggtgagcgaggtgaggtgttgcagtgcccatagccctcgccctcctgctcgatttttgtgccggtactttaatattaacgccacttaatagtttatatccagattagtgctttaatagtttatatccagattagtgctgatatttccatttttgtgccggtactttaatattaacgccacttaatgtatcagcttttatacctttttctcgacc

SEQ ID NO: 25771 - DNA, 1748 bp, Oryza sativa
  ref <308>: DATABASE ACCESSION NUMBER: AK101213
  ref <309>: DATABASE ENTRY DATE: 2002-08-28
tcgttgcaaaaagttttctggaagggtcagtttgtagagagatctatgctgcgcacaggcacaacctttaggcagccacacgctggtctcctcgaactcgaaccctagccttttgctgctccctccggcctccacacgcgcgagatcccttcccctctcctcccctcccggcgagatgtcgtcgtcggtcggcggcggcggcgggcagcagttccggtacacgcagacgccgtccaaggtgctgcacctgcggaacctgccgtgggagtgcgcggaggaggagctcgtcgagctctgcaaccccttcggccgcatcgtcaacaccaagtgcggcgtcggcgccaaccgcaaccaggccttcgtcgagttcactgacattaatcaagctatttcgatggtttcttactttgcatcatcttcggaaccagcgcaaatccgaggcaaaactgtttacattcagtattcaaacagacaagaaatagttaacaacaagagccctggagagactgctgggaatgtgttgctagttactatagaaggtgttcaagcaaacgatgtcaccatcgatgtgatccatctggttttctcagcttttggatttgttcacaaaatagccacttttgagaaggctgcaggttttcaggcactgattcaatacacagatgcagccacagcttctgcagcaagagaagccttagatggaagaagcatcccaaggtacttgcttccagagcatgtaacatcttgttgtttgcgtatttcgttctctgcgcataaggatctgaatatcaagttccagtcacatcgcagcagggattacaccaacccttaccttccggttaattcatctgcaatagatacgttacagcctgctgttggtgccgatggaaggaaagtggaagctgaaggcaatgttcttctcgcatcaattgaaaatatgcaatatgcagtcacggtggatgttctccatactgtgttctctgcatttggtacagtccagaaaatagctatttttgagaagaacggtggaacacaagctttgattcagtaccctgatgtaactacagcttcagttgcgaaggaagcattggaagggcattgcatctacgatggtggctactgtaagctccacctgtcatattctcgtcatactgatctcaatgtaaaggcacacagtgacaagagcagggattacacaatccctcaaggtgcgatgcaagcagtaccacaaccgcctggtgtaccaacaacatctgctgggtggcaaggtaatccacaagccggtggtgcatatgcaccacctggagctgctgctccaaaccacggcacaacagggcaagtgccaaattggaatcccgggagctctgggtatgctccagctccaggagcatatccaggtcaaatgtactcgtcaccaatgcagtatggcgcatcagggggcttctctgctcctgctgccccaccacaagagttgcatacttcgcagcagatgccgccgcctcaatatggaaatcagcctggaccagcaggtgcaccaggaaccgggcaaccacatccatattatcgctaaatttagattcctattcacaactggtactatgccctttctaattagtaactttgtgtacctttgcaatagggcaaaaccagttccttttccctgtctttcttctcatggaaccttttttataaataaactcttcatccagttgttctcatccgcggcacaaaatgaagggttttcatcg

SEQ ID NO: 25772 - DNA, 927 bp, Oryza sativa
  ref <308>: DATABASE ACCESSION NUMBER: AK101214
  ref <309>: DATABASE ENTRY DATE: 2002-08-28
gaagctccaacagtagcgctagcttatcccctcctactcccccccctcatcctcctcctcctcgctcgccaaggtgtacgtcggtaacctgccgtacgacgtcgacagcgagggcctcgcccagctcttcgagcaggccggcgtcgtcgaggtcgccgaggtcatttacaacagagagacagggcagagccgtggatttgggttcgttaccatgagtacgattgaggaagccgacaaggccattgagatgcttaaccgctatgatatcaacggaaggcttctgaacgtaaacagggcggctccaaggggctctcgtgtggagagacctccaaggcagtttgctcctgctttcagggcttatgttggcaacctgccatggcaagtggatgactctaggctgctgcaattgttcagcgagcatggagaggtggttaacgcttcggttgtctacgatagagaatctgggcgttctcggggatttggttttgtttccatggcctccaaggaggagctcgatgatgctatttctgcccttgatggacaggaattggatggccgcccacttcgagtgaatgtggcagctgagcgaccacagcgaggcttttgattccatatggcgttggggagcatgtctgcacgtttgaacaagaatgctaaagtgttatgcgttaaggcggaagctgatggttgtcatttacagagcgcgcgttagcttcctgattttgagtcctcccgtcctttttatgtgtcttccaagctgatgttatgttaaattattctcaaaaatatgagttcaactttccaagtaggatatttataatgatgatgtccttagtattttttttccgtgataatccaaaagttcacttgtcgaccatatatctgagaaaaggagcaaatgcatggcagcagccagtgcttacccct

SEQ ID NO: 25773 - DNA, 1540 bp, Oryza sativa
  ref <308>: DATABASE ACCESSION NUMBER: AK101215
  ref <309>: DATABASE ENTRY DATE: 2002-08-28
gtcgttcacctccacggggcatcaaaaccacggcgaggccacgagttcgcggagaggaagccgacgcaatcgaactccggcgaaactgtggtctccggccgccatggacggaagaaactcaggagacgcgctgccgcgggagcggtggaacgacatcccggcggacatgctgggcctcgtgctccgcgtcatcccgtgcgccgctgaccgcgccagggtgcgctccgtctgccgctcgtggcgcgccgccgcggccatccagcgcccgcccccgccactcccggtgctcgtgttctcccggttcagcttcgcaagcctctccagattatcgcccgccatggcgttcaccaaaccccgccgctttttttttcacaaggacgtgaccatccgctgggtgggatcgttcgacgagtggctcgtcgggacgaaacccagcagggaatgcaaggatgccgacggccattgtttcttgctgaatctcatgtcccggaagaagattcaactaccgaggccatgtgccttgcatttcttcgattacttctgcaagactctccccatcgtcaacacctcaggttgggtcgacattattatccatgaccgggagtactcgatgtgcttcagaaaggtggtcttatctgcttcacctgcctctgactcaatgtgcatcgtggctgccatttctagtcgcacccttgctctctggcaccctgggatgagatcatggtgcgtttgcagaagctttggcatcgatggttcagctgatattgccttctaccaggggaggatctacatggcgatggtctccacatactttccacatatcctgtccatcctgttctttcagcttgaagaggtcaatggcagagttatggtttcgtatgttgagcagtgtgttacagagacgctgcccccagtcgagggttgtgtagtgaatgaattctacattgttgaatggcgtgggaaactattgctgatcgttatgtatgctgaacatgtctggctagacactgagaaaattgggatatatgctctggacttcagcacaaaccctcacagcttgactgagataaacaacttggatggtgattgtctcttcattagtttgcgcagcagcaagtcctttcctgcttgtcagtatgatggagccaaaggtgattttgtctacttcgttagcggctattggcaacatgctactggtgtccatcattcttttgatgtacttgtgtacaatgtgagagatgctacaacgacacgattatctgtttctgcacctgaggacaactctggcccgttcacgaacaacctcttgtggttatttcctccgagatgaatgctactgagaagatccaatcagatcatatcatatcaatagtatgacagtgctaatgtggcctccattgaccgaaatgtaaaccagtgatggtgttcttttcctcttcatgaccgaaatattgtgttgttggttgttctcaaataaccctgagtacatgtcacagatctactttgattgcaatatacttatcatgccctgtttgacact

SEQ ID NO: 25774 - DNA, 2004 bp, Oryza sativa
  ref <308>: DATABASE ACCESSION NUMBER: AK101216
  ref <309>: DATABASE ENTRY DATE: 2002-08-28
gagatcccccaatccactcgattcgatccaatccggcgaggtacaggatgctgccggggtcggcgacgccggcggctgggagcggcatgttcgtgccaacgcagacggtgggcacggtgctgtgctgcatctgcggcgtggcgatgcagcccaacccggccaacatgtgcgcgcgctgcatccgcgcccgcgtcgacatcaccgagggcgtcccgcgccacgccgccgtcgtctactgccccgactgcacctcctacctccagccgccgcgctcctggctccgcgccggcccggagtcccccgagctcatgcagatcctcctccgccgcctcaaccgccccctcgcccgcctccgcgtctccctctccgccgccgagttcgtcttctccgagccccactccaagcgcctccgcctcaagctccgcctccgccgcgaggtcttcaacgccgtcgtcctcgagcagacccaccccgtcgagttcaccgtccacgatcgcctctgcgatgcctgcgcccgcgcccagtccaaccccgaccagtgggtcgccgtcgtccagctccgccagcacgtcccgcaccgccgcaccttcctctacctcgagcagctcctcctcaagcacggccaggcctccctcgccctccgcgtcgccgccgcccccggcggcctcgacttcttcttcggctcccgctcgcacgccgcccgcctcgtcgacttcctcgccaccgtcgcccccgtccagacccagaccgccaagcagctcgtctcccacgacaccaagagcaacgtctacaactacaagcacaccttctccgtcgagatctgccccatctgccgggaggacctcatcgcccttagccctcaggtgtcccgcgatcttggaggccttggacctatcgtcctctgcatcaaggtcaccaatgccatcgctctgcttgaccccctcaccctgcgctgcaccacctcgaggaaaagaagtacagggtctacaacttcaaggctgctctcaccagcaagcagctcgtcgagtacatcgtgctagacatcgagcacgagtcaccagagattaccattgacggatctcgctaccagttggcttatgcccaggtcgcccgggtctccgactttgggaaaaacgacaccatgttcaccgtgcggactcatcttggccacctgctgaatcctggagaccttgcccttgggtatgatctttatggtgccaacttgaatgatgatgacatggacacagctatgatgcgccacagtctgcctgaagtcattcttgttaagaagagcttcgccaagaggccacgcacacgccgatggaagctgaagaggcttccaatggaggaagatgctgtaaataaggccaagggggagctagagaagagggctgatgagtatgaggagtttctcagggacttggagcacaactctgatattagattccagattgatctatacaaggatgaggactacaggtcggagatggcatctactattggtgatgatgttcccactgtgccgattgaggaactaattgaggacctaagtcttggtgatgatgaggaggaggatgaaggtggggaaggcaaccaacatgctgttatggtgggatgagttaatatgtttacctgtgctgtgcttctgccttctggtgatggttgctgccaaccgcagatcataggtctgaactgcatctgtttaatccgtataagttttgttctcccctttacttctataagttataagttttgttgctaaattgtttcaacttttgctgtttctcatgatagatgttgtatcaccttatcctgtatctggtgttgcagcttggcttaaattatatttctctattcttattgtctgtgatatgttgttttcttgccatagtgtggctgatcacaacatatcttaaaatagatgcattgtttgatttccaaaacatctagtttggtgtttagattgtgccagattcatatttttactatatgtttttagtcccc

SEQ ID NO: 25775 - DNA, 3121 bp, Oryza sativa
  ref <308>: DATABASE ACCESSION NUMBER: AK101217
  ref <309>: DATABASE ENTRY DATE: 2002-08-28
gtccgcctcgcgttccgcggccggggggctcgcatgcaagcctagctagcttcacattcccttcccttccccgcattgctgcgagcgacgctgcttctgcttgcttggttcgcttggccgccgccagatgcgatcttctccttcctctccgatcctctccttggcctccttcctcccgttgctagctcgtgcatggtggcttcttcttcttcttgcgccggtttggtgatccttgttgcgccggtttggtggtgatccgatcgaggacggaggaggagcgcgcgggggatccggtgatgggagaaaagctgtgaaatgagatggtggtgatgcgctactccccgagaatactgtggtgggatggatgtgatgaatgaagggaaagaaacgtctgacaacttctgtgtggataagctggagaaagaggacgaagtgggtagctgtcccacaagatactgcaacgatacttcccacagtctaggttcagcttccagaaaagaggtcatgcctattattgctgaaaaacaggctttctgtgcaactactgtccatgatgaaagatcttgggcagctaatgcttggcgtgctcgattagtaaaagcaattagtcagaaggactctgttttgccaaagaatgcagacaatatacattcaacttcggcctttgggagcattggtaatacagaaaacatgcctggcaaattgacaagtatgctaggtaatagaaatgacagtagccaagatcaggctatgcaggaaaagcataaggatgggcttattgttgctagatgtgagtccgtgtctgctgtgaatcctgttgctagatgtgagttagcatctggtgttaatcctttagcaagacatgagtcgacatccggttgtaatcctagaaagctcgagaaggggaaagaaaagcttatctatgatatgagtaattgtgttagcaacacaaatgaaggtgatgacagcaatgagagtatagagagctgcccaagtacaaaagctccgaagcggaagcatggtcaattttctgcagctgagatgacgtctggaaataaaagatgtagaagggaagataatgagagttcttgttcaggattattccacaaaaatgatagctctttctttaactggatgtcaactctcactaatggagtaaaggtgtttgatgaaactactgctgttccacttaatcagaagttttcagcagctacaggagaggaatttccaacaaaccctgtgccacttcaaaacaactgtggtgttccgctgcaatccgttggcttcaattctctttttcaatctctttatagtcagaatgttatgataacttcaagaaatacctgtcaccagtcagaaagcagttacaccgccaacaggctaacactgggtttcaagagtagcaaaccagttagcatgggcagagaaactcttaatgtggctactgagactttagctgcgggcagaattcaaatggattcttatggtgacagaggggcatttcaaaatcaaatgggaattttccctttaagagcagaaagaaatcagaatgggttccatggaagctcttcaaatgctgcatcgggacataaagatgatttctcagaaagcttatgggtaagtagacttttgccaaaaacacccatgaaagtgatggacacaacgcgctgtgatgaagaaactgatttttgttctgctaacccaaaaggtttaggtgatagttcatcaccgcaggattttaatgtggagaaggaattaaacaattcacaatactttactagcaaaggaagtgacaatgaaactacaagtagcaaatgtgcggcgcctcaagacgaaaataaaccatcagaaacaatggcatcaatttttgctaaaagattggatgcgcttagacatgcaaatacatcagcagtacatgtggccattacatgtgaccatggaacacccaaagggcgtaatcacaaaacaagttcttttgttgttagttacaatagtcatgatgagcaagaatctggacaaaaaactcacaagtcttctggtggagaaggaagaatagttttatggacaggtgacaaaggtaaggaacaattatctcctgggaatgacaaagaattaggagaaaaggttttgtctaagcatgaaaatcagaattgtgaagggagctctgatggaaaggtggtaccccctaaatgtaatttagaaacaaacacatatattgaagaaattgatcggaagagactacaaaataaagaaggagcaccaaattccatggagaatcagccagataacaaacaaatggtaccttatggtattgtgcccaatgatgtttatgacgaagcaagtgtagttttggagccttgcagaggctccgtttgtctcgctccgatataataagatggatgaggtcaccagttatgcacaccaccttagatggctttttcttgcgtctacgatttggtaaatgggaggaagcattgggtggcactggatatcatgttgccaggataaatggagtactggataagaatcgcctttctgtgaccatcaggaattcaacttgccaagtagattctcgctttgtatccaaccatgacttccaccaggatgagctgaaggcatggtggtcagctgccatgaagagtggctggaaactgccttcgcaagaagaactcaatacgaagctacgagaaagagagctgcttcgtttttgaaacggaaaaggcacagacgccccagctccagatgacagatgccaacatcaattacagaggtttttctcttgcttgcctctggtctgaaaacgccagcgatgcaagcatcatcactaccggtcaggctaattaagttctgcactgtactgctgggattgctatccccacggttgatggtatattgagagagaaatcaggctgccgtttcgtgccgtggcgtaagcagcttgtattgtattttaagtacacgatttgacgatttgatttttacgatcggatgagcagttgcacgagttgttaactacttattgctcatcctatctgctgtaaataggaagctactaacagtcacagtgcagtgcaatcgtacaatttgtactactgctgctgctgaatataaatacttcctg

SEQ ID NO: 25776 - DNA, 1728 bp, Oryza sativa
  ref <308>: DATABASE ACCESSION NUMBER: AK101218
  ref <309>: DATABASE ENTRY DATE: 2002-08-28
gggactcgagcggggtgaggatctaaagaaaaccctagcggcggcgattggtgcggcgggaggcggccatgtcccccaaaccgaggaaatcggtggcggccttgagcggtcccaaatcgtcgccggcgaggtcgactcggtccaaatcgaagccggattctgatatcgccgagcacgacgacagtcccaaatcgtcgtccgggaggttgactcgctccagagcaaaggcgattgaacaggtggggaatcggactgtggaggagtcggcgggagtgtcttcgaacaagaagaagagaaggattgaggaggagacggcgggggagtcgccggcgacgggggctccggaggggcatggcaccttggcgtcccggccactcccgccgacccacccgccgcctacaccccgcgtcagaaaaagctcctgcatcgtccggctcgaagttgctcgacttcagaagctaactctccggcgcgataagaaagatgatccctccaccgcggccgctttgcctaccccctccgacaagaacatggtgttgggcatgtctcgctcaattgtccgcgtttcatccccaccttctgagggaaaattgatctctccgcgcaccggattcgtcatcagttgggatggagccaccaagcgtgctatgatcgtcacgctcttcacttacttcaagaagaagccgcatgagccccaacccgagctgcaggttcatcttccagataagtctattgtgcagggacggttgatattcatgaatcgccactacaatctctccatcttggagatcacgtctgacctaccattgcaggtccctgcttttgggtccgccccaaagtatggccagaaaattcttgccttgtctcgggatgaaaatatgtccctggtggcgaggcgtggagcaatcacgtggtcggatggttctttcatgtggagaaaccattacatgtttgtggattgtgatgttcctgagggtggtgtaggagggcctgtggttgacagctgtggtagttccattgctatggtatacagagccggccctggtgcagttatcatttcaatctcaattatttgcaccttctttgagatgtggaagcaattcagctgtgttgcccgccctgtgtttgatgtggatttaagaagtgtggaactagctggtgtgtcactccgggaggagctctctgttaaacataacatcaatggtggctttatggttaaacgcatagctgatgattctgctcttgagcatcttggtgttagacagggtgacgtgatcttttttgaggacgagtgcgggactaatttgcctgagatcgaagattatctcctatctcttggttggagatacctgcaggggatgaagtcgatggttctcaagttgctagtacatgacattgaaggtccatgtaaggagacaattaccttgcccttagagttttctgtcgattcaggaaaggtagcccgatggaggatggcttgaagatgtacagcaagactgaagttacctagagatgataattttgtgaatgttagttacttgaatgttctttgacatgatcttctgtcgggcgtttaacctaggacttacctaattttggctggctgagctatgctaattaatttaaacgactgtcagattcagcccgattggtcccttttgaacgaagtttgatattcatgtccccacattgttgcctgtatctcgtgctatctatacaatgttgcct

SEQ ID NO: 25777 - DNA, 1730 bp, Oryza sativa
  ref <308>: DATABASE ACCESSION NUMBER: AK101219
  ref <309>: DATABASE ENTRY DATE: 2002-08-28
gagtgaaaacactcaaaccaaaccagaagctgatcaagatcaaacagcagaaagacgtcgctaattgagaggaccgtccgcgtcgctccccgcgtgagcgaccgggcgggcgtcaaccctagcgccgccgccgctttccctctccctcccccaccccgccgctgccggagcggccgggcctcggctcagtgtgcaaggacggcggcggcggggcagtttgccgtggaacggcgggcccggtcctgcgcggggaggtcggtcggcgttcggtggtggctgcggcgacccgacggcgagtcactctagcgacggcggcggggtgggacgacgaagagcagcagctccttggagacggcgggaggaagttgaaggccggagacggaggggacggccagatccggccgtctcctttctggatctggaggtcgtcggggtgggggtgatggcggcggggtggtgaaggtgagaccggcgccagtgctcggaagaaggccagaggggaaggggcggccagcggtctgcgatggtgatggccggtggaggcggtgcgccggtgctagccggcgtaggtggagcccagtttgggcaagatgcatgtggccggcggaggtaagcaagttggtgaccggcggaggtggttgttgccggcgaagagggtgtcgaggtggccggagaagttgctggcctgcagggaggttgtgcttgggttggtcgggcggtcgctactatggctcgttcgtttggaaagccgtagggcacggtgaacaatagtgttgtcggtggcttgttcgccggcatgtcccatgatcagttggggctcctcccgttcctggagctcctcccctcctgttgaccggtctgctctcagattccggttgtggggagttccttggcgaggggcgggttgctagctgggttggcagatttgcttggagttcgagagcctcagcactgcatgtgcctagcttctcttgcgtctgcgaggtgtttggtttggtggagttggtgcatgaaatccctacgacgcaacctgtcgatggtgtttggggtggagtcggagctgcttggccgggtgtggcaagctgggcaacgataacccccttgccccttctttttggtagcttcgttggggtggctgtgctgttggcttcctggcgtgtctttgggtaggtgtgttggggggagtcggagctgcttgtaggtgacaagctcggcaacgataaccctctcccgctttccttggtagcgttgtggaagccaggggtgtcgtagttggcagggagagcgagccggggcgttttgtcctgctcgttcttaggatagaggcaacgatggcgacgcctgtgggcgccgttttccttgttgaaggcatcgttctttgctctacccgttttcttcgggtgaaaaccctgttccgattttcggacggacgttgcttgcgtttcgacgctctgtttcctccttggaggcttcgtcttgaagaccctgctctacgttgtctgtggtctgttcataggaagtcggagtttttggctttgatgagctatgttctcctccagttgtgccgtcgcaagttttttctttgttctccttgtgggttttgcccggtttcccctttaaaccgtgcttatgtaaggtttttgggcccggtttcccctcaaaacctgggtcaagtctcttcttctttaatgaaaacaggctctccctgacctcttctgaggtttttcctc

SEQ ID NO: 25778 - DNA, 1435 bp, Oryza sativa
  ref <308>: DATABASE ACCESSION NUMBER: AK101220
  ref <309>: DATABASE ENTRY DATE: 2002-08-28
cgtgtggaggatcagcagcagcagctttcccttagctcgcgagctcatcagtcatcacagggcggatcgagagatcatcgatgggcgaggcggagctgagcctggcggcggtgcgcgacgcgctggtgcgggaggaggactccatcgtcttcgccctcatcgagcgcgccaggcgcccgcgcaacgcgccggcatacgcggccgccgccgccgccggcggccgatccctcgccgagttcttcgtccgggaagccgaggttctgcacgccaaggccggacaataccaaaagccagaagatgttccattctttccccaagatctcccttcacctctatttcctaccaaagattacccaaaggttttgcactcttttgcatcatcagtcagtgtgaatgatgcaatatggaagatgtatttcaacgagttgcttccactattcactgtggatggagatgatggtaactatgcagaaacagttgcattagattttgcatgtctgaaggccctgtcaagaagaattcatattggtaaatatgttgctgaggtgaagttcaaagatgcttcccaagattatagtccactaatccgtgcaaaggataccaaggctctgatgaatctgctaacattcaaggcggttgaagagaaggtgaaaaggagagtagagaagaaggccaggatatttggtcagaatgtcactttggaggacaatgctgacaagcaagaaggcaatgcaggtgacagtgagtgcaaagttaatcctgaagtgctatctaagctatatgatctgtgggtaatgcctttgacgaaggatgttgaagttgagtatcttctccgccgtcttgactgattcgccaaaatattttcagctgcaaatatgatgaacacaattatgtaagcacatataaatagacttattgaatgtggcatgaggaaatccatcaagaacagctaacagcggtgacttgctgtagaatttccggtactgtatcttggatctttcttcatctccgttttcggagctgagacatatagggcctgtttggtacagctctaactcctaaatttagctccaagagttgggtctggagtggagttgtggagctgcctaaacccagctccacaactctagttcattttgtgagagagctccacccagctccactcccagttttggtggagctgaaactgtttggctgagctccagctccaggaggggtagagctggagctggagctgtgccaaaacaggcccatagattgatggcaatgatctgcaacccaaaaggttcatcctacctaactgtggtggctgatactgagggcctggtgaattcccagcaaagatgctgcaactccagtttctgtaacaatctgtaactcctgttattatatcaccatagttttgtgctacttcttggtagtagcatttctgttc

SEQ ID NO: 25779 - DNA, 1121 bp, Oryza sativa
  ref <308>: DATABASE ACCESSION NUMBER: AK101221
  ref <309>: DATABASE ENTRY DATE: 2002-08-28
ggcaaaacggcaaaacccaaaactcccctgccccatcaccgccgtctgcccgtcttcatccacccaaccatggccgccgccgccgccgccgattccacttcggcggtgccacccgccgtggtgtccgccgccgaggacaccctcgcggccgccgagtccgtcggggaccacctcgccgagatggtcgcggcggcgggcgaggaccccgacgccatcgccgagctcccgccgctgcgccgcgcgcgcgcgtttctcgccatggcgaaggccgccgcctccctcttcgcagtgcggcttaggtgttcgggagttgatccggatgaacaccctatcaagaaggagtttgagaggttaagcttgtgggaggaaaagttaaatcgatttgaggactgggacaaggcagcattgcgcccaaccactacagtgaatacacaggcagcagcaaggttcattggtcactcattgccccatttgacaactgatcagaagaggagcatgcaggcaatcagtagaggagaaggagggagttactctgggaacaagagaaaaccacaaccaccgcggccaaataagaagtctgttcgtgctgccacggaagaattccttgcaaaagcagctctggagcttagtgggcataatgatagcaaggtgaagggccctattaggctcctctctgatgaagatgaggactaagattgtgtattgttggttttatccagggatgaaatactagctgcctacttcaaagaatggataaagtgcggtataacttactctgcaatcaagaaaattttgcttagttgtgctgtggtgtacataccaaggcagaatgaagtagacaagctagatgtaaactgtaatagttattatctttgccttgagagcaatattgtagtcctgtctgaatgtcattttcagaaggaaattttgactgtttttagttaaagcactgaccctcgaatggcagttgagtccattgctgaagatttgatctagtggtgtttgagactgtttaacatcgccgtagcgtgaatgttgccaaagtagtctgcttgtccagttcgtgtgagtgcttgtatgatgtattatatttttctttagtgaacagccttttacgtgtc

SEQ ID NO: 25780 - DNA, 2241 bp, Oryza sativa
  ref <308>: DATABASE ACCESSION NUMBER: AK101222
  ref <309>: DATABASE ENTRY DATE: 2002-08-28
gaacgtctctctccccagctcgccgccgccgcctctcccccaccccgcggcgatctagggtttggacccccgcctccgccgccgccgtcgctgtctcccgcgcccggccggacggcctcccctccctccctctcatggaggcgctctcgctcatcgacgtggccgcggaggacgacctcctgctcgacctcacctcgcccccgccgctgcatcccgatccgccccacgcagggtgtgatgaggtgatggccgccgaggcttctcgcctggatcccgccggcgattctccggagatgaggcgggttgtggatccggatggcgctacggaggaggcccctgagcagtcggagtctccgaagcggaggaaagcgaaggccggcgttaatctccgcaagagcttggcttgggacagcgccttcttcaccagcgaaggtgttctggatactgaggaattggctgttgtaaacagcacattccgcaaggcacagggttccaggttgcctggaatcgctgaggaaatgaggaggtcaggggagtcaacaacttcgactcttgaaagcgaaagctgggtgatggaaaatctggagactgagctgtttgacaacgtccgtgcttcgatccagagatcgcacggcaatcctggaaaagccccaggtgttactgctgttatctcaaaacccccgaagtccaaggcaaatgttcctcgtgttgcagcaaggaagggggttgatctgatgcctcagagtaagataagggcccctatttccacaagccagggtgctgctggaggaaaacaaaggatccaagctaccttgaaagagcctacaactgcaagagtgcctatttcaggatctacagaagtaaaaccatctttgaaacctccgagggctctaccaagagttgctacaatgagagcgccaactaatacagctgtggcttctggaattccagacaaaaggagcagcactggaggtgtggtcaacaggcagacagtttgtaaatctgtcaacaattcagttagcgcacattctaggcctggtggagtgacaaaatctacttcaacttcaaaatcaggtgccttaccatcatcattatcatcatcagcagcagcaacagcagcttcaattggtaatatgctaggtcaaaaacctaaatcatcaaccctaagcaacaagagcagaattgctcaaaggattcctgttcgttcaacgtcaaggactgatgtcaacaaagctaacccagcaagagcatcgagaaataatattccaactgggggcaaaagtaatcgtgtatctccaagcatttcgcctagcagttctgtggacagcttgagttctgtggtttctggggcttcaacagcttccactgtagggaagatgagccatacatctgagagcttcagtacacggtcttcttcattatccccttccctcagaaatagcaatgaccacgctccaacaagagcagatgcagacacccagggaaaaggttccaaaccatctggtctgcgtatgcctacacccaaaattggttactttgatgcttccatcgaccaacagattggtgcacatatgcaagtgcagcccatgaagatccagtgttcacctcagctatcttctgctcaaatgggggacccagcatcgtctatcttgagtcagccggaatcgagactcgcagcctcacctcatgagaaaaaaagcagtgtccagagcaaggcatcacctttactcccccttgaagttgtacagatagaacttgagccttcccaggcgatggaacatgaagtgtgcacaccccagccctgcccagtggtagcagcagcagcagcagcagcagcagacacagcaaaggagaacattccggctctgcatcagaacatccagccaaatgatggcgctggttcgttagcagttgatctgatttgccagagattgtccaccatttctcttggggacgccaccgacctggcctcttgatcttgtagagggatttagtcgtatggtatgctggttgtttctgatacatccttattattggaaggcaattgcagctgaagttctttctctggcatgtgttgttttaactcttatgtcttgagtgtaaaatcctttttctgtacatcgcatgccatgataaggatttcgctctcggttgtaatcagattgcagaacacttaagagagttgacactgctatgtcaactacaggtttgcaagtaatcgtatatcagtcacatttgttc

SEQ ID NO: 25781 - DNA, 1550 bp, Oryza sativa
  ref <308>: DATABASE ACCESSION NUMBER: AK101223
  ref <309>: DATABASE ENTRY DATE: 2002-08-28
agcggcttccggatgatctgtacgccaagctgaaggagtttcgcgtgcctgatgaaccacacagtggcattcttgaccctgagcatgagaagagggtcagaaacatccacaaggccttggattccgatgatgtcgatcttgttggcatgcttctgaaggagtccccggtcaccttggatgatgcattcgccatacactacgctgcggcctactgtgagccaaaagtgttagcagaattgctgaaactggaatctgcaaatgtgaacctgaagaactcaagtggatacacgccgctccacatggcttgcatgaggcgagaaccggatatcattgtttcgcttatagaaaagggggcctctgttctggaaaggacacaggatggacgtgatgctcttaccatctgcaagagattaacaagggagaaagaccgcaacgagaaatcagaaaaatgcaaggagagaagcaaggcttacttgtgcattggcgtcttacagcaagaaataaagaggagaccacaaattttggaggaccagatgtctgcagaggagtcaattgctacacctctgctggttgataattttcacatgaggctactaaacttggagaatagagttgcctttgcaagaatatttttcccttcggaagccaaacttgtgatgcgcatagcacaagctgactcaactcaagagtttgctggtctcacatctgctaatttcagtaaacttaaggaggttgacctaaatgagacccccacaatgcaaaacaggaggttgcgagaacgccttgatgctttgacaaaaacagttgaactcggacgacgatacttcccacattgttcagaagttctcgacaagttcctgaatgaagaatccaccgatttgatcttgcttgaaagtggcacagcagaggaccagcaaaccaagaggatgcgcttttctgaactcagagaggatgtacggaaggcctttaccaaagataaggcagccggcgctgcaatatcttcctcaacatctgcgtcttcatcaccaaggcgagagcggagggggagatcgcgtcgcgcgtgagaggcgaggaggagatcgcggcgtgcggatgcggaggggaatgggcatggtcgacgcgacgcacgcggacggaaggagatggctgctcatcctagtcgcgcgcgagatcgcaactgataccgttggcgaggttatatatcagacgcagcgatatacgaaattgatcgaaggacacagtgctatagacgcacatagagctcttcctctgtcagcgccggcggtgttagcacttcactcaatcagagctcttcctctgtcagggccggcgacgttagcacctcacttaatcaggcaactgcagcaagcagcaacgattggtgacaggcacaagctcttgtgcagtgcgtgagtagcaaaattttgctagcaaccatgttttttactttgttctatttcctttttttatgtttctgatctgacaatgtcttgatggaaaaaaaaacttaatttgatatgatgaataaatatttggaaaaacggaaggcc

SEQ ID NO: 25782 - DNA, 1422 bp, Oryza sativa
  ref <308>: DATABASE ACCESSION NUMBER: AK101224
  ref <309>: DATABASE ENTRY DATE: 2002-08-28
gaattccatttcatccccaaacttccttctgctcttgctagggttccttccttcattccttcatctccctcccattccgtccctctcttccagattactagcgagctcgatcctgcggcaggggcaagtcgagcgatggcgccgctctcgtggcgccaccacacgctgctgcaggcgctgctctcccgcgggcccctctcggagcgcgacttccacgccctcttctccgccatctccggcggcaagaaccccgccactcatcggcagctgttcgatgatacactcctcaagatcaacaaggagctcacgtacttgcagtttgagttaagagcaggcataaaccagtatgatggtactgtgtattatggagtggtcaataacattgctgatgaagagtcaaagcttggatcaaagttttctgtgccacagattgcattctacaagggattgttggaagcaatagttcatgaagctggaaatgatgggagcataacaaatatcgatgctcttaacacacggattgagaaccaggttgtaattgcagacgcttcacagggcagtcaatcccgtctgcctacttccattaccaacttctcattgtcccaaaaggagaaaactcttaatgaactcatacaggatcgttggctgtcatacactcccacaggaaagattggtcttggcataagatcatttcttgatctccgaagttggttacgtagtaatgatatcccatcatgtgaggtctgcaatgaagcttgtataaaggcatcatgttgtcctaatgaggaatgcaatgtaaggattcatgggtactgtttgaagaagaaattttcgcagagaaaggcctcgagagcttgtggttgtggtactgaatggcctcggttggagggtgaagatggcggtgctgaggatgaggatgttaacgaacctgaggaagatcaggtcccatcagccaaccagcattcgaggactagacgcagaggtgtcaaatctgaactggtggaagaaaatgaaagagcaggcccatcagcgaggatgacaaggagggctttgagaagctctaaagctgaagcagttgaggctgctcaagaggtgccatctgcagcaggaccttcgcagtcaaccagggcatctaagagaagaaagaactgatgagattgatctgtgcttgctagtgagatctccaggttccttttgtcatgtacatacagtagcagtagccagtaggtaatccttttgaagtggcaggcaaagttgcaacttctagttggagaggaatatatatagctttcggatgctcttgttactaactcttagaacgtattagaagcctaatgctttcatttggcaaagcaagcctgcttgtggcagcacagttaattgtttgaatggctctcttgcttgttgatgctagtttcatgc

SEQ ID NO: 25783 - DNA, 2597 bp, Oryza sativa
  ref <308>: DATABASE ACCESSION NUMBER: AK101225
  ref <309>: DATABASE ENTRY DATE: 2002-08-28
gatactagacctccgaaccaaaccgagggcaagagcatccgattcgccgccgccttcgtcttcctcgcaggtatccttcaaatcttcacccccccttgtgttgtgttctgcgccgcgatagaattcccttcctgtttgctcgatctgtactgtcctgctcctgcagccgatagtttaattctttagaatccgatgaatacgttgtgctcatgatgatcgtgaggaggagtagattttggcttgtttgatcgattcttcgcctctggcttgatgcgccgtagtcgattcccccgtactgtcgcctttgcgggcgagggatcgggtgaaatcgtggtgcggcgtcaactcctcgtgacttcgcccgtcgcctccgccgccgccgccgcctgtgggaacgcacgtcatccctcactacccacaccttttctctttgcaccttatcttcggttctagatctgaagttttttttctcttaatttgccttaccctcagcactaataacagtagtgtataatttgttcccccaaaaaaaaaattcccccatgccccaggttatgttaacgagttgaaggatgcaattctttgatatgcttagtttgtaggactatacatatgcagtgatctatgggcgagatgctttgttaatcaccatggattctatctgaattgttttatgttgattcgttaatctgaattgttttatgttggtgagttctaaaattgtcccttgcccatctgcctttctatctgcttagagatggcggacgtggaggagtaccgttgcttcattgggaatctgtcatggtccacaactgatgaaagcctcaaggatgcctttggcaaatttggcaacctcactgaagcaaaggtggtttttgacaagtattctggccgttctcgtggttttggctttgtgacctttgatgagaagaaagccatggaagatgctattgaaggaatgaatggattggatttggatgggcgggcgatcactgtcgataaagctcagccacaaggacctggtagagaccgtaatggagaccgtgattatgatcgtgaccgtggatctcgttatgaccgtggccgtgactttggtggtggtgggcgtgcaccacgtggctcaggtggtggtggggattgctacaagtgtggaaaacctggccactttgctagagagtgcccatctggagatggtggtggtagaggtgatagatatggtggccgagatgataggtacggtggtggtggtggcggtggcggccgttatggatctgaccgtggtggtgaccgttattctggtcgtagtcgagatggtggtggctacggtggaggtgggggtgaccgttacagtcgtgaccggtctggtccctattgatggcctatcaaatctctaagaagtatgttccatccaggtatggaagtctatctactattgtgagctgtgtttccttgtgtctggaactttgtgttcatgtagtttgagaactatggtgtaccatgagaaagcatctactttattatcgactgtattactgacattcttattattgtttcctgcttgttgccaggcatatgacttgttcatagtgcttggcgcttggtcctacatatttgcttgatatgctgttgggtgattcttttcttggttgagacttgagaggtggtttttgtcacattacttgttgatgctctgttacgttggttgtgctcatgcggcatagcacctttggaaacgggatatgtgggattggaccggtaaattgttttgtttctgttctcttgggagaggaagcattctactgaaccttgcttgaaaatgccataagaaaaatcttggtccttaatcaactcatctcaaggcaggtgatgaaccattcataggggaaatgaactggtaatctttaactctttatcttcaagattgtgtaaacccatcattctcaaatgtttgttttgttttggcaggtttgtttgagttctttgttctcttgttctggattggttactactgtcttaacagcgatttgttctagtcttatgaccggcttgttcgttggcatcaatctatcatgtgcggtttagcgtgggaaggccactgctgccttgcatagtgtttctttgttactctgattggctttgctacctggttattgttccattgaccctggcccttccggagttgctgctgttgtgttgcttcttggattgtgccattccttgttactgccctgctgtgatcatgtttaagcgacctgaatatctgagcgatgctacgtggttgctgttctttgtcacatttgccactgaagtagctgttcctcgtcactttgccacggagtagctcctgctgctttatttcttggctgcctgctggagtacttagtttatagcaacaaaatagtatatatcggcaacagaactacagaaacatttttttttaactctgatgaattttgattacgtattgaactcacggctgtacatttgtaacataggatgtaccttaactcatgcagtatatactgcaagagtgcaattttgcagtggtattcaattcatgggtattgcttatccaagattaagcaagccgatttgat

SEQ ID NO: 25784 - DNA, 1047 bp, Oryza sativa
  ref <308>: DATABASE ACCESSION NUMBER: AK101226
  ref <309>: DATABASE ENTRY DATE: 2002-08-28
gatgttttttccatctgattatcagaagcatcttcttcctcgcccacatcctcatacacccttttcggttactgaccatcaaatctcaatctagctcatctacaggtcaaaaatggagaaggggaggaggcggcacatcccggcattcggtgagtggaaccagcaatgcgaggagctgccaatcacgcagtacttcgattcggcgatggaacaaggcctcgtcgtcacggccggacactactaccacgccactgccggcgagttgctcttcaaggtcgccggctcaccgcctcccaagaagccacccaagaaagtgaggagcacaaagaatgggatggagaaccaggcggcgaggaggagggatgggccatctgttgttgttgatggtggggtagttgtccatggatcgaggaggcctagggttgttagggcagttgacgaggacttgtacaaagtcccctctgaactcctccgcaagaaggcaaaagggaggaagcatgtgagaagcttgtggatgggctgtgtaggactcaattgcgtcgcctgaatcataaagaagatgcaatctacaaggctacgcatggcaacattgttcaactgtaccgagaaagcctcacaatatatatgtggaccgattggcctttattttgtggttgaagacgtttgtccagactgcagtctggggtgcaagcaactgttgcttgcacctagtgaaaatttgttactgccatatatgtaaattatctaggaaaacgaatggtagatgatctgaagctagctagctaatctaatttgcagagccttgctgcttgccgtggctcttcatcagccgtggtagaacgctctcgagctttgtgcgacactagctagtgccccttcatcgttctacgtggggagcttttgtttttttacttggtccgtcttggcaatttggcatgcatgtaggacggacactgtgatgccgtctagacctcttggagggggggacaagttgtcagagatgcgacttcacttacataataagatcatagtggagagaactttccc

SEQ ID NO: 25785 - DNA, 616 bp, Oryza sativa
  ref <308>: DATABASE ACCESSION NUMBER: AK101227
  ref <309>: DATABASE ENTRY DATE: 2002-08-28
agagagagtccagcgttaaataaactgaggagagcttggatttctcatctccattatcttgcattcttgttcttggtttgcatctcttcttgctctttggaggatttactactattgagtagtagtgatcatgagctaccaaggtcctcctcccggcactgcagcgtacccgccaccggggacggggtacccaccgccggcgtacggcgcgccgccgccagtcgccgccgactacggcgggtatcagcagcagcagccgccgccgccgccgcaggactcgcagagccgcggcgacggcttcttgaaaggatgttgtgctgctctctgctgctgctgctgcctgctcgacatgtgcttctgatgagaagatggcatcaaggatgatgtgatactctacttattgagcagcttgtgatcgtcttttcacatcatttgtgctgtgtcatgatcgagattttttaagtatgtggtgagatgtgtgcatctagtattatgtagttactgttcttggatcatttggatttcatgtgttgtcaaattcaaaagtggatccattttgtatcattcatcgtaatctgggacacttctgtttatcaatgatttcgattttagtacc

SEQ ID NO: 25786 - DNA, 1684 bp, Oryza sativa
  ref <308>: DATABASE ACCESSION NUMBER: AK101228
  ref <309>: DATABASE ENTRY DATE: 2002-08-28
gtgtgtcgccacccacagcctctcccccctctctgacggcgccgccgcacgacacgacaaccaaccgaagccagcctctcccgccgccttcgccgccgccaccgtcgccgccggacagcagtataaatggaagttggtgccagctctataatggaggatgccaacggagtagtcgatttggatgttgacattgttggcctagaaagtggtgctgcttgcagcaaatttgtcaaaactgaagatcctgatgctacagagtgttcaagttcttttggggacactctgtcagggtcagaagatgatgcaaggccttcagagattagtgacattgaggtcgactcacctttctgccgctatcctgctaatggtgatgctgctgctctcatggatgcagctgtttccgacaatttggatagattattaaagaagaaacgggtaactgatcactggcgaaagtatatcagcccattaatgtggagatgccaatggttggagctacgtatgaaggatttgcaatctcaagtatcgagatatgacagacaacttgcagtactaaaacatgagaaggagttgcagacaaaaatgattgagttggattgctcctcatcgagatcagtacccttctcttctcattgctgcaggaagactatgaagaggaggaggagaaagagaaacgaggagaaaatgaatgcttcatcgtacatctcaaatcacactgtattctcttattatgagaaaacggaagcagatgccttttctattgatgacgatgaggacacagatgaaaacaccacagttaacaatgaaactgattggctacttggaattaagagaggtgaagctactgtcgagcagattcttttgagcattcaatctgctcaagataaagtgcttagcctgagatctagtctcaagaaggcaatggccaaaaagagtaagggagcaatccttaaagtcaacacacacatgaacggtgcacagagctcaagttgctcaccaggaaagggtaaagtgcttgaaagatcaccaagggacatgtcggattgtgatatggatgatgccgccatgcccgagagtgctctttcaagttatggagaagctaatgatatggatatttttgaaagcaccatgagcttattgtcggctgaagttccacatcagatgggagaatttcaccagagttctgaagatgtattgattgacaatcaagcagctgaggaagggtatcagaactttgaggtgatcagccatccatgcaagcgcctaagggtatcggtcaagagagaaagcggggcgcactccgaggatgagagtgttgcccccacagtctctgtgaagaaagaagctcaggaagaagccacaaccagcttcggtctccaggcagcgttttttaagcccggctacacaggcaagcggagaaggaggatgcctaaaattcaaagacgaggcggttcatccgcctctcctttttcgtcttggatttcctctcgtattcgtaaaaagcggcaattctaaggggggactagctacctcagacaatcgatcttccagtttagcttctgatctgaacttttagttagatgagatgatgacggcaactgcagttcttttccctttctctttgtacctgatatattaacgatgacatatgagcaatctggaaatgtggcacgatggcttcatc

SEQ ID NO: 25787 - DNA, 1524 bp, Oryza sativa
  ref <308>: DATABASE ACCESSION NUMBER: AK101229
  ref <309>: DATABASE ENTRY DATE: 2002-08-28
gagagtggccgctgctgcgttcagactgctccttcctcctcctcgcgagcgagaaattattaataaacaatcgagctgagctgaggcgaggcggcggcggaggaatcgatccccggcgagcgagcgcgcgcgagcagatccgccggcggcgtgggggaggcgagggtggatgacgaacggggcggggggaggaggaggaggagggggattggggggcacgagggtgccgacgtggagggagcgggagaacaaccggcggagggagcggcggcggcgggcgatcgcggccaagatctacgccgggctgcgcgcctacggcaactacaacctccccaagcactgcgacaacaacgaggtgctcaaggcgctctgcaacgaggccggctggaccgtcgagcccgacggcaccacctaccgcaagggatgtaaacctcctcaagcagagcgtcctgatccaattggaagatcggcttcgccaagcccttgctcttcatatcaaccaagtccgcgggcttcatacaacccaagtcctgcatcgtcctcctttccaagctctggatcctcctcgcatatcactattggtggaaacagcttgattggtggtgtcgagggaagctccctcattccatggctgaagacacttccgttgagttcatcatatgcctcctcctccaagttcccacagcttcaccatttatatttcaatggaggttccattagtgcaccagtgactcctccatccagctcccctactcgcacacctcgcttaaggactgattgggagaacgcaagtgttcagccaccatgggctagtgcaaattatacatctcttcccaactctacaccaccgagcccaggccacaagattgcaccagacccagcatggctctcaggatttcaaatatcatctgctggtccctcatcgccaacatacaatcttgtttcgccgaatccatttgggattttcaaagaagctattgccagcacttccagggtgtgcacccctggtcagagcggaacatgttccccggtaatgggtggcatgccggctcatcatgatgttcagatggttgatggtgcgccggatgattttgcctttgggagcagcagcaatggcaacaatgaatcacctggactggtgaaggcatgggagggggagcggatacatgaagaatgcgcctccgatgagctggagctcactcttgggagctcaaagactcgtgcggatccctcctgatcgtgctactagagcgtcacttcttcggttgggtttatttcatatttatttgtatgctactcatctgttttttaagttcagtgtttgtagaaagagagaagggaattcagagatcctaccatggtcctctgtagatgatatatccatcctctttcagggatctgaacttgtgttagcttatgcaacttattaacttttttcttttatttactttggttttattctttctttttatattttttctttagaattgataagaaaatatgggaagggaaaggagtgcttgc

SEQ ID NO: 25788 - DNA, 2739 bp, Oryza sativa
  ref <308>: DATABASE ACCESSION NUMBER: AK101230
  ref <309>: DATABASE ENTRY DATE: 2002-08-28
gaccacctcccttcctctcccccttttaaagccgtcgcaccctggcggtgtgtaagcctccgcccctccccgtatctctcgcgtttctggtctaagttccacgccacttgttgccgcattccttctccctccctgcaaatccaatccaatccaatcccaccccaagctcgcggaggaggaggaggaggagatggggagaggagggatcggcggcgcggggctggtggcggcggtcgcgaaggcggacgtggagaacaccgactccacccgcggcttcgtcaaggacgtgaagcgcatcatcatcaaggtcggcaccgctgttgtgactgggccgaatggccggttggctatgggcaggctcggtgctctgtgtgaacaggtgaagcagctaaattttgaggggtacgaggtgattctggtcacctctggtgctgttggtgttgggaggcagaggctcaagtaccggaagctcgtcaatagcagtttcgctgatctgcagaacccacagatggacatggacgggaaggcctgcgctgccgtcggtcagagtgtgctgatggcgatctatgacacgttatttagccagcttgacgtaacatcatctcagcttcttgttacggatcgtgattttatggatccaagttttgggaaccagctccgcgagactgttaattctctgttagatctcaaggttataccagtatttaatgagaatgacgccatcagtaccaggaggcaaccatacgaggattcatctggcatattctgggataacgatagtttggccagactgttagcgcaagaacttaaagctgatctccttatcatgctcagtgatgtggaggggctctatagcggtccacctagcgatccacaatcgaagattatccacacatacgtccatgaacaacatgggaagttaattagctttggggagaaatctcgtgtgggaagaggtggaatgcaagctaaagtagcagctgcttttactgcttcatcaaaaggaatacctgttgtaattgccagtggatttgcaatcgatagcattattaaggtcatgcgaggagagaaaatcggtacgcttttccatagggaagcaaaccagtggggttgttccaaggaagcaacagcgcgtgagatggccgttgctgcaagagattgctccagacatctacagaaattgtcgtctgaggagcgtaagaagattttgctagacatcgccgatgctctagaagcaaatgaagatctaattacatccgagaaccaagctgatctggatttggcgcaagatattggttacgataaatcattggttgctcggatgaccataaagccaggaaagataaaaagcctcgcaggatcaattcgtgaaatcgctgatatggaggaccctatttcccatacactgaaaagaacagaggttgctaaagatcttgtttttgagaaaacatattgcccattgggtgttctcctaattatttttgagtcccgtcctgatgccttggtacagattgcatctttagcaatccgaagtggaaatggtcttctcttgaaaggaggaaaagaagctatgagatcaaacacaatactgcataaggtcataactggtgcaattccagatgttgttggtaaaaaacttattggcctagtgaaaaacaaagatgaaattgctgatttgctcaagcttgatgatgtgattgatcttgtaataccaagaggtagcaataagctcgtttcccagatcaaagcagcaaccaagattcctgttcttggtcatgctgacggtatctgccatgtttatattgacaaatcagctgacatggacatggcaaaacgtattgtattggacgcaaaggttgattatccagcagcgtgtaatgccatggaaacgttacttgttcataaagatctgaacaggacagaaggccttgacgatttattggtggagcttgaaaaggaaggggtagttatctatggcgggcctgttgcacatgacactttgaaactaccaaaggtagattcatttcatcatgagtataactcaatggcatgcaccctcgaatttgttgatgatgtgcagtcagcaattgaccatataaatcgctatggaagtgcacacacagattgcattatcactactgatggaaaggcagcagagacttttctacagcaagttgatagtgctgcggtattccataatgcaagcacacggttctgtgatggggctcgctttggtctaggtgctgaggttggcataagcacagggcgcatacatgctcgggggcctgttggcgttgatggactcctaacaactcgatgcattttacgaggaagtggacaagtagtgaacggcgacaagggagttgtttacacccacagggagctccctttgcagtgaggtgaagtggcttgtgaaggagctgttgtagagcaattttttgcagacgctcaccgtgctcctccttgagagctgcttctcttcatgacatgcaatgggagcacgaaagcatgtcaaagcaggaagtaatgaagggcgaagtaggtcagaaacttatagtactatgtactatggtgttgctacgtagttgtgtggtattccttattattcattgtaccatgaataatttatgccaatgtcgtagtagctacatgtaactatattggctttcatggacacgtctatggtactagatgtaaaactgctagatggctttagatgaacatctcagatttattttc

SEQ ID NO: 25789 - DNA, 1847 bp, Oryza sativa
  ref <308>: DATABASE ACCESSION NUMBER: AK101231
  ref <309>: DATABASE ENTRY DATE: 2002-08-28
ggtattactccttgtcacggacagtttgagagcgggaggcctcctcccaatctccccccttccccttccatagttccatggtggcgctcttcagacgcgagcgcgaggagcaccgggtccgcttgccggtggccggcctgactcgttagccgccgtcccgtccggggcgaaaggaagcatacctcgctcactccatttggagcttcccccatccgcacgcgcaccagctgttcgacgaaatgccaccgcgcgctctgcccccagtggaggacgacgccggcagggactgggtcggtgacctccccgaggaggtcctccaccacatcatgtccttcctagacgcgcgccaggccgtgcgaacctgtgtgctgtcgcggcggtggcgcaacctctggcgtaccgtgccttgcatcaacgctgacttcgatgagtttgatctcgtcttttaccaaggggacgacgaggactatgatgacgtgctggcgttcaaaaggtttgttaaccgtctgctggagctccgcgatcccaccgccatgatagacaccttctggcttaggtacaccaccagaccagaaggaaacacgaattccaatgaagatgcctacgggtggattagccacgctttgcagaagcaggcccgggttttagaggttgtcgtgttctgctgcttatttgagctggaccactcggtgtttacttcctgctacctgagaagaattgcgttctccggtattgttttatgcaagggtttcttcgcacaacttgaagctggctgtccagcattggaagatctcttcttacatcaatgcggcgttcacgatgacgaaatctcctcccatacactgaaggttttgaccttcgatagtgtttttttctacatgccgatggacactgttgaattcaccttgctgaacaagacatctatttctcttccaagtgttacttctctgaccatatctactcccgagggtttcacacctatactaaaggacacggcatcagtagtgactgcatcagtatcagtatcagttacaatgtctagttttagatttcgttttgatgctaatgatctcggccagtatctccagagcctttccggtattacaaatttagagttcaactatcagggttcaaagttgacaatcgaaaaccatttgcaatggtgcccggaattcctcaatgttgtcaacctgactcttggtcaatggtgcctggattcaaacttctatgccctaattgtcttccttcagaactcacctagactacagaagctaactctgaaactcgaaaagagtaatatgagaataagtcgaagaatcattggcgagcttacggaaatatcgtttacatgcgagcaccttaatactgttgaagtgatatgctcggagaatgatccccaggtcatcactgtgcaagatttctttgttagcagtggcatgacctctgttcagtttcatatcaaacactggagcccgtacgcgaatgacctaccggcatttattcggtcgatatgaaatggcaaaggatcacgaattagtttgccatcccattgaagaaaatcactctctttcgcctgtcggctacatctgctggttacagtagagtgttcagtgatcttgtttggtgctttctgctatgacgtgaaggtgagtagaaacaattgcatcttgccttgcatgtaaggtcagtggtattgtacttgtttgctgcgatcacatgatgatttgtagcaataatgatgctccaagaaaaatactgtatggctatggcgtctcctgatacagcctgccactgctttctcaacttggctggtctccggtgaaacgtattgtatttgtctctctcct

SEQ ID NO: 25790 - DNA, 1712 bp, Oryza sativa
  ref <308>: DATABASE ACCESSION NUMBER: AK101232
  ref <309>: DATABASE ENTRY DATE: 2002-08-28
gatacagcgaggacatcgtcacctcgcagcgccacaacgccggggcggagatgggctccccctcctaccgtctcgcggcggcgatcacgatcccttccaccgacgagttcctcctcgtccgccagccgccgccgccgtccccagcgcccgcaccggaggaggaggaatacctataccggggctacgtcgacagcgagctctacgacctcccgtcggcacccctgcggcccctggcgggtgagctccggtcggatgtggccatccgcggcgcggactccgtcgccggccggctcgacatctcgcgcctcgacgtgtccgcctccctcgaccagatttgcgatcaattcggtttgccgagtggaatttgcggggagtggaggctcctgaagtatgtggaggaagcggagtttggcccagatgctgggctcaacacggtgctcatcatcggttcattggagtcaaaactggaggcgttgcaagactcctggaggtggatgtccaaggaatgtgcttcgggattgctctctggagcaaagtccggtggtactcgcatagggccctatgcgtatattggacttctgaagccagagctgccatcaaactggacagttgcccctgcattgccttgccaggagtaccctcctggaataaaacttgtgccgatgaagagtaacacattacagcccttccgtacaactaatcttgtggtagtagtagcaaccgatactcctggtggatcaacatgttctgattgtgttgtttatggggatgctctactaatagatcctggatgctgctcacaagttcatggaaagcttgcagaacttgttaattcccttccaaagaagttagtggtccttgttacacatcatcatcatgatcatgttgatggtctctctgttgttcagagatgcaaccctgatgctgttcttttgacacacaaaaatacaatgagtcgcattgggaaaggaaattggtcaattggctatactgcagtagctgggggagaaaatatatgcataggtgaccaacaactgcaagttgtttttgctcctggtcatacagatggtcacatgggggttttacatgttaataccaatgcattaattgttggagatcactgtgtagggcaaggaagtgcaacattggacaatagagctggtggcaacatgaaggactactttcaaactacatacaatttcttggacatgtcaccgcacgtgctgattccaatgcatggaagaatcaacctatggcccaaacatatgctttgtggatacctcaggcaccgaagggcaagggaagtgtccattctacagtctatagagaatggggctcggactctgtttgacatagtttcaaaaacttatgctgatgtagataggaaattatggattcctgcttctttcaatgttcgcctcatgttgatcatctgaactcccaaaataaactacctaaggatttctccttacaaatgttcaaccgaagttgtgatgaattcgttcctagcctatcatgagttatgtccatgagtgggaaaaggcccatcaaatgctgctttgagtttggattcagtttaggtgtgattgtgatgttttagcatgaagttaagcagcagtcatggggtactcataattgattcgaccaaactccaaacattgtaatttatcagatatgtgtattaaaagcccttgccaatctgcaatgcttgg

SEQ ID NO: 25791 - DNA, 1689 bp, Oryza sativa
  ref <308>: DATABASE ACCESSION NUMBER: AK101233
  ref <309>: DATABASE ENTRY DATE: 2002-08-28
gaagattgaaatatacttcgcatttttctagtagctaaaaagtgaagaaaaaaaaaacgcgcggcggcggcggcgattggtgcggcgggaggcggacatgccccccaaatcgtcgccggcgatgtcggcacggtcgaaatcaacgccggattccgatctccgctcgcacgacggcattcccaatcccggatcgtggtcggggaggttgactcgctcccgagcaaagcagattggactggttcttccgattcaggcggtggaatcgccgggaatctcttccaacaacaacaagaagagaaggatcgaggaggagacggcgggggagtcgcgggcgacagtgattccgacgacgacgacgacgggggagcctggtaccttggcacgccggccgatccacccgccgcagccgcactccaccgcaccgcgcatcggcagagaaagctcctggatcgcccagcgcaaagttgatcgacttcggaaggcaactctccgggatgcggaagacgagccctccaccgcggccgccatgcccaccccctctgacaagaagatggtgttgggcatgtctcgctcaatcgtccgtgtttcatctccaccgactgagggaaaatttatctctcctctcaccggcaccgtcatcagttgggatggagccaccaagcgtgctatgatcctcacgatctactccactgacttcaagagtaagccgcatgagccccaacccgagctatgggttcatctcccagataagtctatcgtgcagggacggttgatattcgtgaatcgccactacagtcttgccatcttggagatcacgtctgacctaccattgcaggtccccacttttgggtcagcagcaaagtatggccaagaaattcttgccttgtctcgggatgaaaatatgtccctggtggcgaggcgtggagcaatcacctggtcggatggttctttgatgtggagaaaccattacatgtttctggattgtgatgttcctgagggtggtgaaggagggcctgtggttgactactgtggtagtatcattgctgtagtatacagagacggcccttgtgcagcaatcatttcaatctcaattattcatgccttgtatgagatgtgggagcaatttagctgtgttgcccgccctgtgtttgacatggatttaaaaagtgtgaaactagctagtttctcactccgggaggagctctctctgaaacataacatcgaaggtggctttattgttgaacacatagccaatgattctgctcttgaaaatctcggtgttagacggggtgacgtgatcttttttgaggataagtgcgggactatgttgcctgagatagaagattatctccttcatcttggtcggagatacctgggtgagaagaggtcgatggttctcaagttggaagtacatgacattgaaggtacatgcaaggagacaattaccttacccttagaatttaaagtcagctcaggaaaggttgcctgacggaggatggcttgaggatgtacagcaagactgaagttacctggagaggataatttagtgaatgttatgtaattcgagtgttctttgacttgatgacttctgtcggggcgtttaacctaggatgttacctaattttggctgaactgctaataatcatatgaacgactgtcatatatattcagcccgattggtcctttttg

SEQ ID NO: 25792 - DNA, 3859 bp, Oryza sativa
  ref <308>: DATABASE ACCESSION NUMBER: AK101234
  ref <309>: DATABASE ENTRY DATE: 2002-08-28
gggttttgctgctctcctcctcctcgtcgtcgtctccaactccgtcgcggcctcgcgctcaccgccgccggaatccggctgacctcctccgctcccgcatcgggcgctcgccccccgggtctaggtacttgcccttgcccccctgcccatgcccttcgtcccgattcgaacatgtcagatttggttggttgggtatcttggtggtgggttggttcgccaggcgccgaggcccaagttctttgtcctggaatggtggctagggagctttgtttcggggttctatctctgtgatttgggtgcggatgggaggaattcttcttggtttgggggaatttggggggttccggtgctgatttgagtgttttctggctggttcttggcgctccttcgggagaattttgtggagctctctgatgggagtggtctaggtcgggatctcagactggatggcctaatttgatcttatcaaggtgaattatgccttctcagtgaggatttaggtgactgtggttacaattgctggggtatttgacctaaaaacgaagatgggcgagcaaaaggggcctcctattgtcaaaattttagtcattgaaccagtagcacgagagcggtgttctcggtgtattctttgcgtgtagattggaggattggccgcaatggcgtagcaaaataccctttaatgtatcttttgagcttctgttgatgcttttaagctttttgattgttgtagtagtgattaacaattttgtaggaaatgatctactgcgagaaggtactgtagtaaggaaatttaattggcagtaaagcttcattttctgaactgtccttgtgcccattgataatgccattaacgtagaaaaaatagcatttcgatagcattttagttaaatcgtgagcacttatctagtcttgggccgtggccctttcatttctttgcttaaagttaacgaagaaagatgcttctcgggtaatatttaataatgcactattcagtggataaggtgcactttttagatggagaagaaagtgtttttgtcactgatttgagttgaaaatggtgaattttgaaccaatttgtggcataagaaaacccttttgccaacctccatccatgtgttagcaatcatggtaggaggatcaagattgaagtaaaacttaaagaagccctttgcttcaaatacctttcttgtgctggttacttagcatgttcttaaaggatggaatccttggcccaattgcagtatcaattgattctctctaattaaaaagttatgtgttgttccttgtttctctttaattctggtagatctgggaggggtcctgacatgctccatgtgggccactggttttccctttatctcttatctggctcttaggtgtgacttttttaatgggtattgtagatcacatctaatgtgcttcattgatttgattatttaaaagcctttggttgttgctattcgtttgtttatgttcctacccttctgtggttggatcccataaagtctacctgtgacttctgctgccttggttgcttgttagtcattgttgtggatcttaagtttgctgacttggtttaaggaggaaggctgctgcaagagtaaagctgcaattggttggtaatgttgctcatgagtttttcttgtataattgcaacaaccaaggaggatctttttgtttgttttccattttgacattgtacaatgccagtttgctacttcttgcttcttttttataagtttgcagccttagtttagtaagtttgcttggtttcatatgcttgatttgactcacaaaaatgataactgtgtggatgcctcttttccttgtttgattatgtgattatatcagggtctacattcactgcctctgtggcggggttcatccctatcatcatgttaaatattaaactttcctccttatgccaattcaatggagcagcaaatggtgattccaatgccaacagaaattgctgcctttggaagttggacagttgtgatttgtgttttttgtttcatgattttagttgcgcccttcaactatccatccataaagctgtgttcatttttacgttgccttgtgtgttctgtttgacaaatgatgaaaatgaccagataaggaatcaggaaatgttttgacttggccaaggaagatccatctgtgcagctcctactgacccccacccccaccccccaaaaaaaagtcctcaacacattcttgacaaagttgattaatctttttcccttttgttttgctaaattgtaatataaagaattaaccttgtacatattttctctctttaatgaaattacactactaggcaaagcccttgtagttttcccagtcaaaaaaaaattgtaatctaaagaaggttaatttctgtgtttatcttgtattttaatatccttgcagatccctggcctgtttttgtttataagaaaacaactgtatcaacaattcatgcaaatcacgttatggtttctttctggacaggtttccgaagaaatggcaagaagtgcaagggcaaggaggcatgtggctcgtcagcttagatccgcaccgtatcccaccccttcgtaccgctggaaagcaatgaaagaatcaaaccgaaagaaaactctgccagctgcacagaagatggactgggaagatgcgaactgctctgtgtgcatggaatacccgcataatgctgttctcctcctttgttcttcgcatgataaaggttgtcgcccttacatgtgtggaactagccaccgccactcaaattgccttgatcaattcaagaaggcttacaccaagggtgcattgctagaggaacttcctgccaacactgttggcacgaacttggactcgacgccattgattgcaggtgaaaaaaatgagtctgttgatcttgcatgtccactgtgtcgtggcaaggtgaagggatggactatagtagaaccagctcgaagttatctcaatgggaaaaggaggacatgcatgcaggatggttgctcatttgtaggaacctacaaggaactccgcaagcatgtgaagtcagagcaccctcttgcaaagccaagggaagtcgatcccatccttgaacagaagtggagattgctagagattgaaagagagaggcaagatgcactcagtacgataacagcaactatggggagggcgattgttttcggtgattatgtgctagacttggaagatgaagatgatttagatgatgtagaaagtgatgaggatgacaatgccaacggacacgggacagataacactagacgaatgttaatgtttctaatgcgccaagttgctcggcatcatcaaaaccaaaggcttcagaatgcaattggtacaactggcggtgccgaggacaattatgcggtgagcagtggtgcaaatgcaaccacgccttaccattaccccttggaaggcgacgatgaggatgatttggttatggccggaggcggaagcaccggtatggttagaccagagaggcggcgtcggcgccgccgtagaaaccgcgagaggttgttcttaggtgctaattgagacaacaggggctttaccactggaggagtacattgcacaattggttctctggtgcatagcattcatcaatttcaacctcaatttacttgttcatgatcatgtaccaaagtagttgtcttaaccttttagctcattgtttcacttcaatgtatgccatctcacattcattgttgaaaaggaaaataccgcacccatcttgtgcggtttgtgtagcctttatttccagtttttcagaagctctgctaaatattaatccagtggggatcgattttagatctcaccagcttcagatattcagttgtgcttagtgctgact

SEQ ID NO: 25793 - DNA, 1601 bp, Oryza sativa
  ref <308>: DATABASE ACCESSION NUMBER: AK101235
  ref <309>: DATABASE ENTRY DATE: 2002-08-28
gggaggctcggacgcgccgccgccggttgcccggtctcctcgccggccggcggatccggtgaagctacggattagtgagtggtaggagcagcagcggccatggacgggagccgccaggagatgccgccgccaacggagctgagcgctctcggccacagggaagttgctgctgcagaaaggccctttaagaaaacctgccactcatcagtgcctacatcttctaccttgtgtgaaccccatgtttggccaggtctcctggaaagcctccttcaccaaatcattgctttgcttagctcattccaggacttgcttgcttttagtgccacctgccactcttggcgagctgcgctatcttcctttccatccgtatatactttcaacttcccacctctctgcctcaaactaaatacacctaatatccgtccccttcgcgtccttttgaaggacaatcttttatcttactgcaaatggcagcttgatgatccatccaagagaaacatatcccttcgttgttcagctccgccagatgctccaaatcgcatgcgctatttgggctgctcatatggatatctcatcttctcctatcatgagaagaactgcctctttgttgatgcttacactagcactaagctgaagtctcccaaactcaacttcatgggcgacagggatatctactacggcatccttacggctccacttaattcacccaactcacatctgatactttgttcgaggtcttccatattctattggcaggttggaacaaactcttggacaaagcacggttatggcggtgagcacattcttcagattgtgctcttcaaaggtgagatttttgcgatggatgttcttggcaggcttcacaccatgcaatttgcacctgagctcagcatacaggaagtagcggttctgcgacgagaagaaatggttacaggcccacgttctgggccatggctggtggcctgtggtgaaatgcttctcatggttgatttgtcaacagaccgcgaccaattgcctcgcacctttcaagtctttcgtcttgagttttctgctgaaacagttgagtgtgtgaagatggaaaggttggaaaatcaggctctctttgtcaaccttgatgggagggaccctacattctcttgcacgagccctgaaagatggggcggaaagagtaactggatttatgttgcgaaaccatctggagattctggtgaaccttggactgcggtcgagctcggtcagccagttcctagtagaatagaccgcgtcccagactttcaagtagacaacatgtgggtggtacccagtttgatttatgatgtcaaccaatgatgttctcatcaagttttagccagcgttgcacaagccatatccgtacttgctagtgtgatttaatggtttcttgacctgtggcatatgtatggattcttgtaagagtacactgaagttgtatctgtagtatgagaaatgcaggttcttgcatgtactgtgcagggttggtctatgttctgtgaccatgtgaatgctgccttaatattatattatcgttggttaatggttatgttgtgtgacgccggagggatgtcgctgagagttgtttcacg

SEQ ID NO: 25794 - DNA, 1447 bp, Oryza sativa
  ref <308>: DATABASE ACCESSION NUMBER: AK101236
  ref <309>: DATABASE ENTRY DATE: 2002-08-28
gtgagctctcacaagtctcaagtaggagtagaaaactcctcggccgtatcgcctaactacaccaccccatcttctactgctcgctccccgccatgatgctgctcgcccgcgccgtcctccgctcccgcctccgctgcccgccgctgtctgctgcggcggcgtcgacggcggcgttctcgtcggccccgtcgccggcggcggcggaggcggagcgcgcggtacgggacgggcccaggaacgactggagccggcccgagatccaggccgtctacgactcccctctcctcgacctcctcttccacggggctcaagtccatagaagtgtccataaattcagagaagtgcaacagtgcactcttctttcaataaagacaggtgggtgcagcgaagattgttcatactgcccccagtcctcaagatacagtacaggattgaaggcacaaaaattaatgaataaagatgctgtcttagaagcagcaaaaaaggcaaaggaggctgggagcacccgcttttgcatgggagcagcatggagagaaaccattgggaggaaaacaaattttaatcagatccttgaatatgtcaaggacattagaggtatgggcatggaggtctgttgcactcttggcatgctagagaagcaacaagctgaagaactcaagaaggctgggcttacagcatataatcataatttagatacatcaagagaatattaccccaacattatttccacaagatcatatgacgatagactgcagactcttgagcatgtccgtgaagctggaataagcatatgctcaggtggaattattggtcttggagaggcagaggaggaccgtgtaggattgttgcatacactggctactttgcctgcacacccagagagtgttcctattaatgcattggttgctgtcaaaggcacgccccttcaagatcagaagcctgtagagatctgggaaatgatccgcatgattgccacagctcgaattgtgatgccgaaggcaatggtgaggctttcagcaggacgagtacgtttctccatgccagagcaagcgctctgcttcctagctggggccaactccatcttcgctggtgagaaacttctaacaaccacaaacaacgactttgatgcagaccaggcgatgttcaagatccttggtctgattcccaaggctccaagctttggtgatgaagcaccagctgcagacactgagagatgtgaggaagctgcatcaatgtagaacaccaatagaaactcttgagaacacgttcggtgcaaaagtagcaccattatttccggttagcgcattgtattgtagagattacaatatcttgtagtaagttagaaaaagatcgacccaaataaatagggaattttctgtatcattgttcttgttgtgccattttgtgacatttcaatcagcttcaatctcagttttcctttttcccc

SEQ ID NO: 25795 - DNA, 1514 bp, Oryza sativa
  ref <308>: DATABASE ACCESSION NUMBER: AK101237
  ref <309>: DATABASE ENTRY DATE: 2002-08-28
ggtcgtcatcgtcctcctctccggctcgatctcccaccgcggcggcgactccagatcggcggcgaagcccaggatctccggcgagggcaggagaatgtcgagataaaggtggagtagtcgagtatcgcgtaaaagaaagagaaatctctccccgtctcgttgtctcctccgctcctcgcgccgccgccaagacgagtcgcgggggaggggcggcgatcgagcagagcaggggaggggaggggatcctggtgagtatccatccgcatcctctttctgattcatctctctctcccaccccaccgggactacttatgtctggaattttgcttgcgttcgttaaccctagtagcttctcttctagatctggaaggagctcttctcctcctccttaatttgagagccctaaacctctcttaatacaactagtagtaacagtttgggggttcaattcaactcaacccccatgtcccaagttggatccacccctgttgctattagggttacggagttggcaaagataatatggtggcatatgtttgcgctagagtcgaatccctttcgcaatgtgcactagcatcgaactccatgaccaggagcaagaaccaagtcattatcttgaatggggataatatcttacattctgaaaaaaatagtttgtgtgtttgcacactctgataattagatttgcttgaggagcaccttaagtagtagtattccacatagtgctaagtgctgatctatcctattgaattgcctgctatattgttttgagaatgaattatatgtttatgattatgctttagtaaaatttctcacttgagttgcattgttcagggaggagtgaccggagggaatgcaagacccaagaggtatgccacgagatgaattcgcaaccccgaagacgcacaagagaaaggtcgtttcccgccccttgcctcccagccaaataaaagctgaacctgagctgctgcggagggaggttccactcacatccggcaagaccaagaaagcccctaagataaccttcaagaatgaacctcgccattcggctccgcaatctgattggggaacccccgattcggtgccagagttcggtccagctgatgaatacagagcgttacggaagaagtacctgctgctggaggatgagaacggtgagctggacaagcaattgagccaggctgaagaggaagccagcgttctcgaggatgaaaagtttgcgctgctggatcagcttgttgtgttggaaggccttgtggatccttcacagatgcagccaccgagaaggctgtgagattctatgcgtgttcgttgcctgttcatagtccaattaagttacctgttactgcttcctgctagatatgtaaccaattgtaatggaagagcaaagacatattatatcgtttattatggaagtttgaacatttagagcacttgtttggagttctttttgtgcaatatgaaagagtgctatcagtttaactgaaatttaatcgtggcaaaacagaaagttc

SEQ ID NO: 25796 - DNA, 2382 bp, Oryza sativa
  ref <308>: DATABASE ACCESSION NUMBER: AK101238
  ref <309>: DATABASE ENTRY DATE: 2002-08-28
ggggattgtttggccactcgaccaagccagtcctcctctctctctctctctctctctctctctctctcttcccccaaatcccgcgcccgccggtacgaatcccgccgccgcgccgcgccgccatgtcctcctcccgcgggccgccatctcctccgtcccacccgaaccccatcgatcccttcgccgcggcggcggcggcggcggcggaggcggaaggggaggcggcgccgccgccgcgaaaccctatcatcccccgcgaccccccctcgccggagatggaggccaccgccgaggcgctcacccgggaggaggttctgcgccggcggaggcgccgcgccaagcgcctcgtcgacgtctaccggcgcctctactggacgctcggggaggagctgcgggcgcggcaccggcagtacgtctgggagctcggccggagcccgctcgaggccgagcagccgccgccgccgccgccgacctccgccgcgcccggccccggcggggacctggtggtggtcaggccggtgtccgccacggtgccgaggcggaagaagtgcggcttcgccggctgcaaggtgcggaccatggcgatggccaggttctgccactcccacatcctctccgaccccaaccaagtgctctacaagggctgcgcctatatcagcaagagtggcccacaagttcaaattacttgcggcagacccatccttaaagcttcagttccctccctctgcaattctcattttcaaaaatgtcagaagttaattacacaaggttataagaagtttggagttaacccatcacccacaggcaaggtctctccaaattttggtttgttggttgctgaatgtgttcgtcagatccaagccaagcggagagaatcaccaagttgaatgagccgtgtcacaactcacaactttgttgttgcacaaattttatgaaatggcaggtattatgaggcttaccaaggcactgataacttcttttgccagaatactgcacccactcttacttgaacgaaataaaatgaggaaaattcatagatatatgtgagtttgagtttgaagtgcatctctggcaggattatttcatgggggaattggaagacggttaactgcagatgtcaaatgtatagttgattgattaagtcaatggagtatcaccatgaggatgcacgaatgaaattcccttggatagcaccttatatctagtaaaatgctttatcatgagtccaatgggttgctgttgctgatcaccagggagggatgccatttaattttgctgtttttgctgggaggttcaatgctgactgtatgcatagctgcttggttcttcataatgagttgcaacttgcaaggcagtatagctcatcacattctgaactggatttcacactgaattaagttcatccaacatgggccatatgttctttgtgattgtagccggtgcaattgctgtgctactattcagcttggtgccagaaatgttctttttgtgaagtaaataccattatcactttccccaagtggtgattatgaaccttgaatatatgcatgtacctcacttccctaggtggtgatttcgtacattgcttatacgcccatgcagatgcagagggagctgaaagcctgatgcaattcgaagtttgcatgaattcaaaggtgctctgttttaagagtgatactgcataacatactgtgtaggagccctacaaacaagagattacgaggagattccatgtgcatttgatgcttgcctggtacaactgtatagctggaatctttgcatgatatgagagatgctttgcattggtaaatgtttttgcaccacctgctgatggaggagccccaccagaatagatttgtgaaggtgttgcttggttgcagggatgctgtgccaataatggttttgcaccacatactgagcgaccctgctaataacgaattgaggtgatatttattcaaggaatgtttaccaagtatcacaatcgaattccatggacagaaaaattgaatttggatgaacattaatttcttggctacatatgacagtggatgtgctggatgtggattattattttcttggctacaagacattgtggatgtgaaagcgcatatcagatatcatgggaataggacaagaatgtcgggtggcagatttctgatgctgggatttatcaggattgctagcgtaaggtgttgctttttcactctactctgcttggtttcgatgcttagtttaatgttgtaaggtagttaccagttgtaaatgactgtctatcgttttctcatgttaaatgattttactgtgagagccctaaccctacgtgctctgttttttgatatggctgtcaagcagcgatatgtccatcagtccatgttccggctc

SEQ ID NO: 25797 - DNA, 924 bp, Oryza sativa
  ref <308>: DATABASE ACCESSION NUMBER: AK101239
  ref <309>: DATABASE ENTRY DATE: 2002-08-28
agctcagtctctctctctctttctctctctctctctctctctccactccaccaccaccctcacacacgctcacacccggaggcggattgggggatggcggcggcggcggcgggggcggcggcggcgccgtcgaggcttatgctgcgcttccgggacggcgagctgcgcttcgcggccaccgacgatgcgctgcgagtccccttggggtacgcgatcggggcccccttcatccgcaacgagcgcatcttccgcctcctcgacgagtacgcgcggacccacgcgcggggcggcggcgccgacgccgtggccaacatcgccgcctgggaccgcgacttcatggcgcgggaggtcaccgacaccgtcacgctctacgacctcttcgtgggcgcgacggcgctgggaatcgacgggctgagcgacctgtgtgcacagatgaccgcggacgcggtgaaggggcgtcccgtgggggaggtcaaggcgctgctcggcatcaccgacgtcggcatgacgcaggaggaggagctcaagctccagcaagacaacgatgccatcctctacctccgttaactacctgatcatcatcaacaacgctacttttgtcgctgaagcattttgattccatctcgcctactgtggtgtactttgaggtggtattggcttctctacgtctagatagacagcttagctagatagatgcacacttcatcaacctggcttcctggtatgctgctgaacttgtagtagtaattctgagagaagtttggaggaattctgagagaagttttgtctggtgcggtggtgcctgggccttgcaccttactagtagctattactcgctgcttaattcagtcatatttggtactcctgtgtacggtactaattgagaaaaactggttatattatcaatatatcatactaccatcg

SEQ ID NO: 25798 - DNA, 1579 bp, Oryza sativa
  ref <308>: DATABASE ACCESSION NUMBER: AK101240
  ref <309>: DATABASE ENTRY DATE: 2002-08-28
ggttttgttgttcgcctccgctcgccgcgcctgcagatccccctctcgcctcctctcctctcctccccaaaccctagcgagcgaccaactcctgggtggggggatttttctccatggcgctgcagttcgtcgagtcgcagcgcgaggcgcggccggagctcgccgacccgtacgccgacctcgccgacctctaccagcggaagctctggcaccagctcaccctcaagctcgaccacttcctccagctccctgccgcgcagacgggtgacaccctcatacagctctacaacaatttcatcactgatttcgagacgaagatcaatcttctcaaacttgcgcatttcgcggtcatcgcttcgcgccagtaccccgacaaggatgctgctataagtttcctcgagggggtaatcacaaaattgcgcgagacaaaggacctgcgcatcaatgaacccattctctacgtcaagatgcaaatcgctgcgattaacctggagaagggaaatcagaaggagtgcaagaaacttttggacgaaggaaaatctactctagatagcatgactgatgttgatcccacagttcatgctagcctctactggatatcatctcagtgccataaggctcgccaagaatttgctgagttctacaagaatgcccttctgtatctggcttacactactgtagagtcactctctgagtctttcaaactggatttggcatttgatctctcccttgcagccttgcttggtgataacatctacaactttggggaattgttagctcgcccgattatcaacagtcttattggaaccaaggtggagtgggtctatcatatgttacaagcattcaacaccggcaacctagctctctaccaagaactatgtagggtccacaatgctgctctcagtgctcagccagctttggtgcagaatgaacggaaactgctagagaagatcaacattctatgtctgatggagataatctttagccgggcgtcagaagacagaactatcccattaagtgttatagccgagcgcactaagctttctatcagtgatgtggaatatcttcttatgaagagcctctcggttcatcttatagaggggataattgatgaggtggacagcacagttcacgtgtcatgggtccagcctagagtacttggaattcaacaggtgaaggcgttgcgcgagcggttggacgcctgggttggaaaagtgcataccaccctgttgtccgttgaggcagagacgcctgatcttgtagctgcataacttatccaaccttccttttgctatatggccttggtcaccaagggtgcggtgcgaaaagagagatgatctggctgtggtggctgtagttttctgggtgatgaaaacatgttgccttgaacgtttccctggcaccctattgatcaggacctgtaatttcatttctctttaaatcctctggacgttgaggcctggagcttgatgcattgatcacggaaaaagcacaagcggatcaaaagtttcataccagtagggtgtcattgtagttcttttcccagtgtgatttagattgttactcagcgggtattttc

SEQ ID NO: 25799 - DNA, 2116 bp, Oryza sativa
  ref <308>: DATABASE ACCESSION NUMBER: AK101241
  ref <309>: DATABASE ENTRY DATE: 2002-08-28
gacagctatcacacgtacttatacctccgccgcttcttcctcttccctcccatttcgcgcatttgcaagaatgcgtcgttgagcttagcgggtgaggtggtcggaggcatgggagaagaggcggcgacggcggcggcggcggagcgagatgagcaggggagtgtcacggcggcgctcgacgccattaccggtttggtgtctgcctccttggccgcttcgctcttcccgtacaagtggcagctcatcagggacaggctcaaccggctccacgccggcctcgccgacatagccaccggcggcggtgaaggcggcgaggggcatggggcgttggcgggggttcttggggcggtggtggagacggcgagggaggcgtcggagctggtgccgaggagccaggggaggcactacgggggagggaagctgcggctgcggagcgacctcgacgtcgtggcgggcacgctcgacgcgctcgtggcgcgggtggacgaggtgtacgcgtcgggcgcgctgacgcgggcgcgggcgctcgtcgtgtcgaggccctgcgccggcgccagccgcgacgacgtgcggttctacgtgcgggacctgttcgcgaggctcagggtgggcggcgccgagatgcggggggaggccgccgccgcgctcgccgaggtgctgcacgacgacgagaagtgcgtccgcgtcgtcgtgtccgacgtcgcagacggcgtctgcgtcctcgtctggctgctcgagtgccccgacgcctgcgtccaggaggaggtcctggaggccgtctccgtgatcgccgggtttgaggcttacagaggcgaccttgtcgtcggcggcgtcatcgctccggtgatccgtgtcctcgacagtgccggggacaggccctcggcgaaggagcgggcggcgcggttgctgtgcaagctcaccgagaactccgacaacgcgtgggccgtcgccgcgcacggcggcgtcacggcattgctcaacgtctgcgccgactacaccgccagcggcggcgagctcgtgtgcgcggcttgccgtgtgctgaggagcctcgccggcgtcgacgagatcagaaagtacatggtggccgaggccggcgcggctccggtgctcgtgtcgctctgccggggcgccgcggacgaggcggcgcaaatccaggcgatggagctcctcgccgccatcgcctccggcgacagctccgtcagggaggccgtgctccaggaaggcgccgtcgagtccctggtcagcgtgctcgacccggcctccccgcgctcctccaaggcgcgggaggtcgcgctccgcgccatcgacgcgctctgcctctcctccccacccttgacatcccggctcgtcgccgccggcttcctcgaccgcgtcctcgtcttcctccgcagcggcgacgccacgctgcagcactgcgccctgaaggcggcgcaccggctatgccacgcctcggaggacaccaagaaggccatgggcgacgccgggttcatgccggagctcgtgagcatcctccacgccgccaagtcgctcgaggcgcgggacatggcggcggaggcgctctgcgccatggtgtccgtgcaccgcaaccggaagcggttcgtccaggaagaccgcaacgtggcgcaggtactgcagctgcttggccccgacgacgagaagctctcgccggcgaagcgcttcttgctctccaccctgatgcacctcagcgacagcacctccggccgccggaagatcatgtcatcggagcatctcaggaatctcgagaggctagcagagacgaacgtgacggacgccaagaagatcgtgaagaagcttggcgggagcaagctcaggaacatcttccatggcatctggagcctgcagaaagcttgacgacgacaagaaccagctcaccgctagtactatactactgctcgtatggccttagctaacacacatgttcgcctcatgtttttttgtaaccgtgaatggacgaatcaatcccaagtgtattctactactccactcgatgatgaattcttgatactcagagaactcatcactcatcctctgtgtatactagctcatctcatccgtgtcaaataaaagtacaaaaaaaaaatccattcgagaaagc

SEQ ID NO: 25800 - DNA, 830 bp, Oryza sativa
  ref <308>: DATABASE ACCESSION NUMBER: AK101242
  ref <309>: DATABASE ENTRY DATE: 2002-08-28
gctactaccagtctaccaccaccaccacctagactgctcctaacctctctcccttccctttcatccccgaagagtctagaagagagagagatgaatggtgctgtggtggggttgggggagacggccaagggcagcggcggcggcggcggcggaggagaggtgacgctggagacgctgaggaggaagatgtcggagttcgccagggagagggattgggagcagttccacagccccaggaaccttctcctcgctctggtgggtgaggtgggggagctctcggaggtcttccagtggaagggggaggtgcccaaggggctccctgggtggggggagagggaggtggagcacctaggcgaggagctcgccgatgtgctcctctacctcatccgcctctctgacatgtgcgatgtcgaccttggcaaggcagcgctgcgtaagatggagctcaatgcgcgcaaataccccatcgggcagtgcaggggatcctccaagaagcacacccactactccaccaccaccaccaccaccgacaacggtgcttccggtgatgacaacaaccgcaatgctggtgccggtgccgatgccgatgccggcaaggaacagtgctagcaatggctcctcagacagttttagcagcctggctctggtctttggtcttgttcatcacaccataggatgtgtgttgaaacagtattctagtagagtgaaatgaaaccgtcctgttctctctactgagtttgatttcttgaagaaacttagctcaaatcctttgtattgggctacaaacatgctctgatagctatggcaatatgatcattaatatctcattg

SEQ ID NO: 25801 - DNA, 1391 bp, Oryza sativa
  ref <308>: DATABASE ACCESSION NUMBER: AK101243
  ref <309>: DATABASE ENTRY DATE: 2002-08-28
ggggagagagctgcggcggccggcggcgatgctggcgccgcggagcctccggaaggcggccgtgccgccgtccctgctctccgacccctcgcccggcagcctccagcccacccgcctcgccgtccacgtcaatgccgccggctcctcctgctccgcctacctcgcctccggctgccgcgtctacaagattgagatagccatggagggtgagatgttgtccaagggcaaggagagcctcttgattcctatcaatgcagaggtcataagctcgtcagtggtggatcgctgcccacatcgttcagagatccagagtgtagttcttgcagagggtgaaggtgatggctgtttgattcttggaacagttgactcttatggtcatcttattgtatctcggttagatacggtggctgatgacattgacagggcctcctattcagtaccacctcgtgattgtggtgtcggagaaggaagttgggctgggttatgttttagtccaatgcaccaatccacggtagctgttgctcgtgaattgtgtaagtgcattgatatctacgaccaggacattcatgttcgcagtttacgtacgttatggtatccatcttcatttagctttgcccagtgcatgccacaagtgaatgaaagtggttcaatgctagcaatcgctgaaggttctcagctgagcatatgggacttgagaacgagcaataatggtggatgcatacaccgcatttctggccctattggaggcatcatatactctctctgtagttctccttctggaccaattgctgttggtggaacagatcgtactgtaaccatctatgatcctcgcaggtggtcagccttgtcaagatgggttgggtgctccaagtatgagattacaggcctttcattttcatcagttgatgaatctttcatttatgtccaaggtgttgattatgagattacatgtggactttggaagggaaacgagcgagctttctcatttcgaggggactccaactggttgggtttttcaaagtgtgcgaatacagatgttgtggctggatggtgcgaatctggaagtgtcttcgttgctgatgttaggcaggattgtctatcagtaatcgggtaatgtctgacggctggaagctagcaagaagccaatattcgtttttagaggtgattttagcgtctcctgcccaaactgaatcaaggatggacagtgattacttaccctttcatctgcattagaatttctgtagctaatgtttggtgtgttgatgcaactgatcatgttcttttccgcccccatttttatataaaaaaaaagtcagtagggggccttttggaatcacttcacgagaggaaccatactctaatttactatatatgaactgtaacatttagtt

SEQ ID NO: 25802 - DNA, 2439 bp, Oryza sativa
  ref <308>: DATABASE ACCESSION NUMBER: AK101244
  ref <309>: DATABASE ENTRY DATE: 2002-08-28
ggaaacggctacttcctccccttcctccccctccaccaccttctagaaccttccacgatgccgccgccgccgcggaagcgcctcggccgcgcggccctgctcctcgccgccgccgcctacctcgccttcctcctcctcttcgagctcccctccctcgacctcttcccctcctccgacgccgcggcgggcgcggcgatgcccacccaccgcccacgccgccgcgagctcgaggcctcgtcgtcgtcttcggcgttcgcttcccccgtcctccgccgccccgccacggcggtgtctcccgcgccggcttctgctgctgccgcggcggctggggcgctcccgatcttctcgtcgctgctcctcctcccccggcccaacgcgacggccaccccgttcgacgggaccgccgcggaggcgttcgccgcggcgaggccgcacctcgaccacctcaggactgctgctgctgcggcggcggaggaagcttcgtcgtcgtcgacggcgccgacgtgcccgacctcgatctcggtgcacgcggacgggttgcccggggacggggtgaggacggtggagctgccgtgcgggctcgcggtggggtcgcacgtgacggtggtggcgcggccgagggcggcgcggccggagtacgacccgaagatcgccgagaggaagtccgggcaggagccgctcatggtgtcgcagttcatggtggagctggtcgggaccaaggccgtggacggggaggccccgcccaggatactccacttcaaccccaggatccgcggcgactactccggcaagccggtcatcgagatgaacagctgctaccggatgcagtgggggcagtcgcagcgctgcgagggctacgcctcccgccctgccgacgagacagttgatggccaacttaagtgtgagaaatggattcgtgacgacgacaagaagtctgaggaatcgaagatgaagtggtgggtaaagcgtctaattggtaggccaaaggatgtgcacatcagttggccataccccttcgcagaaggcaagctgtttgttttgactctaacagctggtttggaaggttaccatgtcaatgttgatgggcggcatgttacttcctttccttatcgcactggttacactcttgaggatgcaaccggcttatctctgaatggagacatcgatatcgaatccatttttgctagttccctgcccaattcgcatcctagttttgccccagagagataccttgaaatgtctgaacagtggagggcaccaccactaccaactgagcctgttgagctttttattggtattctttcagcagccagccattttgctgagcggatggctgtacggaagtcgtggatgatgtatacaaggaaatcgactaatatagtagctcggttctttgtggctctgaatgggaaaaaggaggttaatgcagagctgaaaagggaagcagagttctttcaagacattgttatagttcctttcatggatagctatgaccttgttgttttgaagaccattgctattgctgagtatggggtgcgagtcatacccgcaaaatacatcatgaaatgtgatgatgatacatttgttagaattgactcagtactggatcaagtgaagaaagttcgaagtgataagagtgtgtacgtaggaagcatgaactacttccataggccactaagatctggcaagtgggctgtaacttatgaggaatggccagaggaggcatatccaaattatgccaatggacctggctatgtaatttcagccgatattgcacgctacattgtatctgaatttgacaatcagacacttcggctatttaagatggaagatgtaaacatgggcatgtgggtcgagaagttcaacaacacgcttcggccggtcgaattccggcacgatgtcaggttctaccagtctggctgcttcgacggctacttcacggctcactatcagtcccctcagcacatgatctgcctctggagaaaactgcagtccggaagctcacggtgctgcaacgtgagatgacaatggcagcaaaaattagccgtattttggagcaaatagagacgatgttaactcgtaagctcagctcgctgttggaacaccagaaaatcatcagcattcagcgatgctgacggttcggaggagcgctcatcttctggactggacctgatatatgattcgttcattcttttggtcggtggctccgtttcaagctgctgatttctgacacctgatcaatgatgttcttgccttcttggggattctttcgcctgttgatatttatactcgcgtcaaatttatttgacctaggaatttttgaggctggtggtggtggtggtggcggcggtggtatgccggcggcatgttttgtgtataaaaaggattttatgagttttactgtttgtgagtatatattcggtggactcctattggctg

SEQ ID NO: 25803 - DNA, 3800 bp, Oryza sativa
  ref <308>: DATABASE ACCESSION NUMBER: AK101245
  ref <309>: DATABASE ENTRY DATE: 2002-08-28
gactctctctctctctctctctctctctctctcggctttggtttgccgcgttacatccgcgaaaaggaggaggaaacaggcgaagcgaggagctccagagggagaaattccgtagaaagcgaggagcgtcggctcccgcttttgatctgtgggaattcaaacggtggtgcttgctatttcgacgtaagggcttaaacgaattggtttgtcactattttggtttcaacacagaaggttgtgggaccatggtttcaaaatcttattcaaatctgttagaaatgagttgtggagatggagttgactttcggcaaccttttaaatctcttcctcgtgtggtaacctctcctggcattatatctgatcctgattgggacactagaagtgatggcgattcagttggttcagcatcttctgttgagaggaaaataattgttgccaacttccttccactgaactgtacaaaagatgaagctgggcaatggtccttctcaagggatgatgatgcactgctcatgcaacttaaagatggtttttcaaatgagactgatgtcatttatgtgggtagtttgaaggttcaggtagatcccagtgagcaggatcaagttgcacagaagcttcttagagattaccgatgcatacctacttttctccctcctgacctccagcagcagttctatcatggcttctgtaaacagcaattgtggccacttttccactatatgcttcccatttgtcttgacaaaggtgagctctttgatcgctccctgtttcaagcctatgtccgagctaacaaactctttgccgacaaagttatggaagctattaatacggatgatgatcatgtctgggttcatgattatcacctcatgcttctcccaacatttctgaggaagaggttacaccgaataaagctaggattttttctccacagtccatttccctcctcagaaatctacaggtcactgcctgtaagggatgagatcctgaagtcattgcttaatgctgatcttattggtttccaaacatttgactatgcccgccacttcctttcttgttgcagcagattattgggtctgcattatgaatcaaagcgcggttacattggaatagattactttggaagaacagtgagcctgaagatcctctcagtgggtgtccatgttggccgtcttgagtccatcctaaagttgcctgctacagtaaagaaggttcaagaaattgaacaaaggtataaaggcaagatgctcatgttaggtgtagatgacatggacatcttcaaaggaatcagtctaaaactgcttgggttggagctacttctagataggaacccgaaactcagagggaaggttgtccttgtacagattgtcaatccagcaagaagcacagggaaagacgtggaggaagcaataacagaatctgtctctgtagctgaaagaatcaaccttaagtatggctctgtagattacaagcctgttgtccttattgatcatcgcataccattttatgaaaagattgcattctatgctgcatctgattgttgtattgtaaatgctctgagggatggtatgaacttggtaccatatgagtacactgtttgccggcagggaaatgaggagatagataatgccagaggcagtgacacaaattgccatcacacaagcacactaattgtgtctgagtttgttggttgctcaccatctcttagtggtgctttcagggtaaatccttggagtgttgacgatgtggctgatgccttacaccatgcaacagacttgactgaatccgagaaaaggctacggcatgaaaagcactaccgttatgttagatctcatagtgttgcttactgggctcatagctttgctcaagatctggaaagggcatgcaaagatcactacagccgaaggtgctgggctattggttttggtctgaacttcagagttattgctctttctcctggctttagaaagctctctttggaacactttgcttcttcttacaacaaggctaccagaagggcaatatttcttgactatgatggcactcttgtaccccagtcatcaatcaataaagctccaagcgatgaacttattactattctcaacagcttgtgtgatgacccgaagaatgatgtattcatagtcagtggaagagcgcgtagtttgcttgatgagtggtttgctccatgtcagaagcttggtattgcagcagaacatggctattttgtcagatggaacaaagcagctgaatgggaatcaagctatccaaaccatgattttgagtggaagcacatcgctgaaccggtcatgcaagtttacaccgaaacaactgatgggtcctccatagagccaaaggaaagtgctctagtatggcattatttggatgcagaccatgacttcggttcctgccaagcaaaggaactactgggtcatcttgaaagggtgctatcaaatgaacctgttgttgtgaagtgtggtcattacattgttgaagtcaaaccacagggagttagcaagggtcttgttgtggacaaggtaattcacagattgatgaacaacgggaagacgcctgatttcgtagtgtgcatcggtaacgatcgatctgatgaggacatgttcaaaagcatcgacagcatgacctccagctccgcattccctgcagttccagaagtctttgcctgttcagttggtcagaaacccagcaaggcaaagtactatgtcgacgatgctggtgaagtagtaagattgctcaagaatgtagctggcatttcgtcgcaccgggaggccgccgtgcaggcggcgctccagcaggagatcgccctcgccgccggcctcctccgcatcttcttccacgactgcttcccccagggctgcgacgcgtcgctgcttctgacgggagccaacagcgagcagcagctgccgcccaacctgactctgcaaccacgggcgctgcagctcatcgaggacatccgcgcccaggtgcacgccgcatgcggccccaccgtctcctgcgccgacatcaccgccctcgccacccgcgacgccatcgtcgcctccggtggtctgccctacgacgtgccgctcggccgcctcgacagcttcgcgccggctcccagcgacgccgtcttccagctcccgcagcccacctccgacgtctccacgctgctcagcgccttccagacccgcaacctcgacaacgtcgacctcgtcgcgctctccggcggccactccatcggcagggcgcgatgcagctccttctccaaccgcttccgcgaggacgacgacttcgccaggaggctcgccgccaactgctctaacgacggcagccgcctgcaggagcttgatgtcaccaccccggacgtgttcgacaacaagtactacagcaacctggtggccggtcagggggtgttcacctccgaccaggggctcaccggcgactggcgcaccagctgggtggtcaatggcttcgccggcaaccactggtggttctacggccagttcggcagctccatggtgaagctgggacagctccagggtccttcagggaacgtcggcgagatccgccgcaacagctgcttcgtgcccaacagccagaccatccttgcggccgccggcgacgatggcttcacggcatctgcttgacatcatcacgtcaaaagtcttgtgttgtacaagactcgatcttgttcttgatctgagcactagctagccgtctcgtgcgtgcatgataatactgcgtacgtactttgtagtgcagtgcgtcccacgtacgtgacgtatagtttaataagagtatctttaatc

SEQ ID NO: 25804 - DNA, 1004 bp, Oryza sativa
  ref <308>: DATABASE ACCESSION NUMBER: AK101246
  ref <309>: DATABASE ENTRY DATE: 2002-08-28
gaggcgagcactaagagtatttttgacgtgtttaccggaatgtatttccgctattgctccgaaatggtttagatagcaaggaggccgcagagaagtggagaggactcacgaatcacgatccatttctatcttgagggaattggggatagcaaaagtcagtgaaaagggccagatgacaagcatggacaaggcagcaaatgtggtattggatattgaagggctgcctcagcaacctgataaatgctgcactggaagtccaaaaatgactagagccctatctcgcaagggctcaaatcgcatggaaaggaggagcggtgaagagcaggaacaagatgacttggtgaagaaacttattattaaggttgtgccatctcagttggagcagcttaagatgcccctggtgcagaacaaagccttggtcactccacaatcacaatgtgctgcctgtgcacctattctaactgactctggggaaggaaggaacaagaagtttaatcgacttacctcggttcacccccggaaaatcctactgttctttgcaactctgtcgagcgtgggcacaatgatactgatatacttcacgctcgcaatcaacggtggcaaagcggaggcgtagtcgtcaccggagcgaaacacgacaacggtttcagaagtgcatttcatagctggaattttcgcttctcgttatcagattttggtttgtttgggaggagagaactggaggaggaagcaacagtagcagcagcaatgatgcagccaggctctcatgcctgacacacaatgctgggagtgttgctcgatcagtgctccattgtcacctttgcctgacctgatctccctgaattcttttgatctgtacatgtaaattgctgtgaggcctttgttgagaggtagagagagagagaaagagagatccatggattgttgttggtgtaaatgagctggggcgaagctatccatttctgccatgcgagtcccagcttagctgtaaaagatctgaagcg

SEQ ID NO: 25805 - DNA, 1835 bp, Oryza sativa
  ref <308>: DATABASE ACCESSION NUMBER: AK101247
  ref <309>: DATABASE ENTRY DATE: 2002-08-28
gtctcttccctctctctctttctctctccaaaccccacgcacgccgcgtcgccgcctcctcctctccatctccgctgctattattgcccgcgcagacgcaggccaccatccttcctctcgctcacgctcgctgctatatgggggtcctcctcatcgcatcgcatcgcatcacctcgcacgggcgcgcgcgccgtgccgtgccgctagctcgatccgcctcgtacgccagctcgctcgctcgctcccccaccccgctgctgcacggctgcgcccgcgctgtcccctgtccccccgctcgccgcggcgatttatacccaccacgccccctgctgctgctataatgcccatgagtgaaggcggcgaggggtggttctgagttggccgttggcgtgctgcgtgtggagatgggggaggaggcggtggtgatggaggcgccgaggcccaagtcgccgccgaggtacccggacctgtgcggccggcggcggatgcagctggaggtgcagatcctgagccgcgagatcacgttcctcaaggatgagcttcacttccttgaaggagctcagcccgtttctcgttctggatgcattaaagagataaatgagtttgttggtacaaaacatgacccactaataccaacaaagagaaggaggcacagatcttgccgtctttttcggtggatcggatcaaaattgtgtatctgcatttcatgtctttgctactgttgcaagtgctcacccaagtgcaaaagaccaaggtgcctcaattgttcttgcagctcatgctgcgacgagccgtgctgtaagccaaactgcagtgcgtgctgcgctgggtcatgctgtagtccagactgctgctcatgctgtaaacctaactgcagttgctgcaagaccccttcttgctgcaaaccgaactgctcgtgctcctgtccaagctgcagctcatgctgcgatacatcgtgctgcaaaccgagctgcacctgcttcaacatcttttcatgcttcaaatccctgtacagctgcttcaagatcccttcatgcttcaagtcccagtgcaactgctctagccccaattgctgcacttgcacccttccaagctgtagctgcaagggctgtgcctgtccaagctgtggatgcaacggctgtggctgtccaagctgcggatgcaacggttgtggctgtccaagctgcggttgcaacggctgtggccttccaagctgcggttgcaacggctgcggctcgtgctcttgcgcccaatgcaaacccgattgtggctcgtgctctaccaattgctgtagctgcaagccaagctgcaacggctgctgcggcgagcagtgctgccgctgcgcggactgcttctcctgctcgtgccctcgttgctccagctgcttcaacatcttcaaatgctcctgcgctggctgctgctcgagcctgtgcaagtgcccctgcacgacgcagtgcttcagctgccagtcgtcatgctgcaagcggcagccttcgtgctgcaagtgccagtcgtcttgctgcgaggggcagccttcctgctgcgagggacactgctgcagcctcccgaaaccgtcgtgccctgaatgttcctgtgggtgtgtctggtcttgcaagaattgtacagagggttgtcgatgcccacggtgtcgtaacccatgctgtctcagtggttgcttatgttgatctagatccttttttggttgttgtttttcttgtattttttagttgttaggcctttgattaagttcgaactttcataaatatatggtgtttatcctgtaaagaaatgatgatttcaaggatttttcatagctatgagacgaggttgaaccg

SEQ ID NO: 25806 - DNA, 1181 bp, Oryza sativa
  ref <308>: DATABASE ACCESSION NUMBER: AK101248
  ref <309>: DATABASE ENTRY DATE: 2002-08-28
gtctcccgcagagtccacggccgatccatcccctcgtgcaggccgccggcggcggggaggaggaggaggaggcgatggcgtcgtcgcaggccaacctcgacaagatgcagctccgccagagctaccgcaacctctggcactccgatctcaccagcaccatccaggccgacttcccatattgctgcctcgcgctctggtgtggaccatgtgtgtcatacatgcttcgcaaaagggctctgtataatgacatgtcaagatatgtctgctgtgctgggtacatgccatgcagtgggaagtgtggtgaaagccgatgcccagagttctgtcttgctactgaggtgtttctgtgctttggtaattcagttgcttcaacccgcttcttgctccaagatgaattcaacatacagacaactaaatgcgataactgcatcattggcttcatgttctgcctccaacaaattgcttgtatcttctctatagttgccgctattgttggtagtgaagagctttcagaggcttcccaaatcctttcctgcttgtctgatatggtctactgctcggtttgcgcctgtatgcagacccaacacaaaattgaaatggacaagagagatgggaagttcggcccacagcccatggcagtgcctccaatgcagcaaatgtcgcgcatcgatcagcctattccacctcctgttgggtacacaccacaacagccagcatacggtcagccttatggtggctatcctcctgctccgcctgctcaaggttatccaccagctgcttaccctccggcaggttacccccagggtggtgcataccctccccctggctcttatcccccacctggttcctacccgcctcagggctcctaccctcctccacaaggttactacggcaagtaaaggaaatgcagaaattggagatatgtctttgtgacgaaatcggtatattgtgaacaatgtaaacattagggtggttgtagtgttattataggtgatgtcgatatattaatcgatctgtgactggtctgggtggtaaactgcaaacataatttggattcctccgggtgtggtatactgtgaacccgtttcgtagaaattatcagctccccgtgttgatcattcttgaatacgttcttctctgaataaaggatcgccatgaaatgtcaacttagatttggaact

SEQ ID NO: 25807 - DNA, 1553 bp, Oryza sativa
  ref <308>: DATABASE ACCESSION NUMBER: AK101249
  ref <309>: DATABASE ENTRY DATE: 2002-08-28
tttttttttttttttttttttttttttttttttttatcaaagaaatatcttgtctgttagttaggaaactaatacaatacaatagtttcaggatagatcagatatatgctgaacacaacgagtgcagcagtttttacacgtaaagcccttttaatttatgagtcctacccccgcttcatacctgacctatacttatcagttatcagccttataaataaaggctttggcactatgaacttcaagaacaaaacacaaagcaccagaggaatttatccaaatagattcactaaggcaagcattttcagctttgctgcatgcaacaaaaccaggagaaggcccacagagctcaagagaaaacaacccctactttccgagcaaaatcatcatcgtcatcatactcttcatcatcatcttcataagcattctcgtcatcggatttgtagtcctggccttcgataggctcatagtaggactccccctccctctggtcataattatcagcatcttgattttccacgggatccacctcaataatatcttcagcctcaagtttgtcaccatgagatgaagattgcccatggccctccacagggatgtggccttcgtctctgaattcttcatcgccagatccacttttgtattcatcagaactaattatgttgtcaccttccttctcagcttcagccagagaagcttgcctgtgtgagacctcggcagatttatcttgtttggggctacaggcagatgtgccattggcccatgctgcctctcttttccgctgtaagatgacactaaggggctttgggccctcaaaatcaagcgatgcttcaggctcaacacttccattggccttactggagtccctcgagtttttgcaactatacatcagactccaggctatggtatgagtattgcttcatgcggtacgacaactataactttcttggggaggtggacacgagggaggatgcaagcgtgacaatgagacaatggccggacatggacaaccccaaggctttccagaaagcagcggggaaggcaatgggaaaagcaacagcgcaagccgttgcggtgggcagcagcgggctaggtagggcgaaggagcaatacaccccattcgtgagtgtctacgcattggcgcagtgcacacgagacttatcgccgccgtcgtgcgcgcaatgcctgtcggcagcagtgtccaagtttgataaggcctgtggtagcggaccagggtgccagatcgactatagcagctgctgggcgcgttacgagatctaccccttctacttcccccttgctgctgccggtcgcgccaccatcgatatgaccaaatacactaaggtcaccgtgcattgataagaatataagatcattgtgagacctcctcaaataagtacttgtgttgacgtttaatttcagtaatatgataaatttgtatcgatccttagcatgctagcttcagctagcttggaataaataaacaaataaagatgtgtactgagggcacgttgtatgagcaagtgaattgaatagtattgaaatcctttgttact

SEQ ID NO: 25808 - DNA, 1742 bp, Oryza sativa
  ref <308>: DATABASE ACCESSION NUMBER: AK101250
  ref <309>: DATABASE ENTRY DATE: 2002-08-28
gaggagactagagagcgccactcccaatggggagtaggagcagaggagggagacacctcctcctcctcctcctgcttcacctcctctccctccattcctctctgctaccatgggcggcggtgtcggcggcgggagggggtggttccggagacccgtacgtcggcgtgacgatcgggacggcggtgacgaacctgctgtcgccgtcggacctccccgagttcctccgcgcgcagcgcatcacccacgtgcgcctctacgacgccgacccgcgcatgctgtcggcgctagcgtcgtcgggcgcccgcgccatcgtcggcgtccccaacgacgagctcctcgcgctgggctcctccccggccaccgcctccgcctgggtcgcccgccgcgtgctcccctacgccggcgccaactccagcaccccggggctcatcgccgccatcgccgtcggcgacgaggtccccaccgcgctcccctccgcgctccccgtgctcctcccggccatccagtccctcgctgccgcgctcgccgccgccaacctctcctccatcccggtctccacaccgctccccttctccgtcgtcctcgacccgttcccaccctcccaggccttcttcaaccagtcgctggccaagtcgttcattctcccgctcctctcccacctcgccaacacctcggcgccgctcatgctcaacctctacccgtactactccatgatgcagagcaacggcgtgatcccgctcgacaacgcgctgttcaagccgctcccgccgtcgctggagatggtcgaccccaacacgctgctccactacaccaacgtgttcgacgcgatgctcgacgcggtgcacgtcgccgtgaagaacctcaacgcgaccggcggcggcgggccggtgccggtgctggtcacggagaccgggtggccgtcgtacggggaccgcagggcggagccgtacgccacgcgggacaacgccgacgcctacaactccaacctcatcaagcacgtcaacgacaagcccggcacgccgatgcgccccggcgcgcaggccagcgtctacatctacgagctcttcaacgaggacctccgcccgggcccggtctcggaggcgaactggggactcttccacggcaacggcacgccggtgtacctgctccacgtgtccggcgccggcggcttcctggccaacgacacgacggaccggacgttctgcatcgcgtccgacgacgccgacgagaaggcggtgcaggcggccatggactgggcgtgcggccccgggcgcaccgactgcacggcgatccagccagggcaaggctgctacgagcccaacgatgtgcggagccacgcctccttcgcattcgacagctactaccagtcgcagggcaaggccgctggctcctgctacttccagggcgtcggcatggtcaccaccactgatcccagtcacgatagctgcatctttccaggaagcaagctgttgagcaacgtcaccaaatctgacggggcaaacacaaccactgcgcagacgagtgatgcagagggctctgcaatatggaggctaagaactggaagggagacagggttcttgttcatcctccggtggttgttgagcttgtcagtggtgcttatcacgacgaattcaaacttttggacatgacaagagcatgtagattgtaacaaaaatggaatttttgggatgacactttagaggagcaggcaggggctgtatgtttagtgattctttattgtt

SEQ ID NO: 25809 - DNA, 2035 bp, Oryza sativa
  ref <308>: DATABASE ACCESSION NUMBER: AK101251
  ref <309>: DATABASE ENTRY DATE: 2002-08-28
gtcactagcacactgtcagtccttgtcacgtttgctacggccatcccgtccaatccaccgcagaaacgccaatgccacctccaagaaccaagcaccggccgcttctcctcgccaccaccttcctctcccttctgctgctgctgctgctgctcagcttgctctccaccgcgcacaaggcattcgccgtcgctgacgacgacggccaccgcgcgcgcgtgcttcttgcagcagacggcggcgagaggaatgccgatgccgagcacgcggccgccgtggaccggcattgcgccgggacgctccaccgggacgtctgcgtgtcgacgctgtccaccatcccgaacctcgcgcggaagccgctccgggacgtgatctccgaggtcgtggggcgcgccgcgtcggcggtgcgcgcgtcgtcgtccaactgcacgtcctacctccagcggccgcggcagctgcgcacgcgcgaccgcctcgcgctgtccgactgcctcgagctgttcgggcacacgctggacctgctgggcacggcggccgcggagctctccgccgggaacagcaccgccgaggagtccgccgccggcgtgcagaccgtgctgtcggcggcgatgacgaaccagtacacctgcctcgacgggttcgccgggccgtccgcctcggaggacgggcgcgtccggccgttcatccagggccgcatctaccacgtcgcccacctggtctccaactcgctcgccatggtgcggcgcctcccgacccagcggcggcgcggggcggaggaggagccattggaagggtacggccgcgtgcgacgcgggttcccgtcgtgggtgtcggcgtcggaccggaggcggctgcagcagcaggtggcggcggacgtggtggtggcgaaggacgggagcgggaagttcacgacggtgagcgaggcggtggcggcggcgccgaacaacagcgagacgcggtacgtgatatacatcaaggccggcgggtacttcgagaacgtggaggtcgggagcgagaagaccaacatcatgttcgtcggcgacggcacgtggaagaccgtcatcaaggccagccgcaacgtcgtcgacaactccaccaccttccgctctgccacgctcgccgtggtgggcacggggtttctggcgcgggacataacggtggagaacgcggcggggccgagcaagcaccaggcggtggcgctgcgggtgaacgccgacctgtcggcgttctaccggtgcagcttcgcgggctaccaggacacgctgtacgcgcactcgcttcgccagttctaccgcgactgcgacatctacggcacggtggacttcatcttcggcgacgccgccgtcgtgctccagaactgcaacctctacgcgcgccgcccggaccccaaccagaagaatgtgttcacggcgcagggccgggaggaccccaaccagaacaccggcatcgccatccagggctgcaaggtcgccgccgccgccgacctcgtccccgtccaggccaacttctcctcctacctcggccgcccgtggaagacctactcgcgcacggtgttcctgcagtccaagatcgacagcctgatacaccccagggggtggctcgagtggaacggcagcttcgcgctcgacacgctctactacgccgagtacatgaaccgcggcgacggcgccgacacgtcggcgagggtgtcgtggccggggtaccacgtgctcaccaacgccaccgacgcggccaacttcaccgtgctcaacttcgtgcagggtgacctctggctcaactccagctcgttcccctacatcttggggttgagctgaaagtggtggcttctggacagtctctggggatggggatttttgggtcttatactggttttggtcctttttggaataagagtagctcatcacaggtttaagataatttgtagtaaacctggagctaccaccaggccatcaccaccaagtgttttgttacgagggttgaagcctacaatggccgaaggctaatcattggaaggggataggttcattgcttctgagct

SEQ ID NO: 25810 - DNA, 1758 bp, Oryza sativa
  ref <308>: DATABASE ACCESSION NUMBER: AK101252
  ref <309>: DATABASE ENTRY DATE: 2002-08-28
gattcctcttcgtctccaaacccttcccaaaaccctactccgcgcacgcgcctctccttctagaaccttctggaaccctcgcccccgcgaaggcggcgccgccgccgagatggcctcctccccctccgccgtcgtcctgcaggccgccctcgacggcgacctccacctcctgtgtgaaatggccaagaagttggacctgcggggattcaaggacatgaatgggcgaaatgcgcttcacttggctgcaagctatgggcatctggagatctgcaagttcctggtggaggaatcgggccttgatgtcaactcaggctctcacagaggtgagacaccaatacttctcgccgcatgtgacggggacattaatgttttaatataccttcttgatcatggtggtgacccagccatacctaacgcggggggcttcatgccgctgcactacgcagcagagtacgggcatgttgatgttgtgagactattgctgtccaaaggagttcatgtggatcctctgaattatagtggggccccgctgcacttggctaccgcaaatgaccatgatcaggttgcgaaggttctgcttgagcatggtgctgatcccaacagagttgtcaaccatgtcctttcaccactcgttgttgcttgctgcagccactccttgaaatgcatgaagttactgatcaaggctggtgctgatgtgaatgatagaagttctactggaccaagaacgacccctttagtgcttgcagttgatgatggatcagccgatattgtcaaaatcttgctagaggctggagctgaccctaacattcgtaacgagtgggaggattcctatcatgatggcagcagctcgtggtcaacgagagcttgttgaaattctgtttcctaggacaaaaccaattccatgtctgccagattggagtgttgatgggataattagaactatgagattcacacgtaccgaacctgaggatgcagttcctgtggaaatactagtatctgattcgaagttaaatgccaaggaagcatttgcagagggtgaatacattacagcaatctacttctacaccaaggcactggaaaaagccccacttgatgccaccttgttcgccaaccgcagcctctgctggctgcggctgcgagaaggagacgtcgctctattggatgcgcgacgctgcaaagccctgcgccctggttggtccaaggcatggtaccgtgagggcgcggccctcagtctcctgaagaactacagagaagcggcggcggctttcacggaagcgctgaaacttgaccctgagaactacgagatcaagatcgcgttaagagaggcgttggagtgtcggaagagagctgcacgctctgaagaagataagaacccttgagctgctgctgctgctgcatcagtgcatcacccttttgacctcacctttcagactgccacatctctgatctcacattctctctacgtgtaactaccaacggcctgtttcccaaactatctaaactgtttagctgatcaccatgcatctgtgtcctttggtcgaaaaaaaaaacgtagtaactaggagtagttcgctgggaagggacatcccttgagagatcaaaatagtttcctgttagtttcctgtagtttgatagattattgtcgatacatattgcagctgcacttgtcttccctttgtgtgcgactctaatgcaagcgcagactggcagcatgatatttgtatatgatatatgtgaagtccggcagtttcagtattc

SEQ ID NO: 25811 - DNA, 1889 bp, Oryza sativa
  ref <308>: DATABASE ACCESSION NUMBER: AK101253
  ref <309>: DATABASE ENTRY DATE: 2002-08-28
gctgctcaagaaaagctcggattcttggcggtttcccccaccatttccccctcctcgatctgggcctcctccccgcaagcgtgcgcctcgcattcccaccgagcgtgcctacgtgctgcgctttgctgtgctgcgggaggatggagggtggggggagaggcggcggccccgtggtggcggcgctgctgctggccgcgctcctcctcgccgccgtcgctccggcctccgcgtcgtcgtaccccgcaaaggtggtgagtgggttcctctccaacgcggcgtcgtcggtgatgaagcggctgtggtcgctcaaatccaccacgaagacaggaagcggagggaagtcgatggtgaagtacgagggcgggtacaccgtggagacggtcttcgacgggagcaagctggggatcgagccctacgcggtggaggtcacccagggcggcgagctgctcgtcatggactccatgaacagcaacatctacaggatcgccctgccgctgtctcgatatagcagaccaaagcttgtagctggttctccggaaggatttcctggtcatgttgatggaaggcctcgagaggccaggatgaaccatccaaagggatttacggtggacggcaggggtaacatttatgtggctgatgctatgaacatggctattagaaagatcagtgacacaggggttacaactattgctggggggaaatcaagcagaggagggcatgttgatggaccaagtgatgatgcaaaattttctactgattttgaagtccgctatattggcagtagctgctcccttttggtgattgacagaggaaaccaagcgattcgggagattcaactcaacttcgatgactgtgtatatcagtatgaagctggttttcctctaggagttgcggtgcttcttgctgctgcgttctttggctacatgctcgcgttgctccaacgcagggtattagggatggtgtcaacagaagatgaacctgagactcagactccactaaaagctagcattgcaagcatccctccataccagaagccgctaaaacaatctgtccgtccaccgttaatcccaaatgaggatgaatctgagaaacaagaggttgaagaggggttctttacctcaatcggtaaactcatcgtgggagccaaatcgtctgttgcagagatagttggtgcagccttttctagaaagaagcgtttaaacattcatcagcagcaggctagagtacgctcttggccggttcaagaaagctacgccatcccgcgggatgagacgcctccaccactggatacaagaactccaaccccacgcaagaactatgctttcatgtcaaaggagcccgaaaagatccaccacatccggcatggtcggtctcagttcaatggttggaacggagacgcacctcagcagcagcagcaacagcagcagcagcagcaaatacatcaccagcagtacttacagcatcataggcagtattcatcaggaccgcaaactttctatgagccaagctgtgaggcaacaaacgagattgtctttggagccgtgcaggaggtagacagcaagcgccgcgctgtggagatcaaacccatgaaccatggcgatccgcagtatgaccaagatgggttgcggcaccgcagcagctacaccggttacagcaacaactggtagatggccagatgtccttttttgcagctacatgattagatttactgctcgttaagttattttgccgtcgtcgaatttgtactgcctgaaacagataaatagaaattcaggaagtaccggtgatatgggcaaagtcgaaagctggtttttgctggatgaacgtcgtgatcttagacctctactgatatatatatctatgtaaatggaatgtgtttttcgcgtccg

SEQ ID NO: 25812 - DNA, 2519 bp, Oryza sativa
  ref <308>: DATABASE ACCESSION NUMBER: AK101254
  ref <309>: DATABASE ENTRY DATE: 2002-08-28
gagacgaaccacacgcagaagaagagagagaaagagagagagagagaaggcccaaacaccaccaaaccctagccctcacctcgccccgccgtccatggaggcggcgctgtgacccgccgccgccgccgccgtcgtcgtcgtcgtggcgtgcggaaccgatagggcggaggggatgaccgccagatcgggcgaccccggcgtctcgccggagtcgtcgtctgcggcggcggcggcggcggggtccgggggcggggagatctgggggacgtcggaggacctgctcctggcgtgcgccgtgagccgccatgggacggcgagctgggacgcggtggcgaaggagatgcagtcgaggtgcccttccgccgccgtgttcacccccaccacctgccgcctccggttccgcgtcctccaccgccggttctccggcggcgtcaccgccgagaacgaggacgccgacggcggcgaggaggaggaagaggccgacgccgccgccgtcgccggctgggtggaggaactccgcgagctgcgcgtcgccgagctccgccgcgaggtcgagaaatacgatctctcgatcgggtcgttgcaatcaaaagtgaaacggctcaaggaggagagggaaaagagcatctccggcgagacgaagccgccgccggcggcggcggcggtgaaggaggaggaggaggatgtacggaagggatcaccggaggaggccggcgccgtggaggacagggtctccggccacgaatccggccggtcatgcaaggagtcgaactcgtcagatctgaagcggccggagaacgaccccgcggtcgccgacgacgacgaccgggaggcggaggaggaggaggaggcggcggcggcgcccgcggccggcgacatcgccgtgaaggaggaggcgtcgggcgagtcggtggctgggtcgaaggaggcggacgtcgagaaggagagcagcgacgtgcagagctccgccagcccgtcccgccgccggcgacggaagggcggaggcggcggcgaagtggcggaggcggcgtcgccgtcggtgtccgtgcccctccccgccgccgaggccgagccgctcgtcgccttcctcgagtcggtccggaccagcaaggccggcgccgtgttcgagcggcggctcgatagccaggatggggagaggtacagtggcacgatcaggcgccatgtggacctggagacggtcaggtcgaggctggtgggtgcaacggcggcggcggcggcggcggcgtgctacgcgtcggcgtccgagttctaccgcgacatgatgctgctctgcgccaacgcgctcgtcttcttcccgcgcggctcgccggagcacgccgccgcgctccagctgcgcgcgctcgtctccaagcaggtctccaaggaccggcagcctcacgcctgggcgaaggcccccgcggcggcggcggaggaggaggagaagaagaagccggccaaggccgacgccgacatcgctgggccgctgctcgagaaggcgccgatcatcgtctgccggaagcggagctccatcgcgaaggccgcggcggcggctgccaagggggagaaggcggagaaggcagagacggacaagaaggagaaggacggcagcgaggagaagaagaaggctgcggcggcagcgacgacggcgacggcggcggccactgccaaggacaagaaggctcggggcatgaggacgaacaagagccggggacccgcgaggaatcagaagacggcgaagctctcggagaccggcgaggggaccaagaagtccgacaagaagggcggcggcggaggcggcagctcttcggcaggggcggcggcgggcggggttgccaagaagcgaaacgccgtggatttcctgaaccggatgaaccagaacggctcgccgtcgacggagagggtgtcgttgctggagacgctgaagctctccgcggcggcgacggagcagcagaagaagtcgtcgtcgtcgtcatccgggaagggcgacggccggaaggaggccggcggctcaggctccaagaagggcgccgccgcctcgacgccaccagggaggaggatcggtcggccaccgaagcgggcggccgcgccgccgacgccgccgccgtccaagagggccaaggacgacaagccgaccaggaagcgcgggaagaagtgaacggtcgtcggaatggggaggtggcgggaaaggctgcgggtgtaaatgtttgtaggggttggcggtagaaaaaaaccttttgtttttgtgttttggcgccaattgttgtagcgaggaggtgggagaatttttgttgctttttggcgggagatgaacgatggaacatctggtttcactctcacctcgatacttcatgaaagattaagaactttggtgaaagaatcgtgttcaccttaaggctggttttgtaggatatgtttttgactggattctgtaacctacactgaatcaggacacattggtgtcaatatggcatgaatcgaatcaagaacatatggtgtcaatgtggcatcatcatttaacc

SEQ ID NO: 25813 - DNA, 1152 bp, Oryza sativa
  ref <308>: DATABASE ACCESSION NUMBER: AK101255
  ref <309>: DATABASE ENTRY DATE: 2002-08-28
ctctctctcctcgtggaagtctcttgacttcagcatattctttggcaccttcaatagtgatgaaaagttgacctttgctttttttccttgttctttctgagaggtatctctaaattctaggcaatcaaataacaaagatggaattggaaagaacatctgactgcaactagaaagctcattcagcatctgcacaagcctcagtctcaatggtaagtaacgtgtgcctgggaataagtgagccactcctcttattatttgaacaactgaagaaagtaatggatgcatattgtagtccttgtagttacaacaaagaaacctaacccataggtttacacagttaatatattgccagttatctaccttcctgaggtcttccttttcttttgttttacaagcctgcctgagaatagaattcagttgtcctatagaggtagttgccctctcacatgatttctgaacatcaagagaatagagctccactagacagtccattaaaaaatcaatgtgctttatatttccttcattcacaagcttggaactagcaaggtatgtattataagatttatttaagcagagatccaaacattctggtaacagcgaagccacttcccgtatcataagaaatgaggacagagacaagttatgatctccactggcccacaaacgaattaagatcttgaggagcctccttgatgttgatggatatgcagaaaaaagaactgcggatgctctcagtcgagtcaagacaaatgcaagtatttggttgtcagtaagttgactaagcagatcaagagaattctgcaagtaagactttacgagtggttcaatagttttccatttctttgcacttctcagattcataattttccctttgtttacatcatccgaaatttctaagagagcatggaaaatgttgtctgcttcggaaaggacaaatgttattatctgatgaaacacttcagtactttgaattctctgcacagaagggctcttggaaacaccaaatcgacaagcatcccggtaagcatttaataggctgcgtagagaaggtgctttaggttcctttgcaactaactggcaccattcacttatagtcttccttgtcagtatcttatcatttgaaagattttcatcactggagtcagcatcatt

SEQ ID NO: 25814 - DNA, 2152 bp, Oryza sativa
  ref <308>: DATABASE ACCESSION NUMBER: AK101256
  ref <309>: DATABASE ENTRY DATE: 2002-08-28
gtaggacccattggattcgccatggcgtcgtcgccgcaccaagttgtagctccccaaccccaatcccaagcccaagcaggtggcggcggcggcggcggtggtggcgggacggccgagcagttctggtcgctgctggacaaggcagaccggcgcttcgcccgcgtgcgcgacctccccctcttcggccgccgggagcccgatgaatacggcaaggtcttccgcatctacacccagctgtggcgcatgcagcaggagcaccgtcaccacctcctcgacgccgggctccgccgatggcaggtcggtgagatcgccgcccgcatcgctcacctctactactcccagtaccagcgcacctcggacaccgccctcctctccgaggccttcgtcttctaccacgccgtcctcgaccgcggctacttcctcgccgacgccgccgaccatctctttgcccccaccaagcacctccgcttcctcgccaggttcctcctcgttgcgcttctactcgccaggcgcgccgacactgtccctcgcctcaccacccacatccgcacgctcctcgacgactccaagaagaccctccaagaagccgactacaaggagtggaagcacgtcgtccaagaaatcgcgaggtttctcagagctgactccccctttatcaacatgagaccactcaggtacagctacgcatttgatcctccccctgatactcttcctaccgtcccacctactgtcaagaagcgaggtctggtcttaaatgatgccatgctatgcagctactatcaaaacgagatcaaatttacagacctcaccatagatgttttcagaatgcttcaatgcctcgaatgggaaccatgcggttcttttgcactaaccaatggttacagtacccgcgatgaaagtggacaaaatcatcccaatctcttaaaagatctgagagatgctgcgctgcctccaaacccacttaaaacaattctctatcgtccctcagtgactcatttcctaacagtccttgccaccaaatgtgaggagctcccgtcaaatggtatgatgttaatatacctttcagctgcaggcgaggtgggatcttctggattttgccctgatacaaatgagatggttgtgagcagcttgaataagtttgatatatctaatactagtaccatcaatgtaaatgaagacaatggacctcgtctatggctaggctgccgtgaaggtgaaggttcaaactgtatatacccttgtgatctgattccatttacaagaagaccactctttttggtgatcgacagcaatgccagctattcattcaagtcaattcatgggtttgaaaaaggggagacaacggccatgttactttctccaagttgccgatcttcctcggcaggattcagtggggattctgtacggcagattggcagtcaatttactatgtttctcacagctccattgcaagctttctgccatctgattggcaataatggggtcgacattgatagggatacctataacaaagctgaagagttactatcattgtccttaaatgaatgggccactactttggttgcatcatcttcacttcatcctgtttgggttgaagttttaggcgatccactcttgaggcggcttcttctcaggtttatattctgcagagctgcgcattcgatcttcaaacctacgtaccataaggtggacttcctcccaacttgcacacctcctttgccagagtcggttgatgcagagagcatgctttcccaatgctgcctgttgcgagttgcatctttctttggcgccaccaaccaattctcattttctgaggtaaccacatggcctgaggttgatgttgaggagactgctgtcgtcaacccctcgatctagcggtaccaactgtgactcttgcgcatcacaatatttagtttctacctatcaaaagatgaagagatccattgtaataccttaatgtggtgtgtgtacagccaaatttgcaataccctatttatcgtcgtgctaaaatttccgttactggccccgcctcctgtagccctcgaggccaagcgtctttgagcaccgaatgatctgacattggacgaacaagattacagacatatggacaaaatatgtggagacattaattcataccataattcacattccc

SEQ ID NO: 25815 - DNA, 2673 bp, Oryza sativa
  ref <308>: DATABASE ACCESSION NUMBER: AK101257
  ref <309>: DATABASE ENTRY DATE: 2002-08-28
gagggtatggtggcgccgtgcgcggcctcgccgacgagggaaaaggtctccagtgacctcccgtgcggcatgaccggcgagcgcggcgacctcctcgcccgcctcgccggcgggcgcggtgtcctcttcgacggcgtgaccgcgcgagtagtagcgcggcagcatctcccggcgcggcgtgaacggcaagatccacaaatcagccgcgctgttctttggccttgctgttgttgttctgctctcctttacctctccgaccagctcctgcacggagcaggaggagagctccctcatcggcttcctagatggtctcttgcaaggtggcaatggcagcctctgcatgtcatgggtgaagagggcagactgctgtaaatgggaaggcatcacctgcagcagtgatggcacagtcacagatgtcttgctggctgctaagggcctccaagggcacatctcgccattgctcggcaatcttactgggctgttgcacctcaacctgtctcacaacttactcaatggcaacctaccgatggaattgttgttctccagaagcatcatcgtccttgacgttagcttcaaccgcctagatggttctctgccagagttgcagtcctctagtggtggttttcctctccaggtactgaatatctcaagcaatttatttacagggcagttctcatccaaactgtgggaggcgatgaagaatattgttgctcttaatgcaagcaacaacagctttacaggacagataccatcttctatctgcatcaactccccttcacttgctatccttgacctttcttacaaccaattcagtggcagtattcctccggagcttggaaattgctccaagctgagagagttcaaggctggctacaacaattttaatggagctctccctgaagaactcttcagtgctacctcgttggagcacttgtctcttcctagcaatgatttacagggagttcttgatggttctgacatattaaaactcgtcaagctgactgtccttgatctcggatcgactgggctcagtgggaacatcccggattctattggccaactaagcacattggaggagctccggctggacaacaacaacatgtctggtgagctgccatcggccgtaggtaactgcacaaatctgaggtacctcagcctcagaaacaacaaatttgtgggagatcttagcaaagtcaattttacccggttgaatttgagaatcgcagatttctcaattaataacttcactggtacagttccagaaagcatatactcatgcagcaatctaattgcgttgcggctggctttcaacaagtttcatggccagctctcaccaagaatgggcaatctgaagtccatgtccttcttttcaatagccgataaccatctcacaaatatcacaaatgcacttcagatactcaagagctgcaaaaaccttaccgccgttcttattggaaccaacttcaagggtgaaaccatatcaaaaagtgaaacaattgatggttttgagaatcttcgggtactgactatagattcctgtggattggttggacaaattcccacttggatatcaaagctcaaaaaactggaggtgttggatttatcaaacaatatgctctctggaaaaataccattttggattagtgatctgcctgttcttttctatttagatataacaaacaacagtcttacaggggatatcccaactgcgttgatgaacacgccgatgctacaattaggaaagaatgctgcccagttggacccaaatttccttgaattgcctgtttattggacacgatcacgtcaataccgcttgctcaacgcttttcctaatgcgttgaatctaggtaacaatggtttcacaggagtgattcccccagagattggtcggttgaaaatgctcgacggcttcaatatcagctttaacaggttatctggagaaataccacagcagatatgcaatctcacaaacctgcaattgctagatttatcaagcaatcagctcacaggtgaactaccgtctgcactgactgatatgcacttcctttctaaattcaatgtttctaacaatgaactagaagggccagttccaactggaggacagtttgatacatttcttaattctagctatagtgggaattcgaagctatgtggtgctgtactcagtaacctttgcagtcccactacaagaaaagaaaacttcacctcacagcggcgcaacttacggtgtgcattagtcactggaatcaccttgggagcactcgtcgctcttgctttgcttgcatgcttcttgattgggcggttggtatatgatgatcacaccgaaagcctaactcaccttcaaatgcggtaccgaagatagatgcttaacagactcagtttttttttaaattttttttatttgattctgatgccagcatttatggtttaatcacttttaaacttctttgtatggctgctcatattgttttttttttgtctctcggatagcctgaaatagcatgctactaaatggttgtgtgaatttactgaatcaactgtatgaaccaagttgtaaccaatttcaggaaccagatgaggagcttttgctaggctttgcatttgggccaactctgaacaatgaaggaatgggtgaaatgagtaatgtacagtgatgactaatttaggtgatgg

SEQ ID NO: 25816 - DNA, 2557 bp, Oryza sativa
  ref <308>: DATABASE ACCESSION NUMBER: AK101258
  ref <309>: DATABASE ENTRY DATE: 2002-08-28
gttcgatcgcggcttgtctcttccccttccctctgcctggcgtggagtactactgcgctactagagagtttgctggtggaggaggaggacgaggaggaggaggctgggtggtggcggccgccgcgatggacataacggaggtgacggtggtgcaccacgcggcgctggtgctgctcgcgctctgggccgccgtgtcggccgggtgggcgcacccggcgatcttcctcgccgcgctcctctatctgttcgcggtgaatgaacgatacacaatgaggctgcgaaagcgaatacaacatgaggaaaggaaatgtgcaaaccaaagaaggcttctctctgatgcagagactgtcaggtggttgaattatgctgttgagaagatctggccggtttgcatggaacgggttgcatctgagcagttccttttgcccatattcccatggttcctggaaaagttcaaaccatggacagcgaggaaagcagtgatccaagacctttacttgggcaggaacccaccaatgtttacagatattagggttgtcaggcaatcaactgatgatgaccatctggttttagagataggaatgaacttcctatctgcagatgatatgaatgcaacaatggctgtgcaacttaggaagagattaggatttggcatcacagcaaacatgcatataactgggatgcatgttgaagggaaggtcctagttggggtgcgatttctccgacagtggccatatattggtcgcgtaagagtgtgctttgttgagcctccatacttccagatgacagtcaaaccattatttggtcatgggcttgatgtaactgaacttccaggaatttctggatggcttgacaggatgttggatgtcgcctttggacagacccttgttgagcctaatatgctagttattgacttggaaaagtttgcatcggaatcaacagatagctggtttagtgttgatgagaagccacctattgcacatgccaaggtagagatcttggaaggtgctgatatgaaaccctctgatccaaatggattagctgatccatacgtgaaaggccatcttggaccctatcgtttccagacaaagatccacaagaaaacactcaatccaaaatggatggaggagttcaaaataccagtaacctcatgggcagctctcaatcttctctctcttcaagttcgagataaggatcccatctttgacgacacactcggtgactgttccataagcatcaacaaattgagaggtagacaaaggcacgacatatggattgctctgaagaatataaagacagggcggattcatatagcagtaacagtacttgaagatgaaaatgaaaaggttccaaacgatgacgatgagcagtgtggaacacccaaggggggtaaagcaagcacaccaaggtctagcttttcgtccaggaccaacaatgaaagtgaatcatcagaggagtttcgaaagatatctgctgaatatgagccagtagacattgaaggactggaaaaggttgatgtttgggtccatcggccaggcagtgatgtcgcagtcacttgggagcctcggaaaggacgtgcgaggtgtcaggattccagaatcctacgagagaatgatgtctactgtgacagccctaagtcgtgccaatcagaatctcagagaagtgactccagtactgaagaaccagccaatggcaaatcacgccatcatctccacaaggtcaaaaagggtttggggaaactagctggtgcgatgttcaagagcccaaagaaagagagtgatgatgaagcctcgccatgtgtgacgcctcacccaaatataaaaccacttggagaaaaaagggtgtcagtaagatacgtcgtcgatgaagatccttctgaaaacttgccagatgaccagcattccagtcctgagaggggcgagtcggaaagtccgaccaagaggcatttgaggaagaaggctgtgcacatggtgaaacatgcggggaacaaaacagctcataatctgaagaacatgttcagcaggaaaggcagtgacaagagcaaagaaggccaagatgaccagaaagacgatcctgatactatagtagtagaaccttcaaaagttaagaaagacaatcctgatgcaagtgaggtagacatagacccttcacaagttgagaacgacatccccgattcaacggcaattgaccctttgaaggttgattctaatgtggccaacaacattgtggttgatgcactagagtatgcatctgaatctgatgcgaaggacaaaccacagtgaaatgtgttctgctatttttggcggtcctcgtgctgttgggactgttcatgtaggcaggatactaggtagcaaaatagtctgatagcctcctgacagcaagcgaaggttgacagtatagtccgtttggttggttgagtcctccatcttacctgacgaccgatgtttttcttgtattatagatgctcaaggaacaatacctctgtacatgtcgtatgcagactgtctaagctgtttgcttcttggacatggaaagcaggtggccggttggctttggc

SEQ ID NO: 25817 - DNA, 2576 bp, Oryza sativa
  ref <308>: DATABASE ACCESSION NUMBER: AK101259
  ref <309>: DATABASE ENTRY DATE: 2002-08-28
gctgtgagagtatgcaggttgcacttgccagctaccttgtgccaagtgaggcccgagggttggatatatggaggaagctgcagaggctgaagaatgcctgctatgatgcaggttttccaagggctgatggtcatccttgtccaactttatttgcgaattggtttccggtgtacttttcaactgtgccagatgattcattatcagatgagttagaggttgcattctggaggggagggcaagtcagtgaggagggactggaatggttattgttgaagggattcaaaactattgttgatctacgggaggaagatgttaaagatgatttgtacctttcagcaattcatgaagctgtctcattgggaaagatagaggtggtgaatttgcctgttgagattgggactgcgccctctgctgaacaggttcagcgattcgcggaaattgtgtctgatagtgcgaagaaacccatttatcttcatagccaggaagggattagtaggacatctgcgatggtttcgagatggaagcagtacgtcactcgtgctgagagactggctactcagaaccgttcattaaatgggaatggtaagcatgtgaggaatgatcaaacagaacagctcacaaacagcccaggtttctcctcagaaggtagcgaaaacggtacacctctggaatccgatagaaccatggagggggaaacatgtgacatagacattgaaacagcacgtcataatctggaaatcactaattcccttcccagtgaacaaagtactgaacaaggtgaactgcatggcaccaggacagaacttcagtcaaactttagactagagagtaatcctcttaaggcacaatttccttcttgtgatgttttctccaaaaaggggatgactgacttttttagaagcaaaaaggtatatccaaaatctgttttaaaccctcggagacggtcgaatagcttgttggtctcaaggagaaaacaaagtctcagtgctgaacaaaatggagccattgactatgaagcagccgaatttaaagttctaaaaagttcgaatggagcatcgttcgataatgattatattctatcagttgcttcaggtattactaatggaaaaccatccaacaatggagcctccacatctgttgaggacagggaaatggaaacctcagttgtaacagttgatcctaggacatctgataccagcaattctaatggcaatgctccacttggatcacaaaaatctgctgaaaggaacggttctctttatgtggagagagaaaaatcagatcatgttgatggaaatatgtgtgcatctgcaactggtgttgttagacttcagtcaagaagaaaagcagagatgtttctagtacgcactgatggattttcctgtacaagagaaaaagtaactgaatcatctctggcttttacgcatcctagcacccagcagcagatgcttatggaaatctcctccaaagactgtcctactattgaagaaattaggtgatgagctcatggaagaagctaaagaggttgcttcatttctgcatcatcaagaaaagatgaatgttctagtggagcctgatgttcatgatatatttgctaggattcctggttatggttttgtgcagaccttctatactcaggataccagcgaccttcatgagagagttgatttcgttgcttgcctgggtggagatggcgtcattctgcatgcgtcaaatttatttagaacttctgtaccacctgttgtctctttcaatcttggatctcttggatttctgacttcacacaatttcgaaggtttcagacaagacttgagggctgtcatccatgggaacaatacacttggagtttatataacccttagaatgcgtctacgatgtgagatctttcgcaatggaaaagcaatgcctggaaaagtatttgatgtgctaaatgaagttgttgttgatcggggttctaatccttacctgtccaaaattgaatgctatgagcataaccatttaatcacaaaggttcaaggtgatggggtgatagtagcaacaccgactggcagtacagcatactctactgcagcaggaggctcaatggtccatccaaatgtcccgtgtatgctgtttactccaatctgcccgcactcgctatcatttagacctgtcatccttcctgattctgctcgtcttgaattgaagattccagatgatgcaagaagtaacgcctgggtatcatttgatggcaaaaggaggcagcaattatcaaggggagactctgttcaaatatccatgagtcagcacccgctcccaacagttaataaatctgaccaaactggtgactggttccgcagcttgatcaggtgcctgaactggaacgagcgactggaccagaaggcattataggcattagaggctagttttcccttgtacatacatacatagccctacacatatagatacactttttaacaggtgcaatggctaatcaatatcgatagtatatagttccaatccgtctcatgtccaacccgaccaccaaccaactacgtgttccatggatttaattgtttatacattgctcttgtgcc

SEQ ID NO: 25818 - DNA, 1108 bp, Oryza sativa
  ref <308>: DATABASE ACCESSION NUMBER: AK101260
  ref <309>: DATABASE ENTRY DATE: 2002-08-28
ggtcaaacttggcattccccagcttttccccccattccccctccctctctcgccatccatttgcacccccatcatcacttgcgcaaaatttatactcccaacgcgagatcgcgagatcgggagagagagacggtgcatggtttgtggcgccagtagccgagataaatatggacgtcctggttcacacggaagatgacgaggaggagcagcagcagcagcagcagctggaggaggagaagcgctacggcggcggaagcggcaggggatcgaggttcagcagctgctgctcatggactgcgtcggcagcgggaaggagggcggggcgtcgtcggaggagacggtgccgctgccggagtacgagcggctgtcgcagtcggcgcggctccccgacgacgcggacccgctgatgaagagcgacgccccggcgccgcccgcggagaagctgccgcagccgcagacgccgacgccgacggggacgccgaagctgcaggcggcggagcggaaggcgcagaagccggccaaggagcccccgtccccgccgcggtcgcagcagccgaagccggcggcgtggaggctcatcgagtacgtgcggtccaggaacaagtccggcggcggaggaggcggcggcggcgtggccgccgggtgcagctcctccgacggcgactccaagagctccgacggcgagaaggaggccgaggtcgacggcgaggacggcggcggcagctaggacaagaaggacaagaagaagaagcgctcgtcgtggctccccgatcccgaccgccggtggccggtgcagggcttctactagctcgccgttgcacgccatggctctcaccgtcccgtcggctcgtcgtcgccgcagctcgtcgcacatgtgtacaattcggtgctagaattcatggcgtgtcactcgtgtcttcctcttcttcgttccaatttttcttccatttttttctttctttctgttttttctcctcctcctttgtgtaatgtcgatgtgaaggaagacgacgagataaaatctctcaaatttggcttgcttttggccacttgtattttgggttgggctaagtatcaaccttcccaacgtaatgtactgtaataatgt

SEQ ID NO: 25819 - DNA, 1734 bp, Oryza sativa
  ref <308>: DATABASE ACCESSION NUMBER: AK101261
  ref <309>: DATABASE ENTRY DATE: 2002-08-28
cttttgtatcacctatttcaagtgggctgcctgctccaatagctgctccagctaaaggcccctttgttcctcctgagaacctaataaggttgaagtctgagactggctggaaaggttcagcagccacaagcgcatttcgcccagcggagccaaggaaaatttttgagatgactctcagtgcatctggcattctggtttctgatgctgcagggaaaaaccgcccagcacttgacattgacttaaatgttgcagatgagcaatttcttgaggaagacgtctctcagagttctgttcagacaactggttctgaatctggcaacactagaagaagcaatggtcctgtacgtagtgttggctttgagcttgacttgaatagggccgatgaagttgcagagaatgggcaaattgtgtctaacactaaccacagggttgaagtcccattattatcaagaccattacctggagttttctctagttccgatgcaaatagctcaagggattttgatcttaataatggaccaactcttgatgaagctggtacggaacatgcaccaaggagtctgtcatctaaaaataccagtagcataccattcctacctcaagtcgctagcatgagaatgaacagtgctgaaatgagtaacatatcaccatggtttgcttctgccaatgcttgtgctcctgtagctataaagtcgtttttaccttctagaggagaacagcctcacccagtcgagacagcagctggaagtggaacccagaggatcatcacatcgatggcagatggtgtccaacatggaagtgatcccagccggactccagttatttcaacttcaccgactatgatgtttcaccctcctgcttatcagtatgcaggattcccttttactcctagtgtccaccttcaagcaccggggttttcaattgggtctacatcatatgcgaattctgcacctggaggaattccttatttccctacaattgctccgacgcttgttggcccagcaggtgcattacctgctcagcatactcgacaatatgcaataaacctccctgaaggaagcagcactgttggacatgacaataatcggaaatggggaagacagggtcttgatcttaattctggccctggaagtgtggatgtagaagtgaaggacgatagagtaactttaccagttagacaaaattttattgcgccaccacatgcctttgtggacgagcatacgagaatgtatcaaatgcctccaggtgttggaataaagaggaaggaaccagagggcagttgggatgccgaacgatcttcatacaaacaattgtcatggcaatgagcttttgctggtatcatttctcagcgacttcggcatccaatgagcttaggcagctgcatgtggtacttgggttcgtgtactgcacccttgctggaatatacaattcatacatggatactttccttgtgatgatgtgaatgtgagaggaacgatgctttgatgtaattgctgtaaatgttcatatttcatactttcctggaaacaattttccttggcattggcagttgctttgctagattttcttagctgtcagggactcaggcatgcttctaatttgcttgggagggtatgactggagatggaaacggtataggtcctgggcctcaagaaacatctgaagccgctgtaattaggttcagtttgtttgtttttagtttcttatgacagaccaattttctctttttggagc

SEQ ID NO: 25820 - DNA, 2675 bp, Oryza sativa
  ref <308>: DATABASE ACCESSION NUMBER: AK101262
  ref <309>: DATABASE ENTRY DATE: 2002-08-28
gactccccctttctctcctcctatgtgccaccacctcctcacacattcccacgcacacatttccccatgcacatctccctcaatctctctctctctctgcatagatgctgctactcctacttgctagccctactactccctaccacacggccacacacacagcaagcagagcagacggcttcgctttgcatggccactggagttgttgctgttcttcttccctttgagcagcagcagcagtgagccgtcctgtggtgtgttggttgtcacagtactgtgtggtagtggtggaagtggaggagcaaaccttggacatgaattgagaggcccctatcttttcctgtccatctctcagtagcagtgagctgagtgagtgagtgagtgacagtgagtgatggattgatgtgtgatgcctcactagctgagcccccccctcctcctcctccttcctttgtggcaaatctcatcagcaacagggacctcttggtgtgactactttgtttacacggtggttctctccttttcttcttctcagcgtcgccgtcgtcttctttctccttcattcattcagacttcatcagagtagtagtagtaggaaggagatagtgtagacaagaagtgtgtgtgtgtgtgtgagagagaggtagagagatggagaggaggaggaaggcaatgtggctgtatccaaaggtggtgggcttcaaccctccggagagatgggggcactccgcttgcttcttcgagggcgtcgtctacgtctttggggggtgctgcggcgggctgcatttcaacgacgtgctgacgctgaacctggagacgatggcgtggagctcgctggcgacgacaggggcgcggccggggacgcgcgacagccacggcgcggcgctggtcggccaccggatgatggtgttcggcggcaccaacgggtccaagaaggtgaacgacctccacgtgctcgacctccggaccaaggagtggaccaagccgccgtgcaagggcacgccgccgtcgccgcgtgagagccacacggtgactgcgtgcggcggctgcgaccggctggtggtgttcggcggcagcggcgagggggaggggaactacctcaacgacgtgcacgtcctggacgtggccaccatgacgtggtcgtcgccggaggtgaagggcgacgtcgtgcccgcgccgagggacagccacggcgccgtcgctgtgggcagccggctggtcgtctacggcggcgactgcggcgaccggtaccacggcgaggtggacgtgctcgacatggacgccatggcgtggtcaaggtttgcagtaaaaggggcctcacctggtgttcgagctggccacgctgctgtaggtgttggatctaaggtctatgttattggaggagttggtgataagcaatactacagtgatgcctggattcttgatgttgcaaatcggtcgtggacacagcttgagatatgtgggcagcaaccgcaaggacggttttctcatagcgcggttgtcctgaataccgatatcgcaatttacggagggtgtggtgaagatgaacggcccctgaatgagctgctcattcttcagttgggctctgagcatccaaatggccgttacaacatctcaatgtgcaaagttctaagcaaccactggagccaggagaggcgaaaattcttgagaacagaaaatcaaagagatccaaacatgagtaatggagaacttggtccaagatctcgggaagcagaaatcgaacaaagaaacccgttcttgcgtggtctcgagaatggccatgtgaaaaggaggagaactggcgatgttcgactgaaagagaccgagtcggagcaggaggagcactcactatcactttctcagcactcttcaccatcccaatctgatcaggagcagaatggagctcagaagctttcggcatctcctaacggatcaatctcagccctgcaaccgtttgttcacctcaacaccaatggcactctgagggctgctggaggtgtgtcaccgaggaccctgaagacggatcagttcctccgcaccattgctccgcagcagcggcatgaagtgcagttcctagcagctgaacccaagctgcaccaccgcccgcctactccaccccttatcggcgcagaggttcatgggactatcgatggagctttcgattcagggtacctcatgaccgctgtcgtgaatggacagctcttcagaggcgtccttttcgctcctggtccgggagtaacggctccgagaccgacgttgcaccatccgattctgatgagctcggccattcccccgcagcagcagcagcagcgcccggtgctcgcccacgccatcccggttcatgcccggcccgtgccacaggcgacgggcttcgtgctgccggactgcagcaaccatgcccggcaagcattcccggcgtctgcagcggcggcagcggcgaagatcatcaagtctgaaccggagaggggcggcagtgacctgcacgatgttgtgctcacgctgggagggcctggagctggcaagtgacacctcttttcttgttttaacacttgtgatcttggcctctgatgttgatctgttaatctgctcttgtaaaatagtcatcctggttgacaaaaataagaccagtaaccttgtgtaattgttcctgataatgcccaattttcttcttcccg

SEQ ID NO: 25821 - DNA, 1287 bp, Oryza sativa
  ref <308>: DATABASE ACCESSION NUMBER: AK101263
  ref <309>: DATABASE ENTRY DATE: 2002-08-28
ggcgcgctcgcacagacacacacacagcacagcggagaaagagagagagagagagagaaaggaaaaatcggcaccaccgcgaaagggggaaaaggggggaaggaagcgaggcgaggctagggtttcgattcgatcccgccgctgccatggacgccggtgatgcgtggggccgctcctcctcctcatcctcctccgccgccgccgccgccaggcgcctgcaggcgcgctacgatctgtacatggggttcgacgacgcggacgcggcgggcgtggaggaggtggaggcgcgcggcggcggggaggcgtacaactgccccttctgcggcgaggacttcgacttcgtcgccttctgctgccacgtcgacgacgagcacgccgtcgaggccaagagcggggtatgtcccatctgtgctacaagggttggagtggacttgataggtcacttgacaatgcagcatggaagttactttaagatgcaacgcaggcgaagagtccgaaaaatatcttcagggtcccattctttgttgtctttgttgagaaaggacttaagagatggcagtctgcagtcctttcttggtggatcatcctatgtatctaatcctcctgctgctgcaccagatccatttttgtcatctttaatttgtagtttgcctgtggctgaaccatccaaagatttacattccgactcatctgacaataactttttgctaaataaattcccagatgacaagactgcagagagagctgaaccatctctgtcggagaaggatcagaaggagagggctcaaaggagtaaatttgtccgtgggcttgtgctctcgacgatatttgaggatgataacttgtaagggaggttatcaaccttaatatagcgacggcatggcatggtcaaggaacagaaaatacaggagaacaatctatgcaatgcagcaaccttgttcatgccgtcgctaatgctgcttccagccttcaaggccaactgggggccacccatcatgtttatgtatgcacgtacgtataatgtatgtctgccttcctgcatttgccgagagggcaacaggaaccagctgagtagaggagaaaggtgtttgtgtcccaaccttccacgtcgaataaatgaggacattgtgttccttgagtggctttgtgcatatatgaagagaggagagctactcgcaatgtattaggttctctctattttatttgatcaatgtaatgtaataataggaagtgttgtacaactgtattgtaatcccaatggtatgtgatactgctttgttttgtatt

SEQ ID NO: 25822 - DNA, 948 bp, Oryza sativa
  ref <308>: DATABASE ACCESSION NUMBER: AK101264
  ref <309>: DATABASE ENTRY DATE: 2002-08-28
ggccgctgctgaagaaaaacgcacatccttccttcctagcaccaactcgccacccaattaggccattaccttccaaaattctcccatccaatggcgctacgcctctccgtctcctcctcgcacgggccggcttcctcgccggccatctccacatgccgccccgccgcctgcgggcgcttccccgccttgctcggcggcggtgtggcttctcagaggaggagcctgacggtggtgtctggccctgagacaagggcggtgatccccgtgaggtcgagcggctcggacaccgccactgttggggccgaggcggaggcggtggccgtgaccgggcaggtgacggaggtgaacaaggataccttctggccaattgtcaagtcggcagggcccaaggtcgtcgtcctcgacatgtacacccaatggtgcggcccttgcaaggtgatggcaccgaaattccaggagatgtccgagaaggaccaggacgttgtgttcctcaaactcgactgcaatcaagacaacaagtctcttgcaaaggagctgggcataaaggttgtgccaacattcaagattctcaaggacgggaaggtcgtcaaggaggtcacaggtgccaaactagatgaattaatccaagcgatcgagacggtgaagtcaagctgaggaatgccctgaaaatttgcatcagttagcttgttgtcactagtgtacgttatgggtgaaccaccagttattgaagtgggtattcgacatggagacaaacagttaatctagttcttctgcctatgatgatttatcaagcatccagaacaatatacggccatttatatggaatgcaccatgtaaataactatttccaacgtcatgatgatctgttttctaatcttactgatttgcaagtgaacattgtattcatggttagcaaaatttcaaaatatatcaacaaatttccagctg

SEQ ID NO: 25823 - DNA, 1089 bp, Oryza sativa
  ref <308>: DATABASE ACCESSION NUMBER: AK101265
  ref <309>: DATABASE ENTRY DATE: 2002-08-28
ggggaacttatattatgggacccgaaaacaggcaagcaattggggactccacttacggggcataggaagtggattactgctgtatcttgggagccagttcatttgcaatctccttgccgccgttttgtaagtacaagtaaggatggtgatgcacgtatttgggatatgaccacaaggaagtgtgtcattgcccttacaggtcacactaattcagtgacttgtgtgaagtggggtggagatggtttgatttacactggttctgaagattgttcaatcaaagtgtgggaaacttctcagggaaaattggtcaaaacactgcagggtcatggtcactgggtcaattcacttgctttgagcaccgagtatgttttgcgcacaggggcatatgaccatactggcaagacatattcaacagcagaggaaatgaaggaggcagctcttgcgagatacaagaagatgaggggcaatgcacctgagagactagtttctggttctgatgattttacgatgtttctctgggaaccaacaattagtaaacagcccaaagcccgcatgactggtcatcaaaagctcgtaaaccatgtctacttctctcctgacgggcagtggctggcaagtgcctcctttgacaaatctgtcaagttatggaatggtattacaggcaaatttgttgcagctttcagagggcatgttgcagatgtctaccagatcagctggtctgctgacagtaggcttctattgagtggaagcaaggattccaccctaaaggtctgggatattcgaacacgcaagttgaaacaggatttgccagggcacgcagatgaggtgtacgctgtggattggagccctgacggcgagaaggttgcatctggaggcaaggacagggtcctcaagctatggatgaactagttcccttagagttaaggtacttagctagtagcttcttgtcatggtggctctctcttgttcttggtgagagattttgtagggttgggttggcatttcttgtttttattttgcaaccaaaggcttgagggtttatagctggttttttttagataatggaatataatattccggtttttgttc

SEQ ID NO: 25824 - DNA, 1922 bp, Oryza sativa
  ref <308>: DATABASE ACCESSION NUMBER: AK101266
  ref <309>: DATABASE ENTRY DATE: 2002-08-28
ggagtggccgtccgccgctccgcgcctccgctctgctacctgcgcctgcgcgtcgtgctccctgcgtccatccctcgccacgccttgccgcaccaacagcgctccctgcacctccgcctccctccccaatccgtcccatctcctcgcccgccgccctcgcctgccatcctgccagcagaggtggcgccgccgttctcctgctcccgctgcattcgctcaccggtgagcatcctaatccatcccatccggcctcggcctcgtcctcgaatttcgtctcctcgcccggcgtcctcctgcatccaccgcatcatcgctcgccgttggggatcccactgacttgctgattgcaactgtcagtgtggtgattggactgcatcagttgtgggaattgaactggtcaagtctcagactaatacaatgcaaggcatttttgcatgtggttcaatttcctcggcccatggatcatgctttagaccagcttgtcttgcagtggatgatctgaggctgttttacaataaattcagtaacctgtggagcgtactcgtggcgttggtgtgtgaaaaaactacatatgaggaccaatagaaggcaaatgggtactacggtgagaactaatgctagatggctatttggaggagatggccgtagcagtagtaatgcaaggatggaacgcagtgagtctgctaacgaagacatcttaatcttctacttccaattggacctacaaacccggatacagtatgcattgaatatagagcaatttgatgtggcaaaacaattgagggaaaaactcacagagattgaaacagtgataattaggcaacgtgaagctaaaagaggctcatcaaagactgaagctcaggacaaagctataaaccttttacgcgtgcgtgcggatttgcaaaaggccgttgacagtgaaaactatgctttggcagctgcactgcgtgatgaaattgctaaacttgagacagagtctctggcagtctccgctaaggcccttgcatatcaaaatgtgaaatatgcatttcgactagggcagaaagtacgccataaggtacacggatatagagctgtgatttgtggcatggatcatgtgtgctgtgaatccaagtcatggatggagacagcaaatgtggaaaacttgtccaaaggaccgaatcaacctttttatcaagtccttgttgatgtatatgctgatcaagaactccttgttgcatatgttgcagaagaaaatcttgcagaggctgaaataccagagaaaggaagatttgatcacccctatattgaatttctgttttttggcgaggacactgctggggacttcattcctatcaagcagcttcgtgagaagtatgatcagccacgttatgaagcttctggggatgaagatgacgatgatggcagcacggatagctgaaaggtaggcagcaagagttgttttgatgccatttccgatgccttaccaccgactgagttccgaaatggtggaggagcttgacagcttgttactatctgatgtaactacagcgggctaatgtcagtgaagactggtgactgggctaacctggaacctgaacaatccacagcaatctgcaatgaggcaatctgcatttgatatattgatatctgaccttgcagattcacgattgaggataacacccatatagtggccaatccatgaagccctttacatatacggttctaaagaagatccttgtggatttgcagtctgtacttccccaagttcttctgtaactgtgttccctctgggaattttgtagataagctgcattcatcaaacctgcaactctgcagctgcagagaaagcaaagggttgacgtacatctattggaaagttggaatatacttacgtggaaaactgcaaaccacagaatttttgacgctcggggaaaataacc

SEQ ID NO: 25825 - DNA, 1970 bp, Oryza sativa
  ref <308>: DATABASE ACCESSION NUMBER: AK101267
  ref <309>: DATABASE ENTRY DATE: 2002-08-28
gaggggatctcattcctctccctacacccgggcacccggcggccggcggtggagctccaccccgacgagcccaccccgcggcattgtctgctgctaaagccgagctctacgggtgagccggtgaggcacggccacacgagcacccacccccatggacggagaccacgttgggaggaaggccaccaccatcagcgctcggggcgccgaggagcagccgttcggaggagcaacgagttgttcacaggcgccgcctatctgatctgatgcagcttcgggtgctcccgaacgcccgcgcggccctcatccgcgcggtggcggatgcccccggccgccgcgaggagcaggccctccactgcctcgcctgcaagctgggcctcgccggcgatgcggtgctggccaccgcactgctcacccgctacgccaggcgcggcctcctggatcccgcccggaggctgttcgacgaaatgcctcgcagggatgcggtcgcgttcaacgccatgctggccgcgctcgtcgcgtcccggaggatggccgacgcacgggagctgttcgagcggatgccggacaggacccccgcctcgtggaacaccatggttacgtgttactgcaaggccggcgacctcggctccgccagggaggtgttcgaggcgagcctcggggcgacggcgagcaatgtcgtgtcgtggaacacgatgatcgatgggtactgcaaggccgggagaatggacgctgcgcaggagcttttcgattgtatgggctgctctttctcctcttccccgtcgccggacgttgtcacatggaacacgatgatggccgggtatttgcgccgaggtgaccccgctaccgccatcgccatgttccgccggttgatgcgacagacagtgcagcaacagacgctcatgatgcccaccacggtcaccatagccaccgtggtgaccgcgtgcacgcaggcaggggactttgcctttggccggcgagtccatcactacatccgtcagctcgggacaaggatcgacgccgtgctaagcaacgccctcatcgacatgtacttcaagtgcgggagcgtggaccgcgcgctcgacgtcttcgccaccatgcccgacggccccaacctcttctgctggaacacggtgatcgcggggctaggcatgaacggccgcggcgaggacgccgtcagggcgttccacgacatggtcgggaggagtcgaacgtgccgcgggatcatccggcccgacggggtgacgttcgtggcgctcctgtcggcgtgcagccactccggcctggtagcggagggccggaggttcttcgccgagatggtgccggtccatggcgtcgagccccgggaggagcactacggctgcatggtcgacctcctctgccgcgccggactcctcggcgacgccgtgcgcgtcgtgcgggcgatgcccgtcaggccgaacgccaagattctcgggtgtctcctgcttcacgcccgccgcttgtcgtcggcgtcggaggaggacggcgtcagggtgggcgagtgggtggcggaccggatatcggagctggacctggacgacggcgctgcctatggcctgtccaacatgtacgcctcgttgcagaggtgggatcatgtggagatgcaccggatcaaggtgaacgcggcggtgcgccataagcagcctggtcagagcagctgcatgatctagcaggctgcaagaactgaagattattgctagcctgggattgatgacaattgtcgtcaattgctgtcaatgatgtacctggtagctatgtacaggtattcgattttcctctaagggcccctttgaattggaggatttgcataggaattttggaggatttaatttcctaaggattttttcctatcaaaccctttgattcataggaaagtatatgaaatttttcttaggattgcattcctatagctcaatttcataggaaaataagcaagagattcaacctcttgg

SEQ ID NO: 25826 - DNA, 2856 bp, Oryza sativa
  ref <308>: DATABASE ACCESSION NUMBER: AK101268
  ref <309>: DATABASE ENTRY DATE: 2002-08-28
ccccccccccaaatctcatctcatctcatccccctcccctccctctccgtgcgccgccaccaccaccgccaccgccgccgccgcaggagcaaccccgaggagacggaggagggaggaggcagccgacgccgccgcgatgttctactcgcacacgatccttgcgcggaagagcccactgggcacggtgtggatcgccgcccacctcgagcgcaagatcaagaagccgcagatcgacggcatcgacatcccctcctacgccgaatttatcatgttccctgaagttccaattgctctgaggttgtcagggcatcttcttctaggtctagttcgcatttattcatggaaggtaaactacctcttccatgactgtaaccggatgctaagcacaatcagaaccgccttcgcttctgtacaagtagatctgccccttcatgcggatcatgcgccttttgacaccatcacattgcctgatacattccgtcttgatgacataaacctagatgatgcaattcgtctgatagatacgccagataatcatcggaagagtctggaccagatcaccctggctgaaggagactatctgatgattgatcttgatgaggatgctagagtagagctatcagctcctggacaatcttcacacatgggacctgaaccaactgacgaagagagattgcctccatttcacatcgattttgggccaagtgacaatatggatgaggaaatttccgtagatccttcccaaggcaacaactcggaggcagtgaacaccagtaacataaatcaggcagataaagcaccagatttacctgaaataatgcgtgaagcaccatttgagggccctgaacttaacttgccagatattgatgaggtaaacaatgatcccatggatgtgactgaggaatcttcaccatttgtgtccaagaatatcacccctccggcactggaacgaactatatcccctggtcaaggtggattatctgggacatccattcccaatgcacgaggaagtacaagcaccacatatgacaatatagaagatgttataccaatggatattggaatgcctgattttaggattgaaccatctccacctcgagtacaagatgagatgaatgcacaaccagtacaaggtgagataaacgcacaaccagtacaagatgagatgaacgcacaaccagtacaagatgagatgaatgcacacccagcacaagataagaggagaattagatatgacaatgaaatagtgttctccaatgcttatatgaagagacaaattgatggcggtgaactacatcgtctggtcagcaagaggaggaaactgcctcaagcagcggtggatgtgtggaaattcaacaggattcgccaaaaggatggtttcttgcttgatcctttggtccatgggatgtgcgctaccctacgtcaaacctacgagagaaccttcccccatgtgattgaccctgaagctgagtcaggatctgtcgagcatactcctggggtagctaatgacagtattcaggatacacatgatcatcaactctccccgaagtctcctggaaacacagatgcacaacctgaacatcagttcaatcaacaagctccaagaaattcagatggacaacctgaacctgagcttaacccaaagtctcctgtaaatgcagaggcacaacctgaatctcagattaatccacaatctccaagaaatgcggatggacagcctgaacctgagctcaacccaaagtctccaggcgaagcaggcacgtcacactttgatgatatgcctgagatccctcgattctcgccacaaaatattccatctccaataagagacgacaattctcctttcaaaactcctggtgctggtggaactccgaaatcaagacttggagaaactcctgcctctgggacaccagcagatatgagttacatgtcacctggacaagactctgatcctcaagtttctccttttccatttaatgatgaacttgatggagatttgcccgagattcctagcctcatgagtactcctggagtaatatctaccgcaggtactggcaccacaggattgggaagcatgtctgctaggacaagggctgtggcacagtacttcaaagatcaaatggcttcggctacatcagatgaccaacctggtaaatttatcttgaacagaatcttggaagggagacacaggaaacaagctgcacgcatgttttttgaaacactggttctaaagagttatgattatattgatgttgaacaagaagcagcctatggtgatatagcagtttcagttaaaccctcactctcaggagccaaattttgaccaattcagttgcttagaaccacatataatctcatttgatccgcgggaaggagctttggtgggatttgcagaaatggcctgaacaatggattcttatatgcgacatggctggctaatctactgcaatttgctggactccaattactagaacaagtaggcactccatgccatttaggtttatgttgcagaatactgtagttgtaaagctgtagcattagtagttgtcgaaagccaatacatcttgtccagttaggacttcagatggtagtccttgcctatgctttcttggcagaaagcaaagtgaacaaggaatcagatgaagataagaatttttcttacttttgctgtttaattacatggtagtgatatgttaaatacaagtcgaaaaatgttggatgactagcataagacaattttataaatgtcagtgtacatagtctgatatcttcagtgtgccagagcgcagagtctgttcagaaaattttcatgcaatatgtgttctgcaatgcaccattatttgttgtatttgtctg

SEQ ID NO: 25827 - DNA, 2321 bp, Oryza sativa
  ref <308>: DATABASE ACCESSION NUMBER: AK101269
  ref <309>: DATABASE ENTRY DATE: 2002-08-28
ggtgttctcagcttcctccactagtctaccgccgctgcctcctcctcgtctcctctcctctcaccatctcaccatctcactacccacactgttccatgggggcctcaaattggaggcggcgccggcggcgaggaaggtatcgaagtcgaagccaccgtcgtcgacagccatgtctagcgggcaccacatgctgtggccggctcgccgcccaccgccgccgccgccaccgccactatcgccggcatcaagggaggcgaacccttgttctggtgggccggcccaccaagccagcccatcagcggaggcaactggtgggccagcctgacatcctgggcccaccgttcatgtgtcccgccttagttgtttcttctcctcgctcgaggctgcaagaaaatcaagaacccgatcgccacgtcgagatcaacctctctccaggccggcaatggacgggcgcgccggttgctgcgtccgcttcatcggctgctgcctcgccgccgacggtgacgccgccctgagccagagcgcggccgcgctgcacaggatggcgtcggcgttcttggacgctcacggcgagcccttggtactcctcgaccaccgggtgctctgctcccatggcgtcgccaccgtggggcacagccaggccttcgccgcggcgatgaggcagcgcagagaggagattccccctgccccattcaggattctgctgcaggaagaatatgtcgggtgggctgaagtggcggcatgcgccaatgggaacaagattgtggacaagaagtcctggagagcttcggtcaggaacatgctcgatgctgtgtacaggatgatatgtcaggtccttgcctctgctgtgagatctgtttgggctattggcacctatatgcttcctctatcagctgcagagtttttcagaaggagactacccgcatcagctgtgccagaaaaaattagctggcggggtgtcattagcactttcagatttcaaatcttccctgatacctgcgccatagtagcatgctcagtctgtatcgaggcacaacacaggctcgagtttgagcgcctacacgggcaaggcacattcatcctcgaattgcctgattccaccaggaagctgagaagattctgcctggagagaaaagcttggtttaagggtaaaggggctcatatcgatagcctcctgtctctgatccaggagactggtggagtgcccgcaataagtacaacgaacacaagaagcagcctccttctgccccttcacagctatgactacttcagcctccgggggtgctggacaaacctgacaccccagcaggctgcacagctgatcttcaccggtggtccctgcattggcagtctctgggttgatggatcctacaccagcaagcaccactacagcgatgacaacgatgacgatgaggaggacatgctagtgtaccgtggctgtgatcccaagaagaagatacaccgggataaggagacaggcttacatgccgtcgtgtgttacgcgtacctcttcattgggaaggagctgcacatccgtgtccaggacaatatgcctatctgcagtccccacaactggatccttttccaggcgtttgacatgttttacaccctacgagtcatgcccttagatgcttcaagactgtatgatcccttgtagaagatgacagtgccgccgaagatttcacagaagataggcaaagaccgagcatggctccatgccaaccttcgtcggctacatgaagcgatgatgatccagaaagggaaagagaaggtctgctgaagttaggagcttgctggtgagccggttttatctctcttgaaggctgtgttcgttcattctgcgccgctgctctcttcgtcagtattagctgactgattgattagttgtaatgctgaatggcgagatggtgtccccagcattttgtagaaagacctgatccatcctgtttacgccttcaagtaaacctggacgctaagccttttgtccagaatgcatgactgtgtgcagacacacaatggatcgattttctcctttttgtgtgtgtgtgtcgtttcagtcaaattttgggcgtcagggctgtttgagatttgttatgtggttttgaggcttgcctgttttgattgctactttgagttccacgaagtgatgaagtagtacatatttattttattgtgttctttttttgcctcttctgtcatttcaactttatctatggtgatcatctgaccaagtacttctctagttgtctggtcagttaatttttttattcctgaaatgtgcttacttaagatttatgatattttgtgaattgtgatggggt

SEQ ID NO: 25828 - DNA, 3109 bp, Oryza sativa
  ref <308>: DATABASE ACCESSION NUMBER: AK101270
  ref <309>: DATABASE ENTRY DATE: 2002-08-28
ggccataaaccctaaccgcagcgacgcactccacctcctcctccaccacgccgccggcggccgggcgccatggtgaaggcctacctccggtacgagccggcgatctccttcggcgtggtcgcctccccggagtccaacgtcgcgtacgacccctccggccgcctcctcctcgccgccgccctcgaccgcttcgccgcctgggacctcaagcgcggcctcccctccctctccttcgccaccgccgccccgtccccctccctcgccgtctcctgcctcgccaccttcccctccgccgcctccgcctccgcctcctcgattgcgagtgggcacgccgatgggagcatcaggctatgggacacggagaccggctcctgtgaggcgaccctccatggccaccgctccgcggcttccgccctcgtattcggcccctctggcgccatcatcgcctctggcagtaaggactgtgacattatcctttgggatgtagttggacaggccggcctttatcgactccgtggccaccgtgatcaggtcacgggtttggtgtttctggattcagggaagaaactagtgagctgctccaaggataagttaatccgggtttgggaccttgacacgcagcactgccttcagattgttggtggccaccgcagtgaaatatggtcaattgatgtggatcccagcgagaggtttttggtgtctgggtcggccgatcaagagctgcgggtgtttacggtccggaaatctgctgaggagggtgaggattggagcaagtgggatatgctgaagctatttggtgagattccaaggcaaagcaaggaaagggtagcgactgttaagttcaataagaacggtaatcttgtggcatgccaggtggctgggaagacggtggatatttatagggttcttgatgaaacagaggcagcacggaaggccaagaggaggatgcacagaaagaaggagaaggctttggccaaatccatggctgctgaagggaatggtactgttatagatcctttgtcggctcaagacttgcagaatcccactcctgttgtcaccgatatatttaagcttctccatgttttgcgggttaacaagaaaatttgctctgtcgcattttctccaaacaatccaccaaaaggttgccttgccaccttgtctctatctctgaataataacatgcttgagacatactcagtggataatgagaatgtgtcgaatatgtattccattgagatgcatggacaccgttctgatattaggagtcttgcacttaactcagaggacaacctcctgatgtcaacaagtcacaatgctgttaagatatggaatcctagtactggcgactgtctccggacaattgattctgattatggattgtgcagtgcatttgttcctggaaatcggtatgcccttgtaggcacaaagagtggtactttggagattatagatattaatagtggaagctctattgaggttatagaagctcatgctggttccatacgatcaattgtactcattccaaacgaggatggaactgctggtgcatggggttttgtcactggaagtgctgatcatgatgtcaagttctgggaataccaattgatgcagaaatctgataatgactctaagcagctgagcgtaacaaatgtcaaaactttgaaaatgaatgacgatgtccttgcagtaaccatcagtccaactgggaatcatattgctgttgctctcttggatggcgcagtcaaggtcttcactatggactcactgaagtttgcccttaccctttatggccacaaacttccagttctctgcatggatatatcatccgatggagttctaatagttactggttctgcagacaaaaatttgaaaatttggggtatggattttggtgactgccataagtctatatttgcccacacggacagtgtgatggatgttaagtttgtttctaaaacacattatatgttcagtgttgggaaagaccgcactgtaaagtactgggatgctgataaattcgagttgttgttaacactggaaggacaccatgctgaagtttggtgtcttgccatcagcagtcgtggtgattttattgtaacaggttctcatgaccgctctattcggcgttgggatcgtactgaagaacaactcttcattgaggaagagcaagagaaaaggttggaggaaactttcgaggctgatttagatagtgctatggaccacaagtatgggcaaaaagatggtgctcctgatgagggttctgtaggtgttcctggtaggaaaaccaaagagacagtaactgctgctgatgcaattattgatgcacttgacactgccgaggaagaagtaaaacgccttgatcagcaccaggaaggacaaaataatgggaatggaactacatttcaacccaatgttataatgcaagggcagtcaccatcggattatgttttgaatgtagtttcaaatgttcgtccaaatgacttggaacaggctctcctttcattgccattctcagatgcacttaagatcatgtcttacttaaaggagtggtctatggttcctttgaaggttgagcttgtttgtagggtttgcctagtgctgcttcaaacacaccacagccaattaactacgacaccatctgcaagatcgatacttacagaactgaaaggcattctttacagtagagtaaaggaatgcaaggatgctataggtttcaaccttgctgcaatggatcatataaaagaattgttggccatgagatcagatgctcccttccgagatgcaagagcgaagctgatggagatcaggcaggaacaatcaagacgatcggataggtcagatggggctgaaaaaaggaaaaagaaaaagcgaagaacatccggtgagagctgagctttgtgggcgaggcaaagtagttttttttttgtcgtagcatacaaacgatatatcggcgtgctcatattgtgtctacatgagcacgacagaattttggcatatcgagtgtaaaatcaaaacgcgcgttgcgccaaatcttttagatgtaatagcagaatgtgcatttgctcaatcctacgtactccctccgggttaataatatttatcgttttag

SEQ ID NO: 25829 - DNA, 2328 bp, Oryza sativa
  ref <308>: DATABASE ACCESSION NUMBER: AK101271
  ref <309>: DATABASE ENTRY DATE: 2002-08-28
gtgaaaagaaaaaaaaaaggaaaaagggaatagggaagcgagggcggagtacggcgcgcttcgccgttgccggaggcggcgggggtgagggcagcgagcgatgccggtggcgaggccggagccgcaggagccgcgggtgatcgcccatgtcgacatggattgcttctacgtccaagttgagcagcggaggaacccggagctcagggggcagccgaccgccgtggtgcagtacaacaactggaaaggcggcgggctgattgccgtcagctacgaggcccggaagttcggcgtgaagaggtccatgcgtggtgatgaggccaagatggtctgtccaagtatcaatttggttcaggttccggtggcccgtgacaaggccgatcttaatgtttaccgtagtgctggctctgaggttgtcacaatcctctcgaccaaggggaagtgtgagcgagcatccatcgacgaagtttatcttgaccttactgatgcagccaaggaaatgcttttagaatctccaccggagttattggagttgatttttgaggaggccacaaagtcaaatatcctgggccttccttctgatgtcagcaacagagaagatagcgtgagggcatggctttgtcgagccgatgctgattaccaggataagttactatcttgtggggctataattgttgcgcaattacgggtcaaggttttggaggaaacccaattcacatgttctgctggtattgctcacaataagatgttagcaaaacttgtcagtgggatgcacaaacctgctcagcagacagttgttccatcatcagcagttcaagattttctagtatcactgcccataaagaagatgaagcaacttggtggtaagcttgggagttccttgcaggatgaccttggggtcaatactgttggtgatcttctaagttttacagaggacaaattacaagagtactatggagtaaatacagggacgtggttatggaagattgcaagaggtattagtggagaagaagttgaggatcgtcttctaccaaagagccatgggtgtggaaagacatttcctggcccaaaagcattaaagaataatgcttctgttaagacatggctggatcgactttgtgaagaactgagcgaacggattcagtctgatttgaaccagaataagagaattgctcaaacactaactctctatgccagggcatgtaagaaaaacaagtctgattcaatcaagaaatttccttccaaatcttgtccgttgcgttatgggactgtcaaaattcaagaagatgcaatgaagctatttgaatctgggcttcatgatttcttgggttctcagaacacaaaatggagcataacatctctttctgtttcagcaagcaaaatattcgacataccaattggaacaagctctatcttgagatacattaaaggaccaaattccactgtttcaccagctaacctcgattgttcttctttacctgaggatccatctcttggtaacaagttatatatagcacctaatcatgaagaacactgtgaaccatcattatctgagaaagaagactatggaaacaatagtaatttagccaaacagtgtcaaataaaggaagaaaaaaaggtgtcaaagaagttaactgaagttaagggaacttgctctattctgaaatttctttcacaaagtcctgtactcagtgagaaaagaaaaattgacagcttaatttgcagtcatccaggtcctgaaagttcttcagaaccgaataaagctgaagaacacaaggctgcgcagtatgttgataggaacaagtttaacactgctgggagtaactctgccagcagtagcacatggatgttcaacgttgaagatatcgatccagccgtagtggaagagctgccgccggaaatacaaagagaaatacatggatggattcgcccgccaaagcaatcaagctcaaagacacggggttctaccatttcgtcttacttccaacctgcaaagagctattctctgcaagcgattcctatactgctgtaattcaaggaaaacagatgctgccagcgttttcgcttgctaattaaacaataacctgagcatataacttctgagatcatgccaagagagcagaaggccattttataacttcgcgtgttcagagaaaactgggaggtccaatgcatcccttgcaatggcttgatcttcgtcagttatggccaatgcttgtgatatattttcctgcatagaaaaaatactgaagctgctaagtatgcttgaacttgcatacaagatttataagctgtggatataagcagaactgtaataagttatgcttactg

SEQ ID NO: 25830 - DNA, 2203 bp, Oryza sativa
  ref <308>: DATABASE ACCESSION NUMBER: AK101272
  ref <309>: DATABASE ENTRY DATE: 2002-08-28
gacaactcacagccaaaacctcgtacattttcagctagccacaagcaacacaagtccaagacaagtcaagcgttcgcaccaagtcaaaccgcgcctcactgccaccttcgtttgcgcaccatggagcttgccctggttggcaacccttcgaatggcgtggcgaagccgtcgtgcaactccgtcggctcgctgcccgtcgtcagctccaacgccgtcatcaacccgccggtgaccagcgcggcgggcgccacgctcggcaggcacctcgcgaggcgcctcgtgcagatcggcgccaccgacgtgttcgccgtccccggggacttcaacctcaccctgctcgactacctcatcgccgagcccgggctcaagctcatcggctgctgcaatgagctcaacgccgggtacgcggccgacggctacgcccgcgcccgcggcgtcggcgcctgcgccgtcacgttcaccgtcggtggcctcagcgtgctcaacgctatcgccggcgcctacagcgagaacctccccgtgatctgcatcgtcggcgggcccaactccaacgactacggcaccaaccgcatcctgcaccacaccatcggcctcccggacttctcacaggagctccgctgcttccagaccatcacctgctaccaggccgtcattaacaacctcgacgacgcgcacgagcagatcgacaccgccatcgcgacggcgctaagggagagcaagcccgtctacatcagcgtgggctgcaacctggcaggcctctcccacccaacgttcagtcgcgagccagtgccactattcatctcgccaaggctgagcaacaaggcgaacttggagtacgccgtcgaagccgcggcggacttcctgaacaaggcggtgaagccggtgatggtcggtgggccaaagatccgggtggccaaggcgaagaaggctttcgccggcatcgcggagtcgagcgggtacccgttcgcggtgatgccgtccgcaaagggcctcgtgccggagcaccacccgcggttcatcggcacgtactggggcgccgtgagcaccaccttctgcgccgagatcgtcgagtccgccgacgcctacctcttcgccggcccaatcttcaacgactacagctccgtcggctactccctgctgctgaagcgggagaaggccgtcatcgtgcagcctgaccgcgtggtggtcggcaacggcccggcgttcggctgcatcctcatgacggagttcctcgacgcgctcgccaagcgcctcgaccgcaacacgacggcatacgacaactaccgccgcatcttcatccccgaccgcgagccgcccaatggccagcccgacgagccactcagggtcaacatcctcttcaagcacatcaaggagatgctgtctggcgacaccgccgtcatcgccgagaccggcgactcgtggttcaactgccagaagctcaggctccccgagggctgcgggtacgagttccagatgcagtacggctcaatcggttggtccgtcggcgccacgctcggatacgcccaggcggccaaggacaagcgcgtcatctcctgcatcggcgacggaagcttccagatgacggcgcaggacgtgtcgacgatgctgcggtgcgggcagaagagcatcatcttcctcatcaacaacggcgggtacaccatcgaggtggagatccacgacgggccgtacaacgtcatcaagaactgggactacaccggcctcatcgacgccatccacaactctgacggcaactgctggacaaagaaggtccggactgaggaggagctgatagaggcgatcgcgacggcgacgggcgccaagaaagactgcctctgcttcatcgagatcatcgtgcacaaagatgacacgagcaaagagcttctcgagtggggatccagggtctcggctgccaacagcaggccgcctaatccccagtgatcttgctgctcgtcttctcaggacgcacactcgaaattgctgggctgccaatgtctaagatgtgctgcttatcatcgtctgtgaattaattgtttaacgcttctgtttctgtatccattcaaaattttcttagagaagaggttgaattagtacatgtcgatgggtgttacctatcctatgataatgtatgtaattcaaatgcttggaattaatgttttgtaaacctacactatattgcgatgcaataacatggacgatttgaagg

SEQ ID NO: 25831 - DNA, 1604 bp, Oryza sativa
  ref <308>: DATABASE ACCESSION NUMBER: AK101273
  ref <309>: DATABASE ENTRY DATE: 2002-08-28
gcccctctttatgctcttcctcccgcgccaactcgccctctccgccgccgccgccgccgccgccatggccaaggaggagtcgaggaaggagaagaaggccaagaccaaggcggcgtcctccgccgccgccgtccccgacgcgaggagggccgccgtggtggccgcggtcgccgccttcctcgagtccagcggcttcccccgcgcgctcgccgcgctccagtccgaggccaacctcgaggcgggttcttggcggtcgtcgccggtgagcctggaagagttggtttccggattcttggaggactcgagcaattatgctccaggagccagcatcaatgggagtatcgagcacgagaaaacagccgccgttgtcgcggaagatgctggcaagaagaagaaaaagaaaggcagtgacacgaaagtgagtgaagctgagaacaaggtggctgagccttctgccgtggaaaagcccagtgaaaatgcggatgtcgagaccaaagaaaagaaacagaagaagaaaagcaagaaacaagaaaacgacgaggatgtcgaagctaggctggaaaaggcagaatcggctatcattaacaaatttgagaccgtggacacattgaaggaggatagcaagaatggtttggttgatgttgctcctgtggagaaagggaagaaaaagaagaaaggaaaatcaactcctgagacatcagataaggttgacacaggaagtacagatgctggggctgattgtgccaagggaaagggtgatgctgcagagatggagaaagacaacaatgaaaagaaaagtaaaaagaagctgaagaagtccaaggaaaacgttgaggtggttgaaaacaaagaagttgcagggaaagattcagctcctaaatcaaatgatgagaacaatagtggaatggagactgagaagggggaaaatggaatgcctccaagtgataatgcggtagttggcaaaaagcggaaactagaagaagtcgaaggaagcaacctccctgctaaagaagataacacagccagccagaagctcagcaatggttcttcagaggatgatggtgccaaaccgaataaaaggcagaaaaaatcatctgaacccaaaactgtgaatgcatttcaacgggtgaaactagaggatgttaaatttgctgatgataggcttcaggataactcatattgggctaagggtggtgcagactctgggtatggtgcaaaggcacaagaggttcttgggcaagttagaggaaggggctttagacatgagaagaccaagaagaagcgtggaacctacaggggtgggcagatcgatttacaaacccactcaatcaagttcaacgattcagatgacgagtgatcgcttcaattttgcgagtcgctcacagtttaccattcttgccatcgtttacatgatgatcagccttcagaaagaatgaactggagggaatgctgcgtgtgtggcgaattcaggaggaacatgaaattgctttattatgcccattttgttagtgctgggtgccctgctaaatcatcaaaattttgtattgatactcactgagatgtatcattttgccactgctaatacaaagtgcaagagtattagt

SEQ ID NO: 25832 - DNA, 3056 bp, Oryza sativa
  ref <308>: DATABASE ACCESSION NUMBER: AK101274
  ref <309>: DATABASE ENTRY DATE: 2002-08-28
ggcattggccgttcggatcgcggtggcgcttcgtgaaggtgggggagaagggggaaaaggagtcggctttcggggagatggcgcgcaatgcggcggacaaggggacgtccatcgacgcgcagctgcggatcctggcgcctaagaagctctcggaggacgacaagcttgtggagtacgacgcgctgctcctcgatcgcttcctcgacatcctccaggatctgcatggggaggacatcagggagacggttcaagaatgctatgaattagctgctgagtatgaaagtaagattgcgtatcgtaggaggataaaactgaagaagggtgattttgctgatgaaaactctgctacaactgaatcaaactttgaggagaccctaaaaaggcttgttggtgagcttaagaagtcccctcatgaggtatttgatgctctcaagaatcaaacaatcgacctggtcctgacagcacatccaactcagtcagtcaggaggtcgctgctacaaaagcatggcaggataagaagttgtttaacaaaactttatgcaaaagacataactccagatgagaagcaggaactcgatgaagcacttaagagagagatccaagccgcctttagaacagatgaaattcggcgagcacctcctacaccacaggatgaaatgcgtgctggaatgagttattttcatgagacaatatggaagggtgtacccaagtttttacgtagggttgatactgcccttaagaacattggcataaacgagcgagtgccctataatgctcctcttattcaattttcttcttggatgggtggagaccgtgatggaaatccaagagtcacaccagaggttacaagggacgtatgcctgttagctagaatgatggctgctaacttatactatgcacagatagaggatctgatgtttgagctatctatgtggcgctgtagtgatgaactacgtgtaaaagctgatcagttacaccgttgcgcaaagaaaaacacaacaaagcactatatagagttctggaaacaagttcctccgagtgaaccctatcgtgtaatactgagcaatgtcagagataagttgtacaatacacgcgagcgagcacgccatttattagccagtggattttctgaaattcctgacgaagcaacattcactgatgttgagcagttcttggagcctcttgagctctgttacaggtctctctgtgcctgtggtgataattctattgcagatggcagtcttcttgactttctacggcaagtgtccacatttggactatcccttgttagacttgatattaggcaagaatctgaccgacatactgatgttatggatgccataactcaataccttggaattggatcctatcgtgaatggtcagaggagaaacgccaagaatggcttctgtcagaactcaatggaaagaggccattatttggtcctgaccttccccagacggatgaaattgctgatgccctagatacttttcatgtgatagcagaactaccctatgatagctttggtgcatatgtaatatccatggcaacagctccttcagatgttctagcagttgagcttctgcaacgtgaatgtcatgtgaagaagccactgagagttgtgccattgtttgaaaaactagcagatctggaagcagcaccagcagctcttgcccgacttttctctgttgactggtacagaaataggatcgacggaaagcaggaagtaatgattgggtattcagattctggaaaagatgctggccgtttctctgcagcttgggaactgtataaagctcaagaggagcttattaaagttgctaagcagtttggggttaagttgactatgtttcatgggcgaggtggaactgttggaagaggtgggggtcctacacaccttgctatactgtcacaacctccagataccattcatggatcacttcgtgtgactgttcaaggtgaagtcattgagcaatcttttggagaggagcatttgtgttttaggacacttcaacgttttacatctgctactcttgagcatggtatgtatccaccaatttcaccaaagccagaatggcgtgctttgatggatgaaatggccgctgttgctacaaaagaataccggtccattgtcttccaagaggcacgatttgttgaatatttccgccttgcaacaccagagttggaatatggtaggatgaatattggaagtaggccatcaaaacgaaagcctagtggaggcattgaatcacttcgtgcaattccttggatctttgcttggacacaaactcgattccacctaccagtgtggcttggttttggcgcagcgttcaagcatgtcttgcagaaggacatacgcaatcttcagatccttcaggagatgtacaacgaatggccatttttcagggttacaatagacttggttgagatggtgtttgctaagggtgatcctggtatagcagctctgtatgacaagttgctagtttctgaggatttgtggccatttggtgctcgtcttagagcaaactatgaagaaacaaagcaacttcttctacaggttgctggacacaaagaccttctggagggagatccttacttgaggcagagactgcgtatccgtgattcctacatcacagcgctgaatgtttgccaagcttgcacgctaaagcgtatcagggaccctggcttccatgtaagcccccgagctcacctctccaaggacataatggactcagggaagccagccgctgagcttgtgaagctgaacacaacaagcgagtacggcccaggcctcgaggacactctcatcctgaccatgaagggcatcgctgctggtatgcagaacactgggtgaagtagaactggttcgttctgatggtgtgttatggtgtcatgaattagtgtagtttgcacctctatgcaatcactatttgcagtttgcacctctgaactctatatgtaaataaggggatgctaagcaacgtataactaagactggttatatccatggatattacctgtttagcatgttatatatcgaactcttatgctgttcacc

SEQ ID NO: 25833 - DNA, 3103 bp, Oryza sativa
  ref <308>: DATABASE ACCESSION NUMBER: AK101275
  ref <309>: DATABASE ENTRY DATE: 2002-08-28
tggaagtcagcgaggtgatagcgccagcaaaaccctgaacccctccaaccaccgcagccgcaattccgccgccgccgcagccacgttggccggcggcctactgggggtgctggaggcgcgattgatgagccctgcagccgacgccgcgggcagcgatgcacaggctcgtaccccgcgccgccgcctccttcctcggcgccccgccgctgctcaccacccaggcgggcccgcttctcgccgcgcgttcgggcccaccaaaccctagccgcctccgcctccgcctctccccgtggcggctgctgcgctcgaggagggggctctcctgctccgccgatgcggcgaagaggtgcggggatgatgatgccgaggaggatggcgagcagagcgtcgccgggggaggtgggagccgtccggtggtggataggaggcagagaagtcggggcgatgcggcgatggggagcggcgagctgctcgcgattcctggagtcgggccgcgcaacctgaggaagctagtggacaagggattcgatggcgtggcacagctcaagcagctgtacagggataagttcttggcaagtccaatgagaaaatggttgagttcttgcaaagttctgttggcatcatacacaagaatcatgctgagagtataactttgttcattaaagaaagtgttgatgaagagctgaaaggaactgactcaccaaatgtttccaaaaataagaggctgaccttttgtgtggaagggaacatcagtgtcggaaaaactacattccttcaaagaattgccaatgagaccatcgaattacgtgaccttgtagagatagtgcctgaacctattgctaaatggcaagatgttggccctgatcacttcaacatacttgatgctttctatgctgagccacagaggtatgcttacactttccagaattatgtgtttgttacaagggtcatgcaagagaaggaatcttcaagtggcataaagcctctcaggttgatggaaagaagtgttttcagtgatagaatggtttttgttcgtgctgtccatgaagccaactggatgaacgagatggagatcagcatctatgactcctggtttgacccagtggtgtcatcactcccaggacttattccagatggttttatttatctaagagctagtcccgacacttgccacaaaagaatgatggttcggaaaagatctgaagagggtggtgttactcttgattaccttcgaggtttgcatgagaaacatgagagctggctgcttccttccaaaggacaaggtcctggtgtattatcggtcagtcaagttccagtccatatggagggctctttgcctccggatataagagaacgagtattctacttagaaggagatcatatgcattctagtatccagaaggttcctgctctggtcctcgactgcgaacatgacattgattttaacaaggatattgaagccaaacgacagtaagttttgcaaaacctttattttgtccataggacaattgtcaaccttatattattttcttctagtgctagcctgtatttatttcataagaaaagaacatctaagaacatctagtgctagcctgtatttatttactagttcattcttcttaacaaacacaaacattatatttattccaaaattgaactcaaccctgttcgtatagtggctgcgttctagtcacacggtaggtctaccttgatctttattcatagtggtcaagatttcaaagttcaactttacaactgttgaaatgctagaaagactataggagcacaaaaaagaaatgcttttcttgtatgtggcttcaagttaagagggatcagagtacaactattatcctatagctcatgcatcattcttcctttgtgtatggcatacatgtattttgtagtacttggtatgaagtttctttctgctagtttagttgcatgacacttcttgcttaaattccttacatcgaatgtttagtaccaactcaactgctagcaacatatccgtatatgacatggtttatgacatattaggaactcaattattttgtttttgcacttttcattatagttcatttatatgaagagtcttgtgcttaaaatgttattaaactgctcctaaggtctctttccactatagcactacaacctgaccaatttattgtaagaacattggaactgatgctaattgcggtagcttgatgagataattcagtatgcccatgggttcattttttggatatcttttaggggagagtttggttcagctttggtacttaaaacagaaaatattttgcaaaatcaacaaacgtttatgtgctgttgctatatctctaatttagtatgtgactattgttccttgactttatgtggccctagttttggtatccatgcatttcccggcctgatttggtatccaatacgctctgtttcatctgttgtagtattatttttctgccgaaccttatgatggagtttatgtatttatgctattcattcccgcatttttgcgatgcccattttctttagagaatgctacatacttttggatcttttctatagcttcagctgaacatcctgtggtgcccttgagttcaaattttctgtgtctgatatttccatcttgtccatgaagatatgcccgacaagttgcggagttctttgaatttgtaaagaaaaagaaagaagatccttctgcggagtcaagtggtggtgataagagtaccaacagacagattatgcttccccacagaggtggtttgtgggttcccgaaggtaaccctttaccaggatctgctctgaactctctggatttcagaagagcaatgtcttccttcctctcagcttaggggccaacatcccatatgaaatagccaattcctggccaccatatgttccagtattacaaattctgaatggtccatcgtcacatctgcgtctcagatagccttgaactgacgaccctgtaaatgctgaagatttattgaaatataggtttctgtatagcgctagccaatgctgtacaatagtagtatcaaactcgtccatgtaaatgttcactcttcttcgtcgtcaataaaaggcgtccctgtaaatgatt

SEQ ID NO: 25834 - DNA, 4410 bp, Oryza sativa
  ref <308>: DATABASE ACCESSION NUMBER: AK101276
  ref <309>: DATABASE ENTRY DATE: 2002-08-28
gacaagctcccgaccacgaaaagatcgctgaccccgaccttgacccgcgccgtcgcgtcgccttcggaatccaagaacgatgctcgccgccgtcccggatcgacctccattgatccgcaaacgccgcgtccgccccccgccctccaagctcgggcctcgcagccatcgacctcgatccgcttcgcgctctgtcggaggcgcatcttggttcttccatggcgaccccccatcggccatacatggcggcaagctagctcccgtctcaatccgtagctttcccctccttgagcctggactactcctttgattcttttgttcttttttgcttcactagctaattgtctgattgtacttctcttcttgcacaggcgtggatttgcagatgtcgcggttcacagggcaattctgctggttatcctacaagtaatcatctactcttctcttcttgatgatttctgcaataaacaatagtctgattctagaagacagacagagctatcctgttgccgtcgagacttttaactctgattattgacttgcggttctcttcacctcttgtttactttgctggattaaattactaggttactctatatgtttgagaaaattgcgtggatgacacgtggaagctgagtgtgatccactgggactgaccacttcatttgttgataaactaaccccttgatagtaatggcattgactaataatacactagtttactctgacttgtagttttctttcttgtttaaggtttgctggctagcaaggataaggttgagcggaacagaatatggtgttctactatgccctctacgtgtttgagaaaatgacagtatgatgaatgcaagtgtgaacaatccaaataacccactgatcccttgaaaaccaggaccatgaaaggagtaaattaagccaacgggtggatagtccattgataaaccgcctgcccaaggtaagtctgtcagacatggtgtcttcactgacattgtcacacaggccagctaggaggaagagttccagctcccttccagttccaggacgttgttccagcactgttgaattacacctgagtgtaaagaagatcgacaaagatggcagttgtagcagggggcgatgactgccctcattgccaagttgactaccctgctgatggaccaatacaagctgcagaacagtgcgaggggcgacatcatatttattaaagccgagcttgagagcattcaggctgcccttgagaagttgtttgaggtgcaggtaactgatcgccaggttaagatttgggagagggatgtgagagagcagtcgtacgacatggaggatatcatcgacaatttcatggttcatgtcgaaacccatttgctagccaagccacatgaactcaaaggattcatgaagggaagtttgagcttgttgagaagagcaatggttcgctatcgtgttgctaccgacatcaaacgtatcaggaggcttgtcaatgagacgagtgcacgccgtgataggtataaggttggtactattgttgctgctgccaagactgagaccgcaattgatccccgtttaattggtatctatggagaggctactaaacttattggcataagtggacctaaggaagaattgaccaagctgctgatggattccaagggcaactcaaagaataaactgaaagtgatctccatcgttggagttggtggtttaggcaagacaactcttgctaatgtcatttatcaacagcttagaggacaattcgagtgtcatgcttttgtttcagtatccttaaagcctgatctaaagaaggtcctgagcagcatactccgtcaattcagtgaacaaggttatgcttggacagaaacatggtgtgctcaggaaatcatcaacaaaatcagagatgaaattaaggaaaagaggtataactaaccaaatacatgcttaagatcattgggaacatatcctgtgtacacaagccatcacgtgtacacactgtacaccaactaacaaatgtcaccaaaaaatctagaaaatttcatacatgtactttcaatagtattacacctacaagtacaaattcattatattttagccgtaaccaaaaaaatgtgacagttttaaggttataattctgtcagaattttgtttcttgttgttgctctctgtagaatgaatttgaagatgggactttacacgtaaatgtaatactattaaaagtacacatatgaattttcttagatttttctggtgatatttgttagttgttatgtacatgtgagtgcttgtgtacataagatatgctcccaggatcatcccatgctatgtgtaagcattttagcttgaagtacagctagaatttggagctagtagggatagtaaaatacatgcacagactgctaggtgaattaacaatgaaattaatccttttatctaataaaccaagttcaatgggctggcaaagtaatattctagcttagggtgctaggtgtgataacaacgggaagttcaaggggctatgaaagagaaatgtgaattcagggtgttcgataagacaggcaaaagcttagaggtctaaaatacagttcttttctttcggaaaactaaaaccaagatagcaaaattactagtttgatcaatttggattcaggcaacttctattctttgaacttctcacaaaactgcaaccctgtcatatcctaggaaatttttgcatgttggtccaaatattattgactctactctgtttgataccattaggctgctaatgggccgcgtcagcatcaaattggctgcaaatttttatttatttatttagaagtcattccctatcttcgaaaaagcaaatacatgctacataagttcaggaagtagtagccagacctaaaggttaggtaaataaaatgttcacatctaacatgattgaaactgagttcatgaaaccctatacttgtgggactgaactcatgagactgaacatgtagggaaactatagcttctggagatcctgtctttcctctccctcaccttctgtccaatgccagtactcgtggttctcagagcagagccttttgtgctgttgaatacttcatctgttacttgcctttgaaaggatccaattaattggttttcagtttcaatttaactcatgtcttgtgctaatgttatcacaaaaccacaggtacttgattgtaattgatgatatatgggagaaatcagcatgggaatgcatcgagtgtgctttaatagaaaatgaccgtggaagcagaataatcacaacaagcagagtgcttgatgctgccacgcccatgctcttctgaggttgatcataccgtttacaagctgcagccactttctagtgataactcaaagaaattgttctacaaaaggatattctactgtgaagatggttgtccattggaactgaaggatatatctgaaaaaactttaagaaagtgtgagggagtcccgttagccataatcaccataggcagtttattggccatgagaccacaaaatttataccaatgggatagggtacacaatttaattggttctggacttgagaaaagccatcatgtggagaatatgcggcacatattgtctattagttattatgatttgccagccgatttaagagcttgcttcctatatctaagtatatatccagaggattacaatatacagaaagatcaactgatacgcagatggatttctgaagggtttatacttggagaagatatggatactttgcatgaaggaggtaaatacttcaatgagctaataaatagaagcatgattcaaccagcatacatcgacagtcatggaagggtgcatgcttgtcgtgttcatgatatggtgcttgatcttatcacatcattgtcaaatgaaacaaattttgtgacatcattaggtggtcagcagcccacatatcatccaaacagggctcgccggttatgccttcaaaacagcatatatgaccatacgatacgacaggagaaaatgaagtggccccgcgtgaggtcactaatcgtattccctcatgctaccaacttgttgccatccctttcgagattccgtattttgcgcgtactggatttagaaggttgtcaagacttgaagaatcaccaaattgagggtatcagtgatttgtttcatttgaggtctctagtactgaaggatacaaatattgttagtctccccaaaaagattggcaacctaagttgtttacatacactggacataaggcacactatcataactgaacttccatcaacagtcgttcatctaagaagactggtgcgcctactaattgatgcatcggtgaagttacctgatggaattgggaaaatggaatgcttacaggaaatatcactggttggtattagcaagtctccaaactttttgaaggagctagggagtttg

SEQ ID NO: 25835 - DNA, 1895 bp, Oryza sativa
  ref <308>: DATABASE ACCESSION NUMBER: AK101277
  ref <309>: DATABASE ENTRY DATE: 2002-08-28
ggcgtggagtgaagcggaggagaaggaagcatcgcatccgcctccgatccggcgatggcgagggcgccgccgccgctgtcgtcgttgccgccgccgccgcgccggcccacggtggtgctgcttctggggctggccctcgccttctgcctcgccgtcctctccatccagtcctcattcttcaccgctccgaggctggcgagtaggctggatctggactccgacgaggtccgcgcgctctcgggcttccagtcccgcgtccagcagtgcgtggcaagaaggggacttggcctcacagcagatattattgatcattgcaagctagtccttagatttcctaaaggaaccaacagcacttggtacaacactcagttcaaatattttgaaccactagaatacaactatgatgtctgtgaaactatccttctgtgggaacagtaccgtaacatgacgactgtgttgacaagggagtacttagatgtgcgacctgatgggtggttggattatgcagccaaaaggattgcacagctcggtgctgacaaatgctacaatcgtactttgtgcgaagagcttcttagtgttttactccctgctaagcctccttttcatcctcgccagtttgcaacatgtgctgttgttggtaactcaggggatctcttgaaaacagagtttggacaagagattgatgcacatgatgctgtgttccgagataatgaagcacctgttaataagaagtatgcaaaatatgttgggttgaaaagggactttcgactggttgtcaggggtgctgctcgaaacatggcgccaatactaaagggctcctctgatgaggttcttattataaaaagtttgacgcacaaagaaatcaatgcggtgataaaggaacttccaaacccagtttatctttttcaaggcatagtcttgagaagaggtgctaaagggactggtatgaagtcaatagaattggccctttccatgtgtgatattatcgacatgtatggattcacagttgaccctaactacacagaatggacaaggtacttctcacccccaaggaaaggacacaatccactgcaagggcgggcttattatcaacttctggagtgccttggagtaattcgaatccattcccccatgagagcaaagagggtagaagattggtcggatatacctagcagggaagagatcagaacagcgcatgctgcggcttttcgtttaaaaaggcatgaaactggtcaatctgatcaaatggggccatttagcaactgcaaggtatggggaacagttgacccagattacggacctgtatcaggaactccagacatgagcgaaacacgaaagagctcaaactacaagaagtgggaggtactcccattcgacagcttacgaatggaggctcaggaacaccatgtccagatgggcggcgtatctctgtacaagatggatggaaacaagctagatgatcttgtttgtgtgagacatgaacgttcatctagttaagtcagcacttaatctttgcctggagatggcatcttgaccctgtggtaatcttcagaggcatatctacttgtcagttgtaagatcacaagaggcaaaggattgaggctattctttagggtttctcattcccctgacagaaaatattcttttattggtttcttagcgactttgtagggatatttgcttaatcagtcggaagaatgttccgctatgggtacagctgtaacgattttggtgccacttgcaacatgtactagccatcacgcaattctgaactgcagttttgttgttgagctagtaacctacaccctgaattgtagtactatagtttttgttgttgacacatgttttcatttcacaatgccatataagtgaaagtcatgtttgttttgttattg

SEQ ID NO: 25836 - DNA, 997 bp, Oryza sativa
  ref <308>: DATABASE ACCESSION NUMBER: AK101278
  ref <309>: DATABASE ENTRY DATE: 2002-08-28
tggctggagccaatgctcgtcacccctggtggtggtggttctctgcaccgctcctcgaggaacccgaaccaccaacgcgtccgccggctgctggcccgccgacgactcctcgtcgccggcggcgctgccgtcctgcggccggaggtacgcgagcaccgactcgcgcgcggccatcttcttcaggcacgacacgttcagcgtgacgttcccggacccggagcggtagacccagtagtcgctccgctcgccgcagcagtcgcagcgccagcgcgccgacgacgacgctttgcggaggtggagtacgccgccgtcgtcggttggccggctccggtccagcccggcgcagcacgggtgcaggtcgcggctgccgcaggcgcagtggtagacgagccccgccggcgccgcgatctcgccgaacgcgtcgcagaaccgccgtgttcgccccggcgcacggtcgtggagcgtgaacgtgcagcacctgtcccggtggagcgggtgggtgatcgtctcctcggcgtgggcgcagatgtagtggaggtggaagccgcaggcgtcgcaggcgtacagctcgccgaacccgggctgcttgcaggcgtcgcactgccatggctccttcgaagtatgtgcttatcaaatcttagttatgaagctactagacatttacatgttcagatttattattaggatttgatttttttttcttaaatgaagggaacaaatatagctaggtaacctccagtgttaagcttcaggtagaagctacagtttttctttttcgtggaaatcataccaccattatgacgcgcggctgaataaaccataccgacagttttctgaagattccgttcataactactccctcgctccgtcccaaaataaagcaagcttgtactatataggacacgtcctaatgcaacgaatgtatttagatttattgtattaggatatgtcccaaaggttatattttgtaacggaggaagtatatgtttattgtgcg

SEQ ID NO: 25837 - DNA, 2140 bp, Oryza sativa
  ref <308>: DATABASE ACCESSION NUMBER: AK101279
  ref <309>: DATABASE ENTRY DATE: 2002-08-28
gaatatgaaattttcttgattcttgaaggatggtggggtgaagcatgcagaaggtggtgagcaattagcaactgtcggttcagcgcagaagaatgaggatgatgaaaagggtgaaccaaagaggtcttctgtggcgtccgggaaatccagtgggaagcaaataaaggataatgcaggttcaccaaaggaagactatatacatgtaagagcacggcgcggtcaggctacaaacagccatagtcttgccgaaagggttaggagggagaagatcagtgaaaggatgaaatatcttcaggatcttgttcctggttgtagtaaagtaactggtaaggctgttatgctggatgagataattaactatgttcaatcattacagaggcaggttgaggtatgatgtttgtaaaacttgtagggccattttcagttttacttgcatagtcctgctgcgatgtaatctggtatacccaatgtgtgcatgttgggcagtttttgtcgatgaagctagcaagtgtcaatccaacactggacttcaacatagaacgcattttatctaaagatatttttcaatgtcgaggcactactgcatcatctgcctttggcttcttcccagacattgttcatccccgattacacccaccaaaatatacacaagttgggatgcccagcattgtgaaccccactgatgcatttggaagagtaatccatgctccattaggaactaacagtgcattcaaagaacctaaacatcaggtttgtaccatcacttgcatttggctaaatggccattttcatttcatgctctttataccaaatactgtgttcatgaaaaataggacaagtttctgcaagatgttccaagacctaatttagtgttatatggcttggtgtttcgagaatactgctccacagatagtcgttgaaaagaatgtccacataatattttaaaccaagaaaagctagtcccctttatatccttttgctgggtcttgcttcactacccatctttccaaaaagttcgtgggtcttaaaagcaaagcaaactagataacataactaaactgagacattttagacaacaaacaaaattcctactatctgtttttcataactagccagattgtgcctgattcttttggccatgcaagctgtttgaacctagtccatcaatcagtctctttagcttctgactcattaaccctcttcaacctgattttagtgggaagagcattgttgatgttaaccgacattgtaacctcagtagcactaaccatttcactagtaaaccaactaaaaatgtacaaatgcagcttgttatatatctaattgtatcttcatcactacatatttgccttcacagttatctaaaacatatgctttcatattcataaacatttttttggaaagcggagtaccaaagcactgttttagtattttgcaatcctcttattacttgtgcattggacagatgcccaacaatttgaatggagagttccaggacgtcattgagatgccttttactcatgaccatcatggatcaaatgatcaaccctgagattgattccacaactgaagcaagagatcaatatgtgccatgggctttcagcaaaactgtgatatatgagcatgttgatatcatggtactagctcacagctgatcactgaagtataagcatccaaaatgcttagttagtgctatttttctcatgttcatagcagcaattgacctcctgtggaagcctctctttggatgttccatttgctgttatagaaagttgggagataaaaaaaaaaggatgttcacatggagatctcaagcaatttgttctccactgaagtagtctacagtcttgaaatggcgagaagcttcattttgcaagaaggtgatttttctgtggtctcgtcaaccccaggattattacatacactagctagcattgtgaggctacagaaattgttctttgttgtacttgcttagcccatgttccatctgacaagcaacataggcagaaatgcagtcactgattttgtatttggtgaaaaaaaaaataaatgggcttggcctgatgtagcaagcatttgaattttgcaacgggtgcatattggcacagatgtttttattccagcaaagctgtgaattctg

SEQ ID NO: 25838 - DNA, 1459 bp, Oryza sativa
  ref <308>: DATABASE ACCESSION NUMBER: AK101280
  ref <309>: DATABASE ENTRY DATE: 2002-08-28
gttgtgcaacatcacaaacacaacctttcactcccatcttggctttctttcctgtctctagcttagctacctgttgcttccaagctgagaaaaaccaagcaaaagaagctgtttgtgtgcctttccaagagtgaaaaaaaaaatgcatcctaatggcgcgccgctggccgtgccaccgggtttccggttccatccgacggacgaggaattgctctactactacctgaggaagaaggttgcttatgaggccatagatctcgacgtcatcagggagattgacctcaacaagcttgagccttgggatctcaaagatcgatgcaggattgggacgggggcgcaggaggagtggtacttcttcagccacaaggacaagaagtacccgacggggacgaggaccaaccgcgccacggtggccggcttctggaaggccaccggccgtgacaaggccatcttcctcggcagcggcggcggcacgaggattggcctgaggaagacgctggtgttctacaccggaagggccccgcacggcaagaagaccgactggatcatgcacgagtaccgcctcgacgacgacaatgtcgacgtcccggaggaaggatgggtggtgtgtagggtattcaagaagaagagcatccatcagaggggcttcgaccagccggacatggcggcggcggccgacgaggacgagctccggtaccagctgctccacggcgcgggcatgtcgtcgtcgccggtcgaccagaagcacgtgctcctccaagagcagctcgtcgcgcacggcgcccatggcggcggcttcgtcgtcccggcgttcgaagcctccatgcacctcccgcagctcgccagcgccgacgcggccccgttcggcggcggcggcggcggccatgtcgcgttcgcctccatgaacccgctcgacgccgccggctgcggctcgcagaacatgatgacgatgaagatggcagcgacatccggtggcgagatgctgctgatgagcggcggcggcgtcgacggcggccgcttcggcgccgccgccgactggtcgatccttgacaagctcctggcgtcgcaccagaacctcgaccagctcttccatggcaaggtcgccggagcgcatcagcagcagcagcagatggccatggacgccgcctcgtcgttgcagaggttgccgttccaccattacctcgggttggaagctgcagatcttctcaagttttctatgtagaaattttttagctatatgtaatgtagtatctgcttcttgattaattaagcaggcgaattcttgtttttttttctcttctagttttgtcaaattattagtactagtttcagtttgataaggttaatatcggagttctgctagctactggcctactgttctataagcatgtgtatacagacagtctgaatgccgtatgaacttctttctaaatgtttcaattcaagtttgttcatctcg

SEQ ID NO: 25839 - DNA, 3745 bp, Oryza sativa
  ref <308>: DATABASE ACCESSION NUMBER: AK101281
  ref <309>: DATABASE ENTRY DATE: 2002-08-28
gatgctactacagcttgtctagagcatttcggcggaaagctccccgaaaactaaaaatttccccgcctcttcccgcctcgccaccgccgccgctcgcctcaccgatgacgccgtcgcacggcgccgcggctgcggcggcgtcgtcctccgccggcgccgggcggagggccgcgacattcgcgggggcgagcgtgttcctgtcgcggagcctggtggcacccgaggtgtacgacgccgtgcacgacgcgctccgcctcaacggcgccgaggtcttcctctgcgccgaccccgcccggacggggccgctcgacttccacgtcatctcctcctcctcccacgagaggttcgcggatctgagagccaaaggctgcaatttactcggaccacagtgcattctttcctgtgcgaaggaacaccgcttcctacctaagcaaggttatacttgttgtcttgcaatggatggggttaagatactttgctcaggttttgaaaaagatgagaaggcaaagattgaacaattagtgacagctatgggaggtactttacaaaacaaagcatacacggatgctaactttgtaattgcaaaggatgtattggctgccaaatacaaatgggctgtgaatactctgaagaagcctattgtcagcaggaactggttagagcaatgttggattgaacatcgtgttgtacctcatgaaccttacagaatccctcctttttctgggttgaatatttgcatcaccaaactgaatacgaacggagggagttggcaaaaataatagtgcagaatggtggccagtattcagcaaatcttacacggcggtgcactcatttagtttcaaatgaacctggaggtgacaagtatgttgtggcccaaaaatggggtaatatccacatagtagttcccaaatggatcgaccaatctgttgctcgaaaaggtaaaacaatctacctacatgggctattattgattttgctggtgtgacatgtttgtttctcctacagaaactctaaagtttgtaaggttaaactaacttcatgatttctttcttcactgaaaaacagtttgccttgatgaaagtgcataccttgtttgtcagaattccactaatattaatggtgtaaaacattcccttaaggaacaacacaaccctgagatcagtagtgcaagttttcaacctgttccaacaacatctgtagatgactcagtatcaacgtcacagtatgtgcctgcttcatttgatgacgcttcaaagatctgcagtactgatattggcgcacctagtttctaagagacaaaagaactacaggttgatagccatgttgctgaggactcagaggcagaagatgatgacctttatttatcaaattgtagaatttctctggtgggttttgaggagaaagagtcgtcaaggttagtcatgatgatacgcaatggtggtggatcccggcatgttatgttaagtgagagactcacacatattattcttggtgcaccatcagaggaagaaaaaaaggaggtgagacgtctggctgcttggggtgtaatcaatgtggtaaaagcaacatggttagaagactgcaacaaagcaaaaaaggaggtgaaagtatccccaagttatgtggctaatgagttgctcgcgaaagagttttcatgtgcggttatggaaaaaactgttatgcgggaaacaaaagcagccaaaaactcaggtggaatttttcatattccaaccgtcaatgacttgcatgataaacaacttggaaacgatctgtcatctgaaagaaaatcagcacggggcaaacatgaaaccatgaatagtaaccggacagcaacgaagtctgcaatatcaagtcaacagaatggagtggctagtactagcgagtaccaccccaaatttcaagtaaactcttctgcaataaatcggcagagtagcagatcatcaaatactttcaaagggagaatattttgtttctcaaattcattttcccacgatcggagagctcaggttgttgactgggtcagagaaggtggaggcattatggtggatgatgcacaatcaacagttgtggatttcattatcgagagccacggacagaatagcatgctccgcgactcttctcattcaactgctgtttccactcattggatacgctcatgtttggaggagggctgcttccaagatgtgggaagccatcctattttctcacctttgtgctgtcgcatcccgtttcctgggtttgaagattttcgtttctgtgtgtcacaatatgaagagaaagatagacttctgctgaagaacttgtgctttatcctcggaagtaaatttacagagaaagcaacaaagaaagtgacccatcttatctgcaaatttgcaagtggtccaaagtatgaggcttactatagtaggggaattccaaccataacagcagagtggctctttgagtgtgtaagacaggatagaattgtcccttttgaccagtttcagccaaaaccacctacttctcaggacagagatgctggtctatgcactgttagtcaatatcccacacaggccgcaaagacaatttccagatttgactgctctgagtcgcatactgaatctcaattaccaagaagcagttcaaaatacaactccggtaatgcctctgttaatgaggaaccaaatgatcctggtgttagtaaaaggaggcgattatccgagtttggcaaagctaatgatacatctggaaacataggaagaactgaggaactccaggatagtacccctgttcctgatgttgcagatgcaatagaggacctactggttcaatcatccaagattcaggacgtacaacctcctaggagtatttttgcacccgatgattctgttcttaatcaagatcaggaaaatacacactcttttggcatttcaaggcactggttgaacatgccacagaagctacacagcacccctgacacgaaagttcaaagtgggaactcagccaccacctctgctgcccctcctgccgcagccactgcctattatcctttcagtgaaactcagactgagtctcaggtcgttggctatgaagaagatttgactggcaggcaaaagattatcgacagagttcgttctcagagcattaatgtcaccccggcagctgaaatgtcttccgatacttaggagacgatcagatctgtccataaattgcagtggaagaacaatagtatcatgaaatctacctgtccagccttgttggtatttttcagcaagacagcaagagtgcaagacagatggaatataatctggaggctattccaaggcagagaacatgtgcgaatggtcaccaagttcagaagattctcatggaatgtcactgagcaaagtgcctgtacctcaactttggcatccagtaaatctaacccagctgtatattaccaagaacgtttcttgattattagatccgagggtagcaaagctaatggagacgctctttttttttttggttgagtacagtggctctggagcgtgtagcatgtcaaaaaggctgtacactctagtatttagcagctcagttggtgacttggtgttatggttggcttatgaaagcaccagaggccaaattttgttcatctctcgtatgatgtacaggggcagatctgaaagacggagaagcaggttagagtccagaactgaagggccaaactttgtcctgtttcgaattacaatttggctgttttgcacaattcaacggaaaatttaac

SEQ ID NO: 25840 - DNA, 1419 bp, Oryza sativa
  ref <308>: DATABASE ACCESSION NUMBER: AK101282
  ref <309>: DATABASE ENTRY DATE: 2002-08-28
aaaaaatcccaaaaccgaagggaaacatagcagccggctaaggtttctcccccctgccgcgccgcgccgcctccctccaacgccatggatgcgcagcgagctctcctcgacgagctcatgggcacagcccgcgacctgacggaggaggagaggaaggcgcacaaggaggtgaggtgggacgacccggacgtgtgcgccgccttcatggcccgcttctgcccccacgacctcttcgtcaacaccaagagcaacctcgggtcgtgcatgaagatccatgatctgaagcttaaggagagctttgagagttctcccaggcgtgaaactcacatgcgaaggtttgaggcggaacttgctcaacaatgtgagaaactggttatagatttggatagaaaaataaggcgtggtcgagaaaggttggctcaagatgttgctgtgccacctcccgtcatagggaaaacatctgagcagctttcaattatagaagaaaaggtcaagaggctgttggagcaaattgaggagcttggtgaagctggtaaagtagatgaagctgaggcacttatgaggaaggttgaacttctaaatgctgagaagacagctttaacgaatcaagcagataataaagtggctatgcttccacaagagaagaagatggaactttgtgaaatatgtggatcattcttagttgcagatgatgttcttgagaggacacaatcccatgtgactgggaaacaacatattggctatggtttggtcagagattttctagctgaacacaaggctgcaaaagagaaggcaagagacgaagagaggattgcaagggagaagaaagcagaagaacgtaggaaacagagggaaaaagagtatgatgttggaggcagggacggtggttctagaagagagaagtctggggatcgtgactatgaccgtgatcgttactatgaccgcaatcgtggaagagaaaggtctcatgatcacagagatagaggatcagaatatagaagcagttcctacagaaatggtagggattctgaaagagacagacaccgatataggagtgatgacatgagaaaggacaggagtagagtgaggagcaggtctcgttctccaagcaggcatggcccagatcagtgaacatatagatagttttattccgagttaaaactcatgaggtagaccattatgtccctttcgccatttaacctgttgtacaaatgagttttgcgatgtgttgcgcttgttgaatctctgttctgctgtaacagctctgttgggaccctacagtcttccttttagaggggaaaaaatatcaggtaggtattgtttacctttcctagtattttgagttacctatattaacatacagtgaggttttgtttcaacatttgaaactgaaaattagtctaataaagctgaaagcgt

SEQ ID NO: 25841 - DNA, 3663 bp, Oryza sativa
  ref <308>: DATABASE ACCESSION NUMBER: AK101283
  ref <309>: DATABASE ENTRY DATE: 2002-08-28
ttattcgcctttctgcttttatcgttcttgtgcaggcaagccatgactcagaaagcctagcattgtttttgaacaacgaaccagaattcattgatgaattattatcgttactaagctatgaagatgagataccggagaaaattaggagattggggatcctttcgttggttgctttgtgccaagataggtcacatcaacctactgttttgtcctcagtaacttctggtggtcatcgtggtatccttcccagtctcatgcaaaaggcagtggattcaatcatcaatggttcgacaaaatggtccacagaatttgctgaagagcttctatctcttgtctccatgttggtatcatcaactccaggttctttagctcttcaagaagcaggctttatacccactattttacccctcctcaaagacacagacacacatcatctacatctagttagtactgcagtacatgtcattgagggcttcttggattaccacaacccttcttttgcattgttcagagatctaggtggtctagatgacactattgcacgcttaaaaatagaagtgtcgcaggttgatattggttcaaagaaatcagaagaacctcagtctatgagtaaaggtaaagaagttgaaagtagtttgcctccgccagatatgcagactgttcattctgaagcgttaatttcttataatcgaaggaacttaatgaaagccttattgcgtaccatatctctggcaacatatgtgcccggtagctctgctcgtgttgatggttcagaagagaatgtattgcctccttgtttatgcaccatatttaggagagccaaggagttcggtggtggggtgttctcacttgctgctaccgtcatgagtgatctcatacacaaagatccaacttgctttactgtccttgatgcagctggtttgccgcaagccttcattgatgccatcatgggtggcattctttataattctgatgctatcacatgtataccacagtgtttggacgcactttgcttaaacagcagtgggcttcagttagtaaaggaccacaacgctttaagatgctttgtgaaaatctttacttccagatcatatctgaaagctctgggtggggacactgcaggggctttatcacttggacttgatgaattattgcgtcatcaatcgtcactgcgatcttctggagtggacatgcttattgaaatcttgaacaccatctcaaaagttgggtgtggcggagagtctagttcttgtacagaatctggtaactcctctacgccacttcccatggaaactgatgtgcagggaggtacttcaaggagtgaggttggaacttctgaggtgggaagttctgagaagatggtagatgcttccctagatgcaacatcatcgtcaatcgagtcatatcttcctgaatgcatatgcaatgttggtcgtcttattgaaactattctgcaaaattctgacacgtgtaggttgttcagtgagaaaaagggcattgaagctgttcttcagctgttcaaattgccattaatgccggtatctgtttcagttggacagagtatttcagttgcttttaaaaacttctcatctcagcattcagtttctctcgccagagcagtttgctcattctgtagagatcatcttaagctgactaatggactgctgggttcagtttctggaactaagctggttattagtgatcatgtgaagcaatcacctctcctgaaagcactttccagtcttgaagggttattgtctctttgcaattttcttctgaagggaaacgccttcatggtctcagaactggcttttgctgatgctgagatattgagggaactaggtaaggtttatattgaggtcacatggcagatatctttacttagtgattccaaggtggagaagcaagacatggaacaagatgatgtgcctggagatgcctcagtctcaaatttatctgaaagggatagtgatgatgacacaaatgcagcatcagttacaagacatatgaatcctgtttcagtgagaacgtcctctgtatcaccatggaatatggaacaagatattatatcagcagtgcgttctgctgccagcatacatcgccatggtcggcacacgctatcaaggatacgtggtcgccttagtggagctatggatgcagcacatactgatatagacagtcctttttctccaggagaaagttcacaaagtcatgatactataaaaaagagtcctgatgttgttgtttctgaactcctgacgaagcttggacacacgatgcgttccttcctttctacccttgtcaaaggattaccagctcgccgtcgtgctgactcaagtctgactccagcctctcgaagtcttgtgattgctcttgcacaactttttcttactgctcttggttattctggacattctactgctggctttgagatgtcattatctgtgaaatgccgatatcttgggaaagttgtggaagacatggcagcacttacctttgacagcaggcgtcgatcttgcaattctgcaatagttaatagtttctatgtgaacggaacattcaaggagcttctaaccaccttcgaagctaccagtcagttactttggacactacctttctcagtcccaactactggctcagaccaagcttcctctatcagtgaaaaggtgtctcacaattcatggctgctggatacattacagagttactgtaaattgctggaatattgtgtgaactcttcatttttattgtctccttctcataatcagcttcttgttcagcctatggtcactgaactgtccattaatctgttccctgtgccctcagagcctgaatcatttgttcgtattctgcaatctcaagttttggaagcagtcctacctgtttggaatcatacaatgttccccgagtgtagcccgtctcttatcacttccttgatctccattgttagccatatatgctctggtgttggtgctctaaaacaaagccgtgcaggtgttggagctgcgaaccagcgtcttacgagtccccctcttgatgagtcctctattgctacaattgttgagatgggattttcgcgagctagggcagaagaagccctaagaagtgtcagaactaacagtgtcgaaatggcaacagattggttgttcagccatccagaagagtttgttcaagaagatgtccagcttgcacaggcattagctttgtcacttggaaacaccactgaagcatccaaggaagatggttgcaataagaatggtccaagtgtcgttgaagataaaggtgtcatcttgcttcctttggatgacattcttgctgtatcaacaaagctcttctcttctggtgatgacatggctttcccattgactgatcttttagttacactgtgcaaccagaataagggagatgaccgtcagccggttatcttatatctttttgagcaacttaaacgttttccatcatattcttcagttgatgcaggcgcattatattcttttgcccgtttgctggccttacttctgagtgaagacagtagcattcgtgaaattggtgcagaaaatggcgtggtccctcatgttcttaatttattggaaaaccttaaatcaaggacagagaaaacagatcaaacttggaattctatcagtgctttgttgcttatattgg

SEQ ID NO: 25842 - DNA, 2774 bp, Oryza sativa
  ref <308>: DATABASE ACCESSION NUMBER: AK101284
  ref <309>: DATABASE ENTRY DATE: 2002-08-28
gggcagcctcttcctccggtgcgggccacgcgatgtcgccgccggcagcaggagggctcgccggagcccgcggcgagggcggcggagcaggggtggggagggtcttcgtgggcgctgggtgcaaccgcgtggtgaacaacgtctcctggggagcttgcggcctcgtcgccttcggcgcgcagaacgccgtcgcgctcttttcccctttgagaggtgagattgtgacgacgcttccggggcacaaggccacggtgaactgcaccctttggttgcccacgaagaaggatgtgctccaaatccgctccagggagagacactatctattatcaggaagttctgatggtattatcatggcatggaagattgattctggaaaaggagagtggactcgtgcgttgcaactgcctgtgatgcacaaaaaaggggtcacctgtcttgctggaaggatggtgtcagatactgtttcaatatttgcctccacctcctcagatggaactgtggtcatttggaaaatggaagatgaaccaactagtgttggcagctgtgaagtgtcttgtttgcattctatatccgttggtccaaagccaatggtttcactttcattagcagtattgcctgggcagggaggccatctcattttggcaatgggaggtttggatcacaaggtccacatttattgtggggatcagtcaggcaagttcattaaagcttgtcagcttaaaggtcattctgattggattagaagtttagacttctctttacctgtgatgatgggcagtgaggagcacagccttttccttgttagctcatctcaggatagaaccattcggatctggaaaatgaattcggatgctgtttcttctgctcacacaacacacagaaaggaagatattgggattgcctcctatattgaaggtcctttgtttgtgtccagtaatacacattaccaggtatcattggagtcccttctcgttggtcatgaggactgggtgtattctgtagaatggcagcctcctacgctactaactgatgatgaagctcatcagccaatgagcatattatctgcatccatggacaagatgatgatgatatggaagccagagaaaaataccggtctttggataaattcagtgactgttggtgagttaagtcactcagcactgggattctatggtggccattggcagcctgatggcaaatccatccttgcacatggatatggtggatcgtttcatatgtggagggatgttggactgggttctgaaaactggcagcctcagatagtcccatctggtcattttgcacctgtatctgacttaacatggtcaagatctggtgaatatctgttatcagtcagccatgatcagacaacacgcatatttgctccttggagaagccaagttagcccaggggatgtgacttgttggcgtgaaattgctcgccctcaaattcatgggcacgatattaactgtgtggcattcattcagggtaccgggaaccaccggttcgttagtggcgccgatgaaaaggtctctagagtctttgaagctcctttgtcatttttgaagacccttcaacatgcaactttgttgaaaactgataactctggagattttgacgatgtgcaagtacttggagcaaatatgtctgctcttggactttcacagaaacctatatatacacatggaccaagggaaacccaaagcagtatttctaatgacgggccagattccatggagaccattcctgatgcagtgccaactgtgttcactgagcctcctgtagaggatcaactagcctggaatactctatggcctgaaactcacaaactttatggccatggaaatgaactcttctccatctgctgtgatcatgaagggaagatcattgcatcatcttgcaaggctcaatcagcaccagttgctgagatctggctgtgggaggttggaacatggaaagctgttggccgcctgcaatctcacaacctgacagttacacagatggagttttctcgtgacaatgcttttcttttgagtgtatcaagggatcgtcatttgtctgtcttctcaatcaggaagacagatgatggagcagagcatcatcttgttgcaaagcttgaagcacacaaaagaattatatgggcatgctcatggaaccccttcagctacgaatttgcaactggatcaagggacaagaccgtcaagatatggagcgttcaagattcatcttctgtcaagctgctcgtgacgttgcctcagttccacgacagtgtgacagcattggcctggacaggccgtgaccgtgctagtaatgctggcattctcgctattggcatggacaacggaatgatcgagctctggaacatttcaggggggagagcctccactgacagcagcggctcaggttcatctccgctcagctttgcatgcatgctccgttttgatcctctgctgtgtcatgtatcaactgtgcaccgtttacggtggcagaaatctgactcatccgatgagaaatcagcgctacagttagcttcttgtggagctgatcattgtgtaagggtgtttgaggtccgtgacatttgagaaagttatatgatggtgtagagcttggctcatgagctgcatctagttcttgcagaacataggcttagacatctggatctcattgccaaacttttatatgtgatttggcagtgtttgtcttgccagtatcttcatagatgtgttgtactcctgtcccaaaagtataagcccttctagagttttttcttatgg

SEQ ID NO: 25843 - DNA, 895 bp, Oryza sativa
  ref <308>: DATABASE ACCESSION NUMBER: AK101285
  ref <309>: DATABASE ENTRY DATE: 2002-08-28
gattcactaattggaacttggtgttgggagtccccgtcgactcgcactcgacagtcgatcgccaacaagcccaaacccggagagagccggaggagatccgtcgtctcccgcatcctcaccggccgccggcgatggagaagggcaagggcctcgcccgccgctgggcggtggagctccacgacgcctcctcctcctcctcctcccactcctccatccccgacccgcccggcttcaccagatccgcccccgacgcggacgacgccgccggcgcgcggcagcggaaggattccgagaccgcgtggaaggcgcagaaagcgtgggaggtggcgcaggcgccgttcaagaacctgatgatgatgggtttcatgatgtggatggccgggagcaccgtccacctgtttagcataggtatcacgttctccgctctgtggcagcccatcagcgccctccgctctgttggcaaagtttttgaaccattcaaggacccaagggtggatactctagcacctaagttggtctttattgctctcaacttggcagctatgggtttaggtgtatggaagctcaatacgttgggtcttcttccaacaaatgcatcagattgggtgttttcactggctcctgctcgggaggttgaatatgctggtggagggatccccttgcactgaaacctttatgtgcttcagttagtacttattaaagttttaccacttggaagatggtgtctgtactaagcgaaaaattaccctgcagatgggacaagtctggtttttgtgaggatcatatttcagcacctgtactaaacttgcactatatcttgagacaagtaacttacaatttccttgaccccttttgtttacactggttatttatacagagtcagttgattcttagt

SEQ ID NO: 25844 - DNA, 1623 bp, Oryza sativa
  ref <308>: DATABASE ACCESSION NUMBER: AK101286
  ref <309>: DATABASE ENTRY DATE: 2002-08-28
ggctttgactggttgactccccgcctcctcttccctccgccgtctgatcgccctcagagtcgaccgttgctgtgggccccacccctcaccgccggaccccgccgccgccgtcgccgtcgactccccgccggcgtgcaacacatctactccaccatggctcccgcccactcccaccggcgtggtgcgacggaggcgaacgagcagatgaggaggaagaaggagaaggcgcttcgagagaaggaggccggcgacgacgacttcgacgagggacgctacaagcgcgccgtcgagcactacgcccgcgccgccgccctcgaccccggcgacatctccttcccgatcaagtgcgccaaatcctacttccacatggaccagtacgaggagtgcgtgaggcgatgcgacgaggcggtggagaggggaagggagctccgcgccaagaaatcgctggtggcgctggcgctgttgttgaaggggacagcgctgctcaatctcgccgactgcgcttcggattgcaaggcggcgatcagggcactgaagcagtcgctggatgagcattatcataaggggacagaggctatcctggacgaggcggagagcgccatggaggagatggaggagctggagaaggaagctgccaagcaccaccgagaaaaaggcaaagaacttctcagtaagaaaaagtacaaggaagcagcaatccagtttactaaagccataaaaaggaatccattgaatcccagaaattttagcgacagagctaaatgccgcatcgagctaaatgcattggctgaagggcttgaagatgcagataaatgcattgaggtagatcctactttttggaagggatatttttgtaaaggtgaagttcagttcttgatgcacaattatgaagatgctatgacaacttacctagacggtttgaaatatggcccccaaaaaacaacaatttatgatggaataaagagatgtttagaacaaattaaaatggctaaggaccgtgatgtcagggataaggacttgtgggaggcattcaaaaaatcgagttctagccaagtcgaaaaacttacgatgcagcgcgatgtcgtcactgtggagcttaagtcagccaaggagcgtaacgctaatctagaactgcaactctcagaacagataggccgtattgaacggcttctgtcgatccaaaacagtgaacctccacatttcatctgtcctatatctcaggaagtcatgaatgatcctcactttgcagcggatggacacacctatgaagctgagcatatcaggaaatggctcaacgatggacatgacacatctccaatgaccaacgagcgacttcaacataaaaaactcactcccaatcacgcactgcgctctgctattcgggagtggcaccaacaccgaaacatgaggcatacttctccgcggcgccaacagctttttttgtgaatttgtgtgaagcaagttgtaactatgaaaatttagccgcagttttgatccttgctacagagagagtgcttgccgcgacatggctagatcgcaatccacattttgtaaagaaccatcattaagatttagtactaagttatgtgacatcgtatttcagatattattcttgttatatgt

SEQ ID NO: 25845 - DNA, 1149 bp, Oryza sativa
  ref <308>: DATABASE ACCESSION NUMBER: AK101287
  ref <309>: DATABASE ENTRY DATE: 2002-08-28
gtgtagagtgttgtgaatagccagttcagttcatcagttgataggagccatgcttcaccattactacagcggcggcgccggccatcatcaggacgtcgctgcagctggtagccccggcgacatggcttcctccaccttctcgctcttcttcccgatgtccaatgggcagtgttggccgccgtcgacggtggaggagtccgcggcctacgacgaccacagcaccgtcaccacctctccttcctcgccttcgtcgtcctccaccggctccgtcgactgcacgctctcgctcggcacgccgtcgtctcgccgcgccgagcccgtcgcggcggcggcgccagcggcaaaccatggggcgcccgtgccggcgcattatccgtcgctgtcagcggcgaccgtgtcctgggacgcgactgccgagtcgtactattgtggccagcaggggaggccggccaccggcgccgccaagtgcgccgccggcgccgggcacgacgcgctcctcgaccgccgctgcgccaactgcggcaccgcgtccacgccgctctggaggaacggccctcgcggacccaagtcgctgtgcaacgcgtgcgggatcaggtacaagaaggaggagcggcgcgcggcggcgacgacgacgacggccgacggcgccgccggatgcggcttcatcaccgcgcagcgtggacgcgggtcgaccgcggccaaggcggcgcccgccgtgacgacgtgcggcgaggagacgtcaccgtacgtcgtcggcggcggcggcggcggcggcgaggtcgcggacgcggcgtatctcgcctggcggctcaacgtcgtcccaccggcggcgacggcgacggcgttctcggtgtggccggagcgagctagcctctaccactacaactagctataggcgattaactagtgtagcattagcgttggggagaagggaagctgcaccgtttttttggggaacattttgtacggtcgcacgctcccggattgatcgaactgtatgcatctgctgtgctgtgttgcacgctagctagctagatgactctgatcttgaaacgaaccgtgatcatttcattcatttggaatgaacatgtagctgtgcaaggtcatcttgctcggaaaattcataatcttccaatctcttgtgctgcc

SEQ ID NO: 25846 - DNA, 1298 bp, Oryza sativa
  ref <308>: DATABASE ACCESSION NUMBER: AK101288
  ref <309>: DATABASE ENTRY DATE: 2002-08-28
gggagctttcccccggcgaccacgtgctgccggtgttcaccggcgagtgcggcgactgccggcactgcctgtcggaggagagcaacctgtgcgacctcctccgcatcaacaccgaccgtggcgccatgatcggcgacggccagaccaggttcaccgccaggggagggcagccggtgtaccacttcctcggcacctccacgttcagcgagtacaccgtcgtccatgtcggctgcgtcgccaagatccacccagcggcgccgctcgacaaggtctgcgtcctcagctgtggcatctccaccggatttggcgcgactgtgaacgtcgccaagccaccgaaggggtgcacagtagccatattcggcctgggtgcagttggtcttgctgccatggaaggtgcaaggatctctggtgcttcacggattattggcgtcgatttgaacccggccaaattcgaactagctaagaagtttgggtgcacagactttgtgaacccaaaagattacgacaagcccgttcagcaggtgatcatcgagatgaccaacggcggcgtggaccgcagcgtggagtgcaccggcaacgccgccgccatgatctccgccttcgagtgcgtccacgacgggtggggagtggccgtgctggtgggcgtcgcgggcaaggacgcggcgttcaagacgcacccgaccaacttcctcaacgagaggacgctcaggggcacgttcttcggcaactacaagcctcgcaccgacctgaccggcgtcgtcgagatgtacatgaacaaggagctggagctggagaagttcatcacgcacagcgtgcccttctccgagatcaacacggcgttcgacctgatgctcagtggggagagcctccgctgcatcatcaggatggaggactagccatccagatcgatgtcgccgccggcgatcgacggcggcggcgactgtataaacggagaaaataagaggctaaaactacctatgctacagcaataagctagccacggttgcaggaatgcggtttcaggtttgttcatggagaacatgggtggacacaaattatatatactgtgaattttctgaaaatttacaagacaaatatgaaattgcgcaaattacgatagcggatagcctttggctcgatcaatttgagcctatatatgctggctccaccgctacactgtttgccgcctttctgtattgcgcatctgctctctctaatgtaatgtgcaatctatatataactaaattatgaaacataatgtgcaatctgtcaatctacattctggtatgaatttttgc

SEQ ID NO: 25847 - DNA, 685 bp, Oryza sativa
  ref <308>: DATABASE ACCESSION NUMBER: AK101289
  ref <309>: DATABASE ENTRY DATE: 2002-08-28
gagatcttctcctccgttggattgcgcacggcagaagggaatttctagggtttaggcagcgagcgtggtggggagcgatggctgcggcgggcgacgagtcggcggctgccgctgcggctgcggcggcggcggcgggcggtgccgccgcgggggaggcggcggttgactccaaggacctgcagcagcagagcaaggcgctggacaagctcaccgaccgcgtcgaggaccgccagctcgattcctcccgcgtccaatccgctatggcagctcttgcttcttccaaagaagctgattggaatgccatgagattgagggaaaaagaattagctgccatcaagatcaaccctgctgatgttgaaattatcgctaacgagcttgagttggacaagaagattgcagagagaacactacgggagcacaaaggcgatgctgtagctgcagtccggttcttgcttcgctgattcttacacattttgcaagatctatacaccatatgaagcagctgtagtttgctattgcttgctgctgagaggaatttctgtatccacaatgaaacgatcatatttggcatctatgtagaactttttttccatgatgttgcaaactggtctctgttgtcttcttgtaaaacttggttcactcaggagtttattgccgtttatccaaggtctttctataccttctc

SEQ ID NO: 25848 - DNA, 2465 bp, Oryza sativa
  ref <308>: DATABASE ACCESSION NUMBER: AK101290
  ref <309>: DATABASE ENTRY DATE: 2002-08-28
gagcggttcctcctctcatctcccctcttctctcttcctgtgggcgtgtgtcctgtgtcccccgggggatcggccgaggcgtccgtttgggttgggtcgattgatgcgtaggaggcaatggcggtgtcctcgccaacttctgctccggagaagaagaggaaatggctgctcagcaacaggaaggtgatcgacaagtacctgagggaggcgagggcgattcttgcgacggcgccggaagccggcggcggggacgccgtggcggccctcggcctagtagacgcggcgctggagctgtcgccgcggatggagtccgcactggagctccggggccgcgccctcctctcgctccggcggtacagggatgtggcggaaatgctgcgggattacatccccagctgcgccaagacatgctccggcgacgacaccttgtcgtcgtcgacatcgtcgtccctctcgtcgtccggctccggtgacctcggcacgatatcccgggccaaactcctctcgcctgaccgccaccgctccgacgcggcggccgaaccaggcgccgcagtcgcccgctcattccgctgcttcgacatctccgagctcaagcgccgcgttctcgccagcctctccaagaatcccaacacggacacccaatggaggtacttagttcttggccaagcttgcttccacctcgggctgatcgaggacgccatggtgcttctccagaccggacgccgcctcgcctccgcggcgttccgccgcgagagcgtgtgcctgtcggaggacagcttctcttcctcctccccggcggcagccgtggcgccgattccttcagggaacaccaccaaatccgggtcggcgttcatcataccggccatggagtcggaggccgtgtcccagctcctcgcgcacgtcaagctcctgctccgccggcgcacggctgccatggccgcgctcgacgctggcctcccggcggaggccgtccgccatttctccaagatcctagaggcgcgccgtggcgtgctgccgcacccgttcgccgccgcgtgcctcgttggccgcgccgccgcgttccaggccggtggccgccccgccgacgccatcgcggactgcaaccgtgcgctcgcgctcgaccccgcctacatcccggcgctccgcgcccgtgccgaccttcttcagtccgtgggtgcgcttgccgattgtctccgtgaccttgaccatctcaagctactctatgacgccgcgctccgggacgggaagcttccaggccccaggtggcgaccacagggtggcgtccggtaccgcgagatcgccggcgcgcaccgcaagcttaccgcgcgcatccaagggctccgcagccgtgtcgccgccggcgaggcgtgtaacatcgattactacgcgcttctgggtgttcgacgcggatgcacgcgctctgagctggaacgcgcgcacttgctgttgactctgaagctcaagcctgaccgcgccgtggtgttcggcgaacggctggagctggtggacgagcaccgtgacctggaggcggtgcgcgaccaggcgcgcatgtcagcgctgctgttgtacaggatgctccagaagggttattctttcatcatgtccgcggtaattgacgaggaagctgccgagaggcagagggcgagggaggcggctgccgccgctgctgccgcagcagcagcagcagccgcggctgcagcggcggctttggcggtcaagcaagaggccacaaagcaagaactggccgcgccaccaatgccggagaaaccgaggcagacggagagcgctccctgcgcgaaacgctccatggcatcgaaggccaaaccgaaggcaaagcccgctgcgaccgtgccatcaatgatgtccaggaaggcagcgaccacgacgaccacggcgaaggcggcgatgtccaaggcagcagtgaccgcgcccaaggcagcggcagcaacggcagtagcagcgaccgccgtggcggctgcggcgacggcagcatcgacgtcgacggcggcgccggtgtaccaaggggtgttctgccgcgacatggcggtggtggggaccctgctgtcacgcggcgggttcgtcgaccgcgccatgccggtgaagtgcgaggcgatgagttgctgacgggtgccagccatggcacggcgatccatcagcaggacgtcgccggcgcgatctgatgcggagtgtacggaccacgcggggatggatggaacagaagatccagcacggtggcgggaaaccggagagaagtttgaattgttcgatacatcttcgctattgtacagtttggggagaggggtacttgaaaaaaaaaattgaaccggaccattcagaaaaccagcaccaaaaaaaaaaaattcagagtggcaaggccaaattgttggcagggaggtgtggattggagggtaaatttttggttgcatcttctttaatgtgagttgttacagtgcagttagccctct

SEQ ID NO: 25849 - DNA, 1871 bp, Oryza sativa
  ref <308>: DATABASE ACCESSION NUMBER: AK101291
  ref <309>: DATABASE ENTRY DATE: 2002-08-28
gggtccatcacgagctcccctccccacacaccacctcactcccactacgagagaggaggaagctcgcaatcatcgaatcaatggcggttcgccgccggcgacccggccccgtggcggccgccgtgctgctgctactcgcggtggcgacccaggcggcggcgagcccgataaagacggtggtggtggtggtgatggagaaccggtcgttcgaccacatgctggggtggatgaagcggctgaacccggagatcgacggcgtgaccggcggcgagtggaacccgacgaacgccagcgacccgtcgtcggggcgcgtctacttcggcgagggcgccgagtacgtggacccagacccgggccactcgttccaggagatccggcagcagatattcgggtcggacgacgcgtcggggccggcgaggatggacggcttcgtgcagcaggcgcggtcgctgggggacaacatgacggcggccgtcatgaacggcttctcgccggacagcgtcgccgtgtaccgggagctcgtcggggagttcgcggtgttcgaccggtggttcgcgtccgtgccgtcgtcgacgcagcccaaccgactgttcgtgcactccgccacatccggcggcgccaccagcaacaacccagagctgctggcgaagggctacccgcagcgtacaatcttcgacaacgtgcacgacgccgggctgtcgttcggggtctactaccaggacgtgccggcggtgctcttctaccgcaacctgcggaagctcaagtacctgaccaagttccacccgttccacggcgcgttccgcgaccacgccgcccgcggctccctcccaaactacgccgtggtggagcagcactacatggactccaagtcccacccggccaacgacgaccacccgtcgcacgacgtcttccagggccagatgctcgtcaaggaggtgtacgagacgctccgcgccagcccgcagtggaaccagacgctcatggtcgtcacctacgacgagcacggcggcttctacgaccatgtccccacccccgtcaccggcgtccccagccccgacggcatcgtcggcccgccgccgtataacttcgcctttgatcgcctcggcgtccgtgtcccagccatcgtcatctccccctggatcaacaagggtacagttgttcatgggccaaacgggagcccaaccgcgacgtcggagtacgagcactcgtccatccccgcgaccgtgaagaaactcttcgatctgccacaggatttcctgactaaaagggacgcctgggctggaacgtttgagagtgtcgtgcaaggcagaactgagccaaggacggattgcccagagcaactcccaatgccgatgaggatacggctgacggaggcgaacgaggaggcgaagctgagtgagttccagcaggagctggttcagctggcgtcggtgctcaacggggaccaccagctgagcagcctgcaggacacgatcagggacaggatgaacgtcagggaaggcatcgcgtacatgcggggcgctgtaaagcgcttcttcgagaccggcatgtcagccaagaggatgggcgtcgacgacgagcagatcgtcaagatgaggccatcgctcaccaccaggacatcccctgcgatcgagcaaccatagaaatagaaacaagagcaatagaagcaaataaggatacaggtttattttatatgctgaaaaagaaaaaaaatcatggtgcttgcatatatgtagcagagccagcaaggagtgctttgttctagaattagttgagatctctcatggatcgatctatatacatggccgggctgtactgtacaaattgatgaaacgttaattattggcttagtatacagatcgatcgattgc

SEQ ID NO: 25850 - DNA, 2610 bp, Oryza sativa
  ref <308>: DATABASE ACCESSION NUMBER: AK101292
  ref <309>: DATABASE ENTRY DATE: 2002-08-28
tggtttcaccaccaaccttcgtctccgccgcctccgcctctctccttccccctcgttctccgcttccacccaaaccaaacccaaacccaacttgcgaaaccccaacgaatcccccccaaaacacccacccagtcaaacactccccaactccgatccccacccccatggcgtggagatcgaggtgctcgaggacaccaccaccacgatggccgcctccgccgcccccgtggcgcccgcgtccccatccccatcccccgccgccgctgccgacggcgaggagggggaggggccggcccctgcggcggaggacgactcgctgaagaacgacgtgtacacggcggcggcgtacggcgatctggagaagctgcagcggctagtggagggggagggccacccggtcacggagcccgacggcctcggctaccacgcgctccagtgggccgccctcaacaaccgcgtcgccgccgcgcagtacatcctcgagcatggagcagatgtaaatgctgtggaccacactgggcaaacagcacttcactggagtgctgtacgtggacacatccaagttgctgagcttcttctgaaagaaggagctaaggtggatgttgctgatttatacggttatcaggcaacacatgttgcagcgcagtatggccagacagcatttatttatcatattgttgcgaagtggaatgctgatccagatgtccctgataatgatggaagaagcccactgcactgggctgcttacaagggatttgcggattctatacgtctccttttgtatttggatgcttatagggggcggcaggataaagaaggttgtacccctttacattgggctgctattagggggaacctggaggcatgcactgtgctagttcaggctggcaaaaaggatgacttgatggtgaaggataagactggtctaactccagcacagcttgctgctgataagagtcatcggcaagttgcattttttcttgacaatgctaaaagggtatatgatagaggatgtgatgggaataccaattttggaaagctatcgaaactggggctagctcctgtactttggtgtattattgttggcttgcttgctacatatatacactctgttatatcaggtcaatatatcatggatatgacagcaccatttgggctgtttgcatggtcaggagttttccttgcaactgctggcctagtcatgttctataaatgtagcaggaaagatcctggctacatcaaagcaaatatacgagattcacaaaatcaaagggatgatgaacctttgttgaagttggagttagacaatcccgcacttctgtctggtaactggtcacagctttgtataacatgcaaaattgtgagacctgttcgttcgaagcattgttctacatgtgatcgctgtgttgagcagtttgaccatcactgtccttgggtatctaattgcattggcaagaagaacaaatgggaattcttcatgttcatcactctagaagtttttgcaatgatcattactggttctgctgccattataaggatggtaagagatccggcttctccagcatcctttattccttggctcagctattctgcttttaaccatactggggcactttcctttttcataatggacctcttccttttcttcggtgttgcagttctagcagtagtccaggcatctcagatagcgaagaacattacaacaaacgagatggcaaattccatgagatacagttatctaagaggtccaggtggaagattcagaaacccatttgaccatggagcgcgcaagaactgctcagaattcttgttaaatggatacaatgaggacattgaacgtcttgatcatacgtcacacactgatgaggaaatgggaatgatacagatgacaaacgcagtctctcagaatggcgagggcccttcccaccatggtaacggcactggccattcttgtgctgaatcacatgctcactcaaaatctcacagtcaagtaagttcatctcagtgttgtgaccacagtaagaaggccgatagaacaccattgggcctagggctgggccttggacgaaacagtgcttcccggcagtatgtccggtctcttctcccattgtgatttgttatatgcagatcatgtgtgtgctctctgtagattgtatgtgttcatgctgaggctccattatttatttagctgcttgtgacataccacataggtttcgctagcttacgttaatattgttggggtgctagctgtgtgaaaattcagatctattagatccagtattttttgtggtgaatacataggagatgaaggtagcaaggtgctcatgaatatccgctgatccgcagttcagaaatgtcttgtcgctcctgaaaagagggcaacaattttgtgcagatgcagcagcatgaaacatcttcattgctgtgtcccttggtgtcaatataactccagcattttagcttctggatcttacatctgtgggaaaatgtagttgtaaactaagataattgtaaatttattagcaaattctgaatttagatactcttgttgtgatctatagctgtactgacagtccagaaagttgtaataacaaaacaaatatctgaact

SEQ ID NO: 25851 - DNA, 1359 bp, Oryza sativa
  ref <308>: DATABASE ACCESSION NUMBER: AK101293
  ref <309>: DATABASE ENTRY DATE: 2002-08-28
gtatcctttctcgtccacacactcatgaatcatcgctcactcaaacagccttgcctcctcctgttgagttgacccgatcccatccggtgttatccatcccttccctgatcccccatccatcgccgccgccgccgccgccgtggagacgatgacgacgagacgaagaagaagctcgtcatcgacaccgacccgggaatcgatgacgccatggccatcttcgtggcgctgaggtcgccggaggtggagctgctgggcctcaccaccatcttcggcaacgtctacaccaccctcgccacccgcaacgccctccacctgctggaggctgttgggaggactgacatccccgtggcagagggatcccatgtaacaatcaagaaagccaccaagctacggattgcgagctttgttcatggctcggatggtctaggaaatcagaactttcctccgccaactgggaagcccttagatcaatcggccgccgcgtttcttgtcgagcaggcaaatctgtaccctggacaagttactgtggttgcccttggtccacttaccaacctagctttggctatagaacttgatccttctttcccgaagaagattgggcagattgtgatccttggtggtgcgtattcagttaatggaaatgtcaaccctgcagctgaggcaaatatatttggtgaccctgatgcagctgatatagttttcacctccggtgctgatattttggctgtgggaataaatattacacaccaagtagttctttctgatgctgaccgggaaaagcttgaacagtctgatagcaaatatgcccgatacttgagcaagatcctgggtctttattatgattaccacaaggacgcctacttcataaaaggagtgtatcttcacgatccagcaacacttattgctgcggtagatccgtcactgatgacttacacggaaggtgtagtgagggtgcagactgatggcatcacaaagggtctcacagttttcgacacaaccaagaaaaggtatggggagataactgcgtggaccggtaagccaaccgtgaaggttgctgtgaccgttgatgctcctgccgttgtggagatgatcatgcagaggcttacgacggatgattagcagcagcagcagcagcagcagcaagcaagcagccaagggaaaaacgctgcctttgtcttgttgaacctgtcggatcttataaagaatagacaatgctgtatatcctaaattctgaagaatttgctttacatgattcgtcgtcgaggttgatcaacatcacacagaactagctagaaacagcctgatgcactgattcagaggttgacaatccatttcaattttatggccagaattcatacc

SEQ ID NO: 25852 - DNA, 1272 bp, Oryza sativa
  ref <308>: DATABASE ACCESSION NUMBER: AK101294
  ref <309>: DATABASE ENTRY DATE: 2002-08-28
gatgaaaaaagaaaagagaaatctctatcaacttctttcccaaatagctctgttctatctctcgatctcaaattcttctcgaaactctagatcgaatcctggcgagacgccacagaaatctcagttcgtgacattttggtattagagcctcgatctcgctggcgaggaagaagggtccaaatcttacggagaggatggcggcggcggaaactgagttgggagatctgagtcagaaggtggtgaatctcacaagcaacctcaacaacatcctgggatcactcaccaagctggagacatggattccggcggttgatgtgggaattcaaggtttgaacaatgtggtggaggagatctcagcaagggtgacgaagctggagagcatgctagcgacggcgacgttcgcggcggctcaaacgcccgtaggacccgacaatgttgagaatcaccagggcaacgcatccaaagcccttgtggctcatgagcgaaccctggtcaagggtaagtctcggttgccgatttcccccgtcaatttcgatttgggtgaagcgtctgtgcagagtcagtttagcagtcgatccagtagccctagattgccaaaaactaatttcccaaggtttgatggagataacccaaaactgtggaagaagaactctgaaaaatactttgatatgtaccaagttccctatgatagttgggcaaattttgctactctgcactttgtgggtaatgctgcactgtggttgcaaacttatgaggctttgcatagtgttgagacttggcctgaactttgtgtagtagtgcataataagtttgggaaagataaatatcaggagcacttagaggagttagagagtcttaggcaaaccagtggggttgatgcatattatagcaaatttgaggagttgatgcacagagtcttagtgtataatcaggcttttgatgagacatattttgttaccaaatttgtgggtggccttaaaactgaaatcaaagcagcaatcaagctgcataaacctagaactgttgatgcggctttgtctcttgctaaaacgcaggaagatttggcgttggagataaagaaaggaggtcagaagtccacttataaggaaggatttaaatcaacagctttcagggtaaactaccaaggcaaaggtatactgggacaagctcctgatgacaccaccaagacagaagaaaagccaaagtgggaggattgctttgagtctctcaaggctgccagaaaagcaaagggagaatgttttaagtgtggtg

SEQ ID NO: 25853 - DNA, 1590 bp, Oryza sativa
  ref <308>: DATABASE ACCESSION NUMBER: AK101295
  ref <309>: DATABASE ENTRY DATE: 2002-08-28
gggcctcggcgcccgtttcctcgctacttcgccgcctgcgccgatctccattaatccatccatcccgcgagggggagcagcggggtaggggtgccgtcgtcctgccgcttccgcctccggactagggatcatgtcaggaagagatcgtctgccacgtcgctttatagaggatggcaggggctaccctgacatccgtgtagttgatgaacgtaggggctatcctgacatccgtgtagttgaggatcgtaggggctaccatggtattcgtgccattgaggatcataggggctatcctgacatccatgaaggccttgtcatgagggttgcacctcgctctcacacggctatgccggaggaagaaattgagattcagggggccgaattcaggaggcttatggcagatcaccgtgctcttgctgaagaacgtttggccttacaccgggaattacaagctggaaaagatgaggtccgtcacttgaacacgatcattgcagacatcagtgccaagaaggaaacttatatcggtgagcttgttgacaaaaggaggaaacttgaagctgaacttagagcaaatgagtctttaagagatgagattgtgcagcttcggggtgaaattgataagcaccttgtagtcaggaaagagctctctgcgaagtctgcatctatcatgcatgaactaaccagggaacaatctaataaacagcagattcctatgttgaaagcagagattgatgcccttcgacaggaacttgttcatgcaaggtctgcatgtgaattagagcagaaaggaaattttcagttggttgaacagaagaaagcaatggagaagaatatgatttcgatggcacaagaaattgaacaaatgcgagcagaattagctaattccgaagggagaccatgggccccaggtgcgacatatgggatgaagctgggcagccctgaagtgaccttccctacttcatatggagataactacaatatccatgtgggaggttccgagaaaggtcattcacatcttcctgaatcaagctcatggggtacatatgacaacaatcgccttcagtaccgttaagatcgcagctgctatgaaaaaagcctcatctataaaatcccttgtgcattctccaactcgcaactacacaaacaccgtgccaacaaatggagagaggcggagcggcggcggctgccggcggtggcgtggtggtgtcgccgtcggcggcgaaggattcgtggccggagttggtcggcgtgtcgtcggaggcggcgaagacgaagatcggagaggagaggccggagttggacgtgcaggtggtccccgccgacgccttcgtcaccacggactacaacgccggccgtgtcagggtcttcgtcgactcggacgacaaggtcgccagacctcccaagatcggctaagctagctgtgccctaatatttaattttaaaccctttgtattttgcatgaacaatagaaacagaaaataattaagccagtgcgagtagtatgatcactgtttcactatagcaataagacgagtaatatgtattcccgctataaatgacatatgcatcgtatgattactattgttttcg

SEQ ID NO: 25854 - DNA, 2777 bp, Oryza sativa
  ref <308>: DATABASE ACCESSION NUMBER: AK101296
  ref <309>: DATABASE ENTRY DATE: 2002-08-28
gagtcgcctcgccacccgaacgttggcagccacgcagcaccagcggcctcctcgctctcctcgccgaccacaccgcaaacacctggcgagcgccaccacctagacgccgctgccgccgccgcctcccacacttggcggccatgtcgcggcgcagggcggccgctgtggcggcggcggcgcgggaggaggaggaggcgtcgcccgctcagcgtctcgtggaggctgccctacggggggacgtggtgaccatggaggcgtgcctggcggccgccgccgccgctgccgcagcggacgacgacacggacgatggcgtgcccgcggcgagccgcgtcggggtggcgcgcctgcgggtgaggtgcgctgaggtggccctccgcgaggaggcggccggggaggtgatcgtggagtcccgcgagctcaagaccgacgtctcgccgctcttcgccgccgcgcacgccggtcatgccgaagttgttcgcaccctcctggttgctggagctgatgttaatcaaaagttatttctaggctatgcaacaacagctgccgcacgcgaaggaaacatccatattctagagatgcttctgcaggctggagtcactcgggaagcttgtgaagattccctatcagaggctgctctttttgctgaggctgaagccgttcggctattagtctgttcagagatgatacagcctgaagctgcagcacatgctttggtgactgcttcttcaagaggctttgatgatgttgtggtcatactactgcagaatggggttgacgttaattccatggctagggtcctcttgaggtctgttaagcctgcactacatgctaatgtgaattgcactccactggtggcagcagtaatgagccggcaaatttcaactgtgaaactcttgattgaggaaggctcttacttggactgtcttgtgcaagttggttcttggtgttgggactctgcaacgggtgaagaacttcgtgttggtgcatgccttggggaaaaatacaacgccatttggtgtgcagtagagtactacgaatgcagtggtgaaatcctcaaattgctgctcgataaagcaccatggttgctggaaaccccacgcaagggtcgaaatcttctttgccatgccatactctgtcagaacccgaatgcagtaagcgtgcttctaaatgctggtgccaatcccagatttcccataatgatgacaaacggcacacacgtctcctacccaatacattttgctgcaaggttgggtcatgcgcccgtactgaaacaactcatgttggatggggctaatatcaatgcgcagacttctactggggacactcctctgatggtctctgcgaggtgtggacactccgattgctttcttgaactgatcaaatcaggggcagaccttgggatagtgaacaatgcaggtgacacagcaataatgcttgctaagaaaagctcatttagctcaaccatcatcgacattctttccagagcattgagttgcggaggctgcatcacttcatcggatatcaccgtcttctctccgctgcacttcttcgctgcaagtgacagtgcagaagctcttctaatgacgctacactactcagcagcagatctgaacaggcctgatggttcagggctcactcctgttatggttgctgcagagtcaggccatgctgacattttcaggcttctagtgatggcgggggcagatatcgctgccacgagtgccgaagggaaatccgcgatgtcgatcatccgaagcagagctcctgaaaccagagatcggttcgaacagatcttactccaggcttcgctcgcggatgcgatcgcaggccagcagccatctttcagacccctgcactacgcggcccggatcggcgacacctcctccctgacgcagctcctgaagatgggccacgatcccaacgcgatggacgaggatggctacacgccgctgatgcacgcggccgccgcaggcaagctggaggcgtgcagggcgctggtgtcgcgcggcggcgccgccgacgcggggagcgagacggcgctgtcggtggcgaggaggagcggcaggtcgaacaaggcgacggaggagtggctgctggaccacgtggcgcgcgcccacgtgctcgccggggaggagctgacgaagcacacgcgcgggggccggggtccgccgcaccgcaaggcggtgcggatgatgcggtccggcgtgctgacgtgggggcgacccgccggaggaacgtggcctgcagggaggcccgggcggggcccagcgcggcgttcaggaggaacaggaggatcatcaggacgggcagcgaggagcagctgatcctaatggtggagacggtgaccgggagggagatccacttcgaggccacctccgcgtccagcgtcgagctatgggtcagaggcatcaatctcatcgtgcaagactgcgcgtggtcaaggccggatgaagctgagcaagcatagtcatatcactcgtatccataatggaggagactgcccactgtctgcaagacgccttgcaattatttcatattgtaagtatgcattttgctctctaagttaatatgtttactatcttgtttagcgcttgtaaattaactatttattagctgtttgtacaaaggacgtatttataatgccccccttggcgtgttttgagtccagaggttcaggtttgaggtggggagccttgaaatgagaatggctttttttttttttttacatgtaatgaccttaaattatatttgtgaatgtatatacacgttattttttc

SEQ ID NO: 25855 - DNA, 2913 bp, Oryza sativa
  ref <308>: DATABASE ACCESSION NUMBER: AK101297
  ref <309>: DATABASE ENTRY DATE: 2002-08-28
ggctgcgactgcatttcaaatttttcggggactcatccccattcccacctcctcctcccccaccaagctcgcttccgattcgcttccatggcggcctccgaccacgcacgcgcatagagggtgcgcaggctgcccccgaggcctgccgggccgcagcgcccgccgctcgttgggaaccctagcgcgccgcccatctgcacctccggcgagatgcctgtgggccccgccgcagccgacgccgctgacgatggagaggagggataatttccttcagccccctgccgccgccgccgccccagccgccggcggcggaaagggcctcccggtccccgccacaggggacgcgacgaacctgacctcgtcgtcgagctccacctcctccctcacgctgtcccctccggacttcctgcgtcaggttcaggccgcgctgaagcggcataggcctaccggttcgatgcagtccaatcaaccacgagcaacccgagtcctggtgtcccgaggtgagggctcaacgaaagctgttgccaacccttctgtggcacaaaatccggaaggcaaggttatgcagcagaggagaggcctgctgggggcttacaggttgcgaaatgcagctcctgatcagaacaaagctgttgtctcaagtcaagacgaattgttgttgactacgcctttgacattgggaactatcactgatacccatgatcagaatggtggtcagaaccaccagccgaaaagtgacactgatctcttggtggataggaagaaatcgtcaatggaagtttcttcctcccagatggcatccgcaaatgcattggtaggggaagatttcaaaaaagacctattctatttgactagcgatccgcagttaacttctcagagagataattttcctgtcgctcaagtagcagatgatcaaggcaagaaccacaaggagattgggattgctagtgcagcagttgagatggatatcaagtatgatgcagctaacttgtcccgaagaattgatgaggcttgtgatcagaatcatggagagccaatgactcgttgctctgccatgggttcatcagtgactgctgtatctttatattcagggcctactattcaaagtaaaagtgctgctcagattgatcaatatgcttcaccagctcagatgccacaatgtggcagagaatcatctggtgtatcaggtcatggctctcaaaaactgcatggagtggcaatgaatcatgctgattgcaataccaacaaacagcaggttgataccaatggtgggatggacaaacctgtttctagtagtgcagtttgtttgccatcccaagggttatctgggaatgatcaatctttgtctgccaaggatgatggtgctcctagacgaagcaaggttgaaaaggagtgtcgcaaaaagaattatgatccggatgtattctttaaagtgaatggaaaactttatcagaagctaggtaaaatagggtctggaggcagcagtgaagttcacaaagttatatcagccgagtgtacaatatatgccctgaaaaaaataaaacttaaaggtcgggactaccctactgcctatggcttttgccaagaaattgagtacctaaacaagttgaaaggaaagagtaatatcatacagttgattgattatgaggtcactgataaaagtttgcttcaagatgattcgctgtcacccagagatgggagaattaaggatgatcactacatttatatggtccttgagtatggtgaaattgatttagctaatatggttgctcaggagtggaagaagaggaacacctcaaatatgaaaatagatgaaaattggctacgtttttattggcagcaaatgcttaaagctgtcaatacaatacatgaggaacggatagtgcactccgatttgaagcctgcaaattttttgcttgtgaggggtgcactgaaacttattgactttggcattgctaaagcaataatgaatgataccacaaacattcaacgtgattctcagattggaacactgaactatatgtcacctgaagcattcatgtgcaatgagcaggactcgggtggtaatgttatcaagtgtggacgtccatctgatatttggtctcttggttgtattctttaccagatggtgtatggtaagacaccatttgctgattacaagaatttctgggccaagtttaaagttgttactgataagaaccacaagatcaagtatgaaccggtagataatccatggcttattgatttaatgcaacgatgccttgcatgggaccgaaatgatcgatggagaatacctcaattgcttgagcacccgttccttgttcctttggttccaagggatttaccttcaattgaccaagacccgtgtaggttgctgatggagagggttagagttcactgggccaatcccaagcttcatagttttattgcagagctcgagaaggatcaatgccgtccagccactcaaatgtaagagagctttacattgatagaatgtggatatgcgatgcgtatgtccagttatgctagaagcatcttactgatacacaacaaggggacaagctgactatagctaacgttatagcttatctgattattgaaattgcctactatattcatatatatttggttattaggaagcttgctactgtgtgccgtcagaaggtgggacatctttttatcacgcaagattttcctcagatgatgtattcctgttactgcttgaactaggaggtaggcagaaccttaagtagcacaagtgatttagtatctgtatcgcttggttcctttgaatttattgttgtaatctgtaaatagtacttgcatgagtaggaaactgggagcatttttttgtggtgcccttggcattgtacgctccatatttgcgtgagtaggaaacttggaagttgatgc

SEQ ID NO: 25856 - DNA, 1515 bp, Oryza sativa
  ref <308>: DATABASE ACCESSION NUMBER: AK101298
  ref <309>: DATABASE ENTRY DATE: 2002-08-28
gacttctcctcttggacttcccactctcctcctcgtctcctccctctctccctctctctctctctctctctctctctctctctctctctctcctccccgtcgcggcggcggcggcggcgaccggcgagggcgacgccaccgatcgggggcctctcacccgctcccctccctcactcaccggggcctcggtttcgccagctcggagggagttctttctctctctccgtagacgtctccgtgggttcttgcttgtctctgattcttcttgtggattggcggtggaggagcggggatcgatcgatctacccctggactcggattgactctcctctctcgctgggctatgagagacggaattttagttttaaacggcagctatttcatagcctggagtaagctttttcattcaggatagcatggggggctgctgttgctgttcatcaagaggatctgagacagatagagcaccagttcatatctatcgtcagcaaaatcaagaggagcatgaaccattgtcttcagcctatgatggatcatctccagcttctgctatagttgctgttgacacaaatctggatacatccactcctgatacttaccgagcaccacctgcaccattgccttatgatgttagtttgccagtcccagaaaaccctgatttggagaagtcagacctgaagagcaaaaccgatgaccaacaggaggaatctttagaggtggatgagttcaaatcatgtgaaaaatgtgtcgctgaagataagcctgatgaggaggatgtttgcccaatctgtcttgaagaatatgatgcagaaaatcctcgctctttaactaaatgtgagcatcatttccatctttgttgcatacttgaatggatggagcgaagtgatacctgcccagtttgtgaccagattactttgatagatgatatgtatgaatagcattggagcatgggactattatgtttggtttgatgctagtttgttttaatgaggaagtacagtcagcaaagctcctgatctatcaacctggtcagacgggggtgctattggaatgaattttgagaaaactaagggaaaataattgaagacgggaatggcttgaaatttgttaaatatcatctcagctttttacattttgtttgaagcattaactgttcatgacaacaggaggatttgttagtatccatatctactgctggttcgattgcttcacagttgatgaaacccccagatgagctatctgtttctttgtagttttgaacttgggatgtcttccatttcatttctggttgcggttagcgtctgtataaatcatgacacgttagataggtgacagggaaaaaaaactttattctaatttatgttcaacgatcaaagctgtacaagcttcatgtatatccttcgccttttgattagtcagggactattaagtcccctgttgtgaaacaagttggctgatttatgtaaaatggtatacatttgcctgctttataatctcggcatcttttttgggtcc

SEQ ID NO: 25857 - DNA, 2658 bp, Oryza sativa
  ref <308>: DATABASE ACCESSION NUMBER: AK101299
  ref <309>: DATABASE ENTRY DATE: 2002-08-28
ggtctcctcctcttctcccctcccccctcgcgtctgtggcggctatcttcgtgtccctctccctcctcctccccctctcctagggtttatccaccaccacctatcgcctctacctaccacaagaattttttttaccatctatattccacccctgccttctttgccccccgtacctcctggaattttcgccttcttgggatccaatccgcgaggagggaaagaaggcgggtttagatcgaactgggacggagggaggaggaggaggaggaaccatggcggccgttgctcctggcgctggcgaccaggctactgacatgatgcagaagctgtcgttggagagcaagaaggaaggcgccacccctgacgctaccaagaagcctgccgggatgccctatggatctgcaagcgccggcgatgcgcagaatgcggcgtcgccggtggacaggtcgatcactcccctgctccaggaggccgtgaatgccaacatcttgtatcagaccaatggatatggaccctcagcatattactatcctactggttatgacggctcagccaatgaatgggactccagatatgctgcccatgatggaacggagatgcctcctagtgtttatggtgacatgtatggatatggctatgctccctatggcccatatccttctggttctcctgtcccaactgttgggcatgatggccagtcatacggcgcacagcattaccagtaccctggtcaatattatcagcaaccagctccaaccaatgcaagccatggcgtcaatgctgtcaattctcagtctgagatgccctctgttgctgctcaccaggcacgtgttccggttgaatcagcaaaagctagtgccaatgggactgctaatgggatggcaaatactaacagtagttcattagcacgtaagcaaacccatcaaaatgtatcagtattaaacaatggttcatatggaggagggactttgcaaggtggaccatctgctaacaattatggtcacagtggtcttcattctccagttcagtggtatgatgggccagtctactctaatgggcatcagagatcaaatactaattccacatcttatggttctaactcgtattcagcaaaaaatcagagccagcgcccaactgcaaacctcatgggtatgcatgcacagataccttcgtcgggaatgggtttgacatctcctagttatcataccaggatgtacccagacaacagattatatgggcagtatggtcagtatgggaacgcacttaaaactgggcttggtttcggatcaaatatgtacaactccagaaataatggacggtggggaattgttgatagcaagtacaagcctagaggtcgtgcatcttttggttttggcagtgagaaccaagatggcttcactgagcttaacagaggaccaagatctggaggattcaagcaccaaaaacagtttggaccttctgtcactattgctgtgaagggccaagccctcccctcagtcgggaaacaggagaatagtgccattccagataagggccaattcaaccaggaaggttttccagtaacatacaaagatgcaaagttctttgttatcaaatcttacagtgaggatgatgtgcacaaaagtataaaatacaatgtgtgggcaagcactcctaatggaaacaagaagctggatgctggataccgtgaagcgcaggagaaatccagtgaatgcccagtcttcttgttcttctctgtaaacacaagtggccagtttgttggtgttgctgaaatggttggtcctgttgattttgagaagacagtggattattggcaacaagacaggtggaatgggtgttttccaatcaagtggcatgttgtcaaggatgtacccaacaacatcttgaagcacattacattggataacaacgacaataagcctgtgacaaacagccgtgacacacaagaggttaagcttgagcaaggtcttgaaatgctcaagattttcaaggaccacatcagcaagacatcaatcttggatgattttggtttttacgagaaccggcaaaagctgatgcaggagaagagagctaagcagcaactgcttcaaggacagggctctcttgacaatgcttcacatgaaaaggagaagaatgcaattgatgggaaatccacagctcagaagcaggcattgagcaaggagggcacccctattgtcggcgaaatgctgaacgcctcaaaatctgcagttgaaagcagtgtaacaaatggcaattagcgcgatatattttctgcgttaattgccacagccgagcagtcagattgtgcaaattctgaaggttcgcggcgtggctgagcgatagctacttgggttgggacttggcaactaaatttcgtaacagactttctataggcttggtgcctggggagtgggtcagttcttactttgattttagctcgtgtgactggttttttgcgtcgttaggtctcatatattactcttatgacatcgggttttatgtaacccttatcctttttgttttttttagccttttcatctattgttattgttagcgaagcatccaaatttcgataaatctgaacaacagtaaggtagttttccgagttttgcagcactggagaaggtaataagacaagaactctggttttggttggtc

SEQ ID NO: 25858 - DNA, 1087 bp, Oryza sativa
  ref <308>: DATABASE ACCESSION NUMBER: AK101300
  ref <309>: DATABASE ENTRY DATE: 2002-08-28
gcgcaaccaaccaccctcaacctctcctctctgctccgctccgctccgtcctcccgttgattcgctcgccgcgccgcgccccgcccgcgcgctgagatccgaacggccgcccttcccccccgccgagatcgatctccacccccccacgaccgctaagacggcgccgacgaggcgggagccatggaggcgtcttcttgggacgcccttcgcaagcaggcaaggaggttggaagctcagttagatgatcaaatgattgcataccgtaaattggtgtctatgaaatcagatggttcagagaatgatatcgagtctgatatagaaagatcactgaagcagcttcagcaagaaaattctcaaatgcaaacttgggtatcatcaggaggctctgaagttctttctcacacattgacccgtcatatggagattttgcaagatcttactcaggaattctatcggcttcgatcaagcctcagagtgaagcaacaacatgcttcgctccttgacctaagagattttgacagagcaaagtttgatgttgagagtggagactcagccgatcaagctcttcttagagaacaagctgcaatcagtaggagttctggacagatggataatgtgatatcacatgctcaagcaacgctaggaactctcatgtcacaacgatcaacatttggtggcatcactacaaagataagcaatgttagtagccggcttcctacgatcaatcatatcctcgcgtcaattagaagaaagaagtcgatggacacaatcattctttcacttgtcgcgtctgtctgcgcctttcttattctcgtctactggttgtcaaagtaggggctgtcaacttgtcatagcaaaggcattagggtgttgtaagtttggatcacactgtcagtgcagataatcgagattggtgtttgtacaatattgattcaatgttatcctgttttgatggttcttcaggcattgcgcctctcactgcacagccgcatgacttctagtatcgactggacccatatactacatgtacttgtacatgaatacgtgtgatttcctgaatgaagattagtttggcatttctccctgc

SEQ ID NO: 25859 - DNA, 2717 bp, Oryza sativa
  ref <308>: DATABASE ACCESSION NUMBER: AK101301
  ref <309>: DATABASE ENTRY DATE: 2002-08-28
ggcttccgcctctcctcgcctcctcccttcctttcccccccaaaccctagaattcccccccacaaaaccctagaattcgcgcgatcgaggcggctatggcggcggccgcggatgggcttccgccgggcgtcaggttcgaccccgccgacgacgagctcgtctcccgctacctgctccggcgcctccggaagcagcccatcccgctccacggcgtcatccacgaggcggatcccctcggcgcgccgccatggatgctcctcgccgctcacggccggggcggcgacgaggccttcttcttcgccgaggcgcgcgccaagaacgtcagggggaagcggcagaagcgtaccgtcgagggtggggggttctggcaggggcagcgggtgtgcatcgacggcgagaggctgcgcgtccccggcgacggcggcggcggcgaagtcggcggggaattggagatcgagtggcggaagtacatgctgagcttcttcgccgagggggagaggggcagctcggggtgggtgatgcacgagtacgccatcacggcgcccgctgacctcgcctcgtcgccgatccggctttaccgcgtccggttcagcggccacggcaagaagcgcaagcgggagccggaacgcctgggcgcccgcgtccacgacgacgacgtcgacggtggagaacgcgccgcgccccggcgcgccgtggcagagaccgccctgttcgtgcagcagtcgagcgccgtggattgcgccgaatccgccgatcagagcttctccggcgtgatcgagcctgtgttccacgatctccccgacatgatgccagagcaagctgatgccggagacactgcagagactacagcagcggtggtgaacctcacggacgccatgaccgagcagcccgttcttccgctagcagcagatggcgacgatcagagctcctacggtgtcatcgatccggcgttccgcgatcttgctgacctgatggtcctgccacctgtgctcgcgcagcaggagcctccgctcgcgcccgtggcaatggtggatctccctcctggcaatgctgattgcgccgatcatcagagctgctctggcgtgatcgacccggcgttccgtgatctccccgacatgaccgtgctgccaccagagcaagctgacaccggaggcggagcagagactaccacagcaatggtgagcctcacggacaagctgaaatactcctcctccatggacggcgaggcagcgccggcgtggtgtgatttcgattttccagagagcactgatgaggtgctcagctacatgaacttcaccgccggtgcccacgacaacaatgacggcagtgtgggacgcgccgcgccatggcgtcccgtgtcagagatcgccatgttcgagcagccgagcgccgtggatctccctcctggcgatgctgattgcactgaatccgccgatcagagcttctccggcgtgatcgagccggtgttccatgatctccccgacatgatccgtgagcaagctgatgccggagacaccgcagagactactgcagcggtggtgaaccagaactactccatggcgttgtgtgatttcgacagcggcattgacttcaccgccggcgcccacgacagcggcatggaacgcgccacgccctggactcccatgtcagaggccgccctgttcgagcagcaagggcctccgctcgctcccgcggcagtggtggatctccctcctggcaatgctgattgtgccgatcatcagagctcctacggtgacatgatcgtcctgccatcagagcaagctggcgccggaggcggagcagagactaccgaggccctgttcgaccagcccgttccgccgcttgcagcagattgcgccaatcagggctcctacggcgtgatcgacccggtgttccgcgatctcgccgacttgatcgttctgccaccagagcaggccgacgccatggacggcgaggcggcgccggcgtggtgtgatttcgattttccggagaacattgatgaggcgctcagctacgtcgacttcaccgccggcgcccacgctgacaacgacggtggcgtgtcagagaccgccatgttcgagcagccggggtctccgccacagcacgatcctctgctgatggatgctgatggcgccgatcagagctcctcctccggcgcgctgatcgacacggtgttcggtgatcacgccgaaccgatcgtcctgccactggagcaagctgacaccggaggtggtgcagcagcggcggtgaaactcatggacaagcagaagtactcctcctcctccatggatggcgaggaggcgccggcgtggtgtgattcggatttcccggagagcattgacgaggtgctcagctatgtcgacttcagcaccgatggcgcgagctgcgacttctccatggacgagctcttcgatcttgcagattagttagcatcctggagatagcaagccaccaagaacactggcattgacattgtctttctaagaagagctgtaatcagtagcgcaaaggcgagatttgttgatattctggtgtaatctgtagactagaggcagagtagatagatgttccttagtttattgactaatctatgcatagatgagttatttgtttattgattgaactcaatgtaagtaacattattgtaagtaatgaatatactcccttttcaatcattatattccctattcaaaatcaatatactgcattgatctgcc

SEQ ID NO: 25860 - DNA, 2796 bp, Oryza sativa
  ref <308>: DATABASE ACCESSION NUMBER: AK101302
  ref <309>: DATABASE ENTRY DATE: 2002-08-28
ggtctccacagccacatcctctctcgcaccggaggaccggacgtgcgctaggtgttccgtttccggacgcgtgaacggtgaattgggcgcgcgatcgcggtgcttacgcgtgtggggttagttggatttgtgggtttaaccggttgatctgtcaaggcgcggggagagcgcaccacgtgagcacgcgatcgaaccctacgcgtgtgcgcttgtcgagtgcctgattggtacgcattccagtccagtattcagatgaggtgatcggaacctttactgagggttacgagggcgcttcaatcaattgatgaatagcgagcgctcgtggggaattggtctcacgggataggtagaatcaattttttaggcaaaatgcacatagaaactgcggagggtgtttagatatgtcttccaggtatctccattgcccggaggcccagacattacctgtgcgttttgctgcatgtacgttcggcttcagttgtcagtttgagcaatggtgaacgttctcgttagcatggtttttatggcagagtaggttggttcctgtgtaatgcacaagcgaatagtctagaaatgcctagtgcttactacatgtcatcctgttgctagttgcaacgtgcaacctgtcagctctgaattcttctgatcaccatagtccatgtgtggctctatatatgggctctgcacatgtacgctccatgctgatactgtcaaccattgccatgcagactgagcatgctctcagctttcaaggaacgtggaaagcagactgttgagcagggagtatatatcatgtgttaccttttttctttggggtgtgtgtgtgagtacagttcaacgagcttgcttcaccttcgtctggttgcgtgtgcgcgcgcacacgctatgtccactatgtttgcaggtaacaaacacctttggcaatgtggtgttcgcaggtaacatatattttcccctcgcaagcaaaatttttaaaagaagctaatggctagttttcagcactagtatcaggtttttctttctgcatgcggattgctttttggcaatttttttaagaactgagccttttagcaattctcgccctgctttcggcaaccattgtcaaagtaacaattttgtaacttgtacccctgtttatcttaatgaaatttggtcggccttgctggccgacctggcaaaaaaatatatttccccctccagttgttaaaaatcttaagatactagcagcatgttcttttgaattgtatttataggtttttattttatttttcgttgcatacaaggctagttctctatacatattagaaatggtcagttcgtttcctgcaatgtttttgttttatggtggaatatttgatggacaggattggcctatctcacttcctatctcaaagcgaagaagcacaattcctgcatattctctaaaaacagtaagaagataggataggtggggggtgaccacacaaaaacaacccagtaattagctagagctaagctgctcccaaaaaaaaaaattgtgccatcctcttattattccgtatgtgcattagaatttattatttgacacatactaattccttttgtcattgtcatattgtcaatgaaacatttaaacaccacattaatgtctccccatcctaagattttgttttcagttgcattgtcatttagatataatcactcctatgggtttttgcagtcctgttagaagctcttcttgctagtttattctgcttgactgcttgtaagttgatttgttgaatgcttcattgaagattctttctgaaaatgtaatcataacttaattgttccatcttcgccgcaaaaaagaagaagaagaaaacattggattgttccatctattttgattgcgttatgacttctaggcaactacaatatatatattcttcagtaattttgcaatatagtacaaaagatatagctatatataagtttactttacaaggcaaaatttgtgtacactttcaatttgaatgcagttttgtgtcctcaatgtaaatttccaatctattataataaaaatgtgcttgatgcttttaaaaagaaagtttctgtttcatgggaattcatgtacccaatatcgaatgccctgtgttgcaatgatttgaaaattgctactaaaatcattaccgtagtatacaaagttctacaaacctgcaattcaatatcaagtttgatctagaagtaaaggaaaaaagaagacaagaaccaatgtgaatggttcatcatgtcccaagtacaacttgccttgtttggatcttgacgtgtgggatgaatctggcattcattttcctttttgcatgtctgtacaactttatgtatacttcactcatgattattgaatactgcaaatgttggatttcactatttctgcaacggggatgtagccacatgtgcagggcacagaaatgtttagttttggttgttattgcgacctatgttctccaatacatgttgtttcctattatgccaagttgactgggttaattagtgtcaactctgaatacagaaaggttgttttgttgcttcatcaattttgtgaagctcatgtacatacttcggtaattcaacaatcctatgtaactgagcctagcttggtggaaggtcagcatctccaccctccacaacacctgggtttgacctcgctttgagcttaggttccttttttcttcttagtggagaaaatcctaatttctcttatgtattctttcttgcattgagattcctgaatacctgttgatagttttatttatagttggcaaatttgactgaacc

SEQ ID NO: 25861 - DNA, 2964 bp, Oryza sativa
  ref <308>: DATABASE ACCESSION NUMBER: AK101303
  ref <309>: DATABASE ENTRY DATE: 2002-08-28
ggccgccaccattctcccctccgccgcaaaaccctagctcccaaacccctcgccgccgccgccatgatcaccggcggccagagctacgtctccgcgccgccggccttctcggccgacgggcgtctcctcctcgcctgcaccggccgcaccgtctccgtcttcagcgcctccaccggcatgctggtgtcggagctggaggggcacgagggggacgtcacggcggtggtggtggcgccgccgccggtggcggcggcggcgaagctcgcgagctactgctggacggcggggcttgacgggtttctggtttactgggacttcgcggcggcggagctggtgcggaaggtccaggtcggcctccccgtgcactccatggtcattcctaacatagccagaatatcgagaggagctgaaatttacacgccgtttgcattcgtctctgttgaagacaccagtaagccatctaatgagaaattgcgcgggcagttgcgaatttatgacttaaccaaagggcgtcaagtgggtagtcttctggctgagacccgtaaaccggaaatgattgttgcaagtagctctggtgaatttttgggtattacaaataagagaaagctccatgtatggaggataccaacaaaaaatttcaagcccgacaagataaggaagataaagcttagccacacaaaaaacttgaacacactggccttccatccaagtgagagaattgttgctagtggtgatgcaacggggcgaatactgatctggagaggttttggaaatgcaaagttttctggatcagatggcacaaaatctgaactagatgaagacaggggtgatgtgaggggtaatggtgatgcagatacttgcactacatggcattggcattcaagcggagtgaggtttctcaaattttctactgatggagcttacttgttctcaggtggtatggagggagttattgttgtatggcaactagatactgggaagagaagatataaaccacgtctagggtctcctcttttgtcctttgtagattctccggattcttccattgcctgtgtgtcatgtatgaataaccaagtccatcttctaaaaatgcccaacatggaggtcatgaaatctattgctggaattaagctacctatatcttcaccaaacctgggtggttgttatcgagatgtgtatggatttgattacagtaacaaacttgttgctgtgccaacagaagattattgcatacagttctacgatttatttgagaatactgaagtttcagaggtgcaagtttgtgagaggaactttcaccctgttgatgatatcacaatgtacatttccttagtttcattgtcaattgatggtaagtttatgtgcaccattgatgtcaagcttcctgaagaagaattaggtgggcttgttacattgaaattttggaaccaagggtctcgtgctggacaatattttttgtccactgtcatttatgagccgcacagcgatgctggaatttctgctattgctttccgccctggaaaaaacatggctgtgagctcttcatttggtggcaactttaaggtttgggtccaaagtatgctttcacaaccaagtgatgaaaaaaatcaatctggttggagatgccaatccgtcggctcatacaagaataaacctatgacagccgcaactttctcaagcgatggatctgttcttgcggttgcagctgagaatgtcgtcacattgtgggatcctgataataacacacttgttggtgtgattgcagaggcactatcgcccatcacaaaactttcgttcattgggacatcaccatttttgatgtctctatctcagagctccaaaccacaggttgccatgtggaatgttccaaatctttccatgcaatggtcttacagcctctttgcagaagctgcgtgttgctcgtcaagtagaagtgagtttgcagttcttgctcttctaagctgtcctgatggagaaacactggcagagcaagatggggtgatactacttttcgatgcagaaaatccaaagcctgtttcttcctggtcagtaaagaaggcaaggggaggcagcgttgcttttttgaagggtgattcctctttggatgcaaacagaaaagacaggatagatggagaggcatcatcgctggtttatgtcaacggttctcatgagtatgttatatttgatccccgaagcaatgaagaattgcatattggcaagagtgcacacaaaaatattcaaactgaggagcctggaccaattggttatgcttctatttttggagaacttccgaaactggagtcaaagaaagatgttccagaaattctatttataccgtcagagagaccttgggagactatattcagtggatcaactcatgttcttccgcctctcacaaagttatgtcctgcattcttggcatcattgcttgagaagagaccagttgcaaatgtgtgagaaagtgccgaagttttgtcccgtcatacaatgcaacaaggaaccctgctagttacaaatggcattgcacatgaaatccttatgactagtgctgcccgaagctcgtccaatactgctgaagctggttgtgggcattgattatctgtcagctcagctcacaagagaacacatgcgatgatggctacagcaacgctgttgggtgaatgagccaccctacctctttttgtaggtgatatctagtgatctatcttcagatcctagcaaattttgtttccataggctaatctgtaattctgatagcaaaaactagctctttttggtgaaaatgtaacgcgctaagatatccagtaacacggtgagtgaatgatgctgttttactgactctgaatgaagtgtgtgttgatctggtaaactgaaaactcgatgcttctttcagagtttcagttgtctgttgcttgcatacatgatggaatacttttttcttctagaactctataacaaccaggc

SEQ ID NO: 25862 - DNA, 3876 bp, Oryza sativa
  ref <308>: DATABASE ACCESSION NUMBER: AK101304
  ref <309>: DATABASE ENTRY DATE: 2002-08-28
ggccttccgccggccgccgcctccgagcgccgccggttgcctcctcccaccctcccacctcactcctcctccggttatccctcctcctcttccgccctcgcgcatcgctcgtcctccggttgctccccgggagggcctgctcctacccctggcggtctctggcctgagtgcgtgcgtcccagctgccgctgccggaggaggcgttgacggcggcgacggcgatgtgcgcccggtggcgttttgcgaggacgccgtctccccgtgcacgtacttcttcgccttctccgatggccacgccacggaaagcctccactcaagaaatgttgacatgggaagcagtaatactggaacgtcacttttggagctgatattgttgtggggaaacaggttagcaatcattttcttggaagtcggaagtagtattcatgtcaactaaattgcgtcaagtattgagcaatgctacatgatgaacatcaagtcttctgaggattgttcagagcttgagacaacataacaactgaaactgaaaaggcattgctccagtgagtttcagacaaagcagagcaactgaaactgactgcttcagtatcctctgagatatgaatccctgattgtgtgtagcttgtcggccgcctcctgcatgctgatgcgcttgcttggggctgaatcggtgcagcagagtccaatgttcaacacagaaagaacacattgtgctccattttcatcgttaatgactgaatcttctttgcagaggctcaactcttgtactagctgaggatcaacaatctgcagcatcttatcagggatgttcatctctgtgaactttgcaatgctcaatccatccttgaacatgtcgtctgtgggcctcctccttatgaatatctcgaggagaacaactccgaagctgtatacatctgcagcagttgaaatttgtccacctccggcacattctacagattgcatgtaggaagagtttatttcaaatgctccaataaatagacaaatgatgaaaccattatattaatcacttaataagaaaacacagtgtgaagtggaccacatgtacctggagcaacatatcctacggttccatttatcgcaaatgaagaggtcaaatgtgagttaccaaacgattgtctggaatcatttttgaaccttgcaagcccaaagtctccgacatgagctgtcatattatcatccaaaagaatattggtgggcttgatatcacaatggataattgtcccttgatggttgtggtgtaggtaagccaatgcatcagaaacattgaccacaatgcttaacctttgagctagtgaaatatagcacagatctgaagatgtttcgtcgtgtggagttgagtacaacaatttatgcaagtctcctcgtggcatgaattcatataccagtgctttgaagtcatttccacttgaatcaatgcttgagcacgccgtcaagacaggaaccagattgcgatgccgcacatttctcaaagcattacactctgcaatgaagctcttttgtgctccctttgtctctagactgaagactttgatagcaactacattcatgtcttgaaataactgtccttggtatacagaaccatatcttccttcgccaatcaaattggatgttgagaacccattagttgctctggcaagatctttataagaaactttgggaaattctctaccaaatgagggcaaagatatcgagtttgtcctttgttttcccttccaaatcaaatacaggaccaatatcactacggcaagtgtcaccatgctagctaatgggatcactactttcagtagtactggtagcttgcctttagttgtatttgaaggtgtgataggacattcaggtaagtgtaactccagtgcacctccacaaagagccaaatttccatcaatttgcatggaagttgaattcttgaagattcctttagttgggacctgacctgtaagatggttgaatgacaaatctatctgttcaaggagttgaaggtcaccaagtgacactggtattgatccacttaacttattgtgtgacaggttgagaaattttaggctaattaatttgccgaacgaggtgggaatacctccactaaaattattttggtcaagctcaacatgttgcaaattttcacagttactcaaagtattaggtatatctcctgacagattattggatgaaagctgcaaatatatgagctgcttggcattccctatttctgtaggaagttctccactgagattgtttaatgcaaacccaacttccgctattgttggaatcctgaagatctcctttggcacaccaccatgaagattgttatcagtaatggtgattgttgttaggaactgaaggtttccaaagcttaaggtatgtttccaatgaactgatttgtgtctagaagaatctctgtcaagtgtgacagattggaaagggaggagggaagataccctgtaaaactgttggtagacaagcttagtttctgcaatgtcttcagacctcctagccattgtggtacagaacctgaaaatcggttgtaatctagtccaagaattatcaggttgggaagatttgcaatgcctgaaggaaaactccctgacaattgattctgtcccaagaaaagatactgtagctgaactgaaaaattgcctaatgaacctggtacctctccttccatttgattcctcgctatagagattccttgtagctgagtacaattggctacgctatccatgaactcccagtcttgcttgctacgagcatggagctggttcatctcaagatttaaccttgtaagattggcaagcttgccaatggaggcaggtacaaccccagtaaagttattttcagatatatcaatcttgaccagattggaagcattcgccaacgaagaagggatgtctccatgaaagaagttgatgccaatggcaatctgcctaagattgggcagcaagctaccgatgcccgatggcagctcaccactgaagctgttcgtgctgaggctaagcgcaaccagcaccgacatgttcaggatcgcctctggaaacccacctaacagccggttgctgctggcgtagaggatctccaccccacttagcgtcgctagctcaccggggatgctgccggtgatgccattgaacgcgaagctgagcttcctcagcgccgtgatgttgctgagcgagggagggattgtcccgacaagtctgttcgacgagagctgtaattcctgaaggccaagaggcaggccgccagggaatcctccggcgagatcattgtgatccagccatagcaccgtgagctcagagcagttggcgaagctcggtatgatcccctgcagcgtgttgttgctcaggtagagtgaccggagacgacgcaggtggccgagagattcaggaatctgtccgtgaacccattcgtcgctagtgacagattcctcaggaatgtcaggttgccaagtgaaggagagatgtggccaaccaggccttgattcctaagatcaatggcggtgacgcgaggtgggttcttggagctgcatgagatgccttcccagctgcagaagtgggtgctgtcattccaggagatgagagattgatgtggattgagagtgatcgagttcttgaattcaagcagtgacagtcgatccgtttcgtttctgagagttgaacagatgactgaatgggagatggaggccaagaacacccagaggaaatgtgcagttgcagtggtaaccttcatgatgacctagttttgtagaattttgatggaccttgtacatagaaacagaggaaaaaaatatccagatattcagaaaacgttgtaaaatgttcagacatgcaatgagtggcaactaaggtacctggattgtttagc

SEQ ID NO: 25863 - DNA, 992 bp, Oryza sativa
  ref <308>: DATABASE ACCESSION NUMBER: AK101305
  ref <309>: DATABASE ENTRY DATE: 2002-08-28
gtccgtgcaacgtcgagccgcgccaccagcatctatggctgcggcgctcgccaccgtcgtgtctttcctgctcgtcgtcctcgtctccgtcgcccacggctggaacaaagactgcccgcctcccggtagcggcagcagcggcggcggccaccacggcaagccgcccggtagcggcagcggcggcggcggtcaccacggcaagccgcccgagcaccaccaccaccacaaacctcccccgtctccccggtgcccgtcgtgccacccgccctacacgccgccgacgccacggccgccgccaactccgccgtacgttccatctccaccaccatacgtgccaccctacatcccgccgccgacgccgccatacgttccaccctacatcccgccgccgacgccgccgtacgtcccgccgccgacgccgccgtctcctccgccatacgtgccgccgccgacgccgccgtcgccgccgccgtacgtgccgccgccgagcccgccggcgacgaagacgtgcccgatcgacgcgctgaagctgaacgcgtgcgtggacgtgctgggggggctgatccacctggtgatcgggcagaaggcgagggcgaagtgctgcccgctggtgcagggcgtggcggacctggacgccgcgctctgcctctgcaccaccatccgcgcgcgcctcctcaacatcaacatctacctccccgtcgcgctcgagctgctcatcacctgcggcaagcacccgcctcccggcttcaagtgccccccgctctacggcgcctgaactgaacaaacgaagcagcagctagcaaagcttcgtcgtcgtcgtcaatggcggaggctactatactacaccctcgctagctagctatactgtgctacctttactctctcgatcgtactcgtgtctgcgatttgtgttgtattaatgtactacctccggttttaatccaagtgtagtttaattaattaatccacgagaaaagatccgacttatgacc

SEQ ID NO: 25864 - DNA, 1908 bp, Oryza sativa
  ref <308>: DATABASE ACCESSION NUMBER: AK101306
  ref <309>: DATABASE ENTRY DATE: 2002-08-28
gggagaggcaacggaggcgtggttgagggattccggcgtggagcggcgccgggagaggggagaagcggcggcggcggcggcggcggcatggccatcgagtgcctcgtgctaggggcggggcaggaggtggggaagagctgcgtggtggtcaccttcggcggcgggaagcgcgtcatgttcgactgcggcatgcacatgggccaccgcgacagccgccgctacccggacttcgaccgcctcctcgccgacggcgccgccgactacaccgccgccatctcctgcgtcgtcatcacccacttccatttggatcatatcggagcactgccgtacttcaccgaggtctgcggttaccacggtccagtttacatgacgtacccgacaaaggctttagctccattgatgctggaagactatcggaaagtaatggtagatcatagaggagaggaagagcaatatagctatgaagacatcctacgctgtatgaggaaagttataccattggacctgaagcagaccattcaagtagataaggacctttcgatccgtgcctattatgctggacatgttctaggggctgcaatgatatatgcaaaagttggagatgctgctattgtgtacactggagattacaatatgacaccagataggcagccttggagcagcgcaaattgatcgtctgaagttagatctgttgataacagaatcaacatatgctaaaactgtgcgtgactcgaagcatgcccgagagagggagttcttaaaagcagtccataagtgtgtttctggaggtggtaaagttctaattccagcatttgctcttggaagagcacaggagctatgcatactactggatgactattgggaaaggatgaacctgaagattcctatttatttctcagctggtttaaccattcaagccaacatgtactacaaaatgcttattggatggactagccaaaagatcaagaacagctacacagttcataacccatttgacttcaagcatgtttgccactttgagcgttctttcattaacaatcctggtccatgtgtgctttttgcaacacctggtatgattagtggtggattttcccttgaagtgtttaagaaatgggctccatcagaaaaaaatctggttacacttcctggatattgtgttgctggaaccattggccataagttgatgtctggaaacacctaccaggattgacatagacaaggacacccatattgatgtcagatgtcagatccatcaactgtcattcagtcctcatacagactcaaaggggatcatggatcttactgaatttctttctcccagtcatgtaattctagttcatggcgaaaaacctcagatggcttttcttgaaggagcggatcgaatccgagttggggatgcaatgctgttacccagctaacaacgagaccgtctctattccgacatcccagaacttgaaaataaacgccacggagaagttcattgtgagcttctgcatggatgaaactgaaaatgatccgcagaagcagaacctgaattttggtggcgacatgccacaaggctgcaggactgaaggagtagctgagggcgttcttctgatggagaagtccaagactccgaagattttgcgcgaggacctgcttcactcgctgggcatggaaacgcattttgtccattttgaaccactgcatccgtccagcattgaggtaaaacatactggtgagtccgcggtgcagcagagcagtttagaacatttagactgcgagtgaaatgaatgaacaattcttcttttcaactactctcgactttggagacttttgagaggtatagccagaaggggaagagttgtgtagttagactgttggaaaaaaagaacacttttcatccgtcaattgttattttggtggatt

SEQ ID NO: 25865 - DNA, 889 bp, Oryza sativa
  ref <308>: DATABASE ACCESSION NUMBER: AK101307
  ref <309>: DATABASE ENTRY DATE: 2002-08-28
tatggttagaatttcctgatgacaaagagacatataataatggtgaggcttttatggttgggccaagccttttagcacaaggaatttatgaagagggccagaaatcagtgtcagtgtaccttcctggagaggagttatggtatgacttgagaaatggatctccatacaagggtggtgtgtcacacaagctagaagtttcagaagatagcattcccagtttccaaagggcaggcgcaattgtgccaagaaaggatagattcaggcgcagttctactcagatggtgaatgatccatataccctggtgatagcgctcaatagctcaagtgcggcagaaggcgagctttatgtggatgatgggaagagttatgattatcagcaaggggcattcatccatcgtcgttttgtatttgcagacaataagctaacttccatgaatatcgcacccaaaaatcttggaaacaagaaattttcgaccgagtgcgtgattgaaagaattataatccttggggtatcatcgggatcaaagaaggctattgttgaacctggaaatcatgaagtggatattgaattggggcctattagtctacgaagcggttcgagctctgttgcaccaacagtacgaaagcccaatgttcgagttgtagatgattggactataaggatagcatgagatatatccattcacatctgaagcctgatgcttattttcatcgctctcaggtcataaaattaggctagaagcgtagtgctgccttgctcaatgtggtctgtggaagcgcaaaattttatattttgatggcctcaaagatttaccatgtaactggtacgcgtgctgtttttactatctacttcaaattttgatataatttgagacagaaattgctgatg

SEQ ID NO: 25866 - DNA, 2251 bp, Oryza sativa
  ref <308>: DATABASE ACCESSION NUMBER: AK101308
  ref <309>: DATABASE ENTRY DATE: 2002-08-28
gtcggcgtcggcgtcggcgtcgctcctcctccagctacaggaccacatcgccagcggccacctctcccgcgctcaccacctgttcgatcaaatccccagcccggacgttcgcacctacaacgacctcatccgagcctactcctcctcctcaccgaccgccgctgcggatggcctccacctataccgccgtatgctccgccaccgcgtcgcccctaacaactacaccttccccttcgccctcaaggcctgctctgcgctggccgaccaccactgcggccgcgccatccaccgccacgccatccacgcgggcctccaggccgaccttttcgtctccaccgccctcctcgacatgtacgtcaagtgcgcttgcctacccgacgccgcccacatcttcgccaccatgcccgccagggatctcgtcgcctggaacgccatgcttgccggctacgcgcaccatggcatgtaccaccacgcggttgctcacctcctcagcatgcagatgcagatgcatcggctcaggcccaacgcctacaccctcgtggcgctccttccgctccttgcccagcagggggcgctcgcccagggcaccagcgtccacgcctactgcattcgtgcctgcctccaccccaaccgcaacagcaagagcaagctgacggacggggtgctcctcggcaccgcgctcctggatatgtacgcaaagtgcgggagcctgctctatgctcgcagggtgttcgatgccatgcctgccaggaacgaggtcacctggagcgcacttatcggaggctttgtgctgtgcagcagaatgacccaggccttccttctgttcaaggccatgctagcccagggcctctgctttctttctcccacttccattgccagtgctctcagggcctgcgcctccctcgaccatctccgtatgggtgaacagctgcatgctttgcttgctaaatctggtgtccacgccgacttgactgcagggaactcacttctctcgatgtacgccaaggctggcttgattgaccaggcaatagctttgtttgatgagatggccgtcaaggacactgtctcctacagtgcgcttgtatcagggtatgtgcagaatggcagggcagaggaggcgttccttgtcttcaagaagatgcaggcatgcaatgtagaaccagatgctgcaacaatggtctcgctcatcccagcttgctcacacctggcggctttgcagcatggaaggtgcagtcatggttctgtcataatccgtggactcgcatcagagacttctatatgcaacgcgttaatagatatgtacgcaaagtgtgggcggatcgatctctccaggcaggttttcaacatgatgccatctcgggatattgtgtcatggaatactatgattgcaggatatggaatccatggactagggaaagaagccactgcattgttcttagagatgaataatctaggttttccaccagatggtgtcacattcatctgcttactttcggcttgcagccattctggacttgtgattgaagggaagcactggtttcatgtgatgggacacgggtatggtctaactcccaggatggagcactatatctgcatggttgatcttttgtcaagaggtggtttcctcgatgaagcctacgaatttatccagagcatgccactgagagcagatgttcgtgtgtgggtagccttgcttggagcttgccgggtttataagaacattgatttaggaaagaaggtgtcaaggatgatccaggagctagggcccgagggcaccggcaactttgttttgctgtccaacatatacagcgctgctgggagattcgatgaggcggcggaggttcggataatacagaaggtacagggttttaagaagagtccaggctgcagttggattgagataaacggctccctacatgcatttgttgggggagaccaatctcatccacaatcacctgaaatatatcgagagctggataacattctagtaggtattaagaaactgggttaccagcccgataccagttttgttttgcaagatctggaggaagaggaaaaggagaaggcactcatctgtcatagtgagaagctagctatagcctatggtatcctgagtcttagtgaagataagaccatttttgttactaagaatctccgcgtttgtggggactgtcatactgtaatcaagcacataagcttagtgaagcgcagggctatcattgtacgagatgctaataggttccatcatttc

SEQ ID NO: 25867 - DNA, 957 bp, Oryza sativa
  ref <308>: DATABASE ACCESSION NUMBER: AK101309
  ref <309>: DATABASE ENTRY DATE: 2002-08-28
ggttcgatccaagaagcagagaggagagggattcttgttttcttgatcatccatggcgcggctgcggcgtggtctcgaacacctggggcggcggtacgcgttctacgcggcgtaccactccaacccggcgaacgtgctcgtccacgccgtgtgcgtgtggcccatcctcctcaccgcgatgctcccgctccggtacgcgccgccgctgccgctgctccgattctactgcccgctctgccgccagtacctccccgtgcagctcggcttccccgtcgccgtcgcgctgggcgcgtactacgcgctcatggaccgccgcgcgggcgccgccgccgcggcgctctgcgtcgccgggtgggccgccgggacgctcctcgccgacgccgcggggctctggacgttccgcgacgcgtggaggccgctgctcaccgcgcaggccgtgctctggtccgcccagttcttctcccacgccttcttcgagaagcggcggccggcgctggtggatggcccggtgcaggcggtggtgacggcgccgctgttcgtcttcatcgaggtaattggccgtgttcgttcgagttggtcgccgtgcggcgatggcgaccgccaagtgttcgatttaatgcgagtgcggttgctccgtgtttttgcaggtgctgcataggttgttcgggtacgagccgacgccggggttctacaagcgcgtccaggcgagggtggcggcgatgcacaacgggccgccggcaccggcgccggcgccggagaagaaggaggaggaggagaaggagaacgtgagcaaggcgacgcaggaggagagcgccgagaaggattcgtaggtgttttcgagggagagtgtgacagacaggagaggcagagctcgggatgttatgaacttgtaatagcttgttcatgtatagtagtagtataataataatactaagaaaataaatgagtttaattttc

SEQ ID NO: 25868 - DNA, 2550 bp, Oryza sativa
  ref <308>: DATABASE ACCESSION NUMBER: AK101310
  ref <309>: DATABASE ENTRY DATE: 2002-08-28
gacgcctcactgcccaccgccgccgccgtcaccaccgggcgcggccgccgccaccatgagagccctcatctccctctccaagctcacccgccgcctcctcccctccctcgccgtcgcccgcgccccactcccgcccctccgccgctgcctccacgcggaacccccaccgcctcctcatcacgcgccgccccccgtcgcctcccggatcctacagtccgagctgaccccgggcgcgggcgcggacgcggacgcggagcaagaacagcagccggcccccgaccccttgctcgacgagttcctcgcgcgcttcgtcgccgcgctgcggccgaccctcgccgcggcgttccccacccatgcccgccacgtgctcgacgagatgctccgcctcgtggcggaggccgtcctgtgccgcctcaccggggtcgagccggaggagggcggcgccgtcgagctcagcgacgacctctgggcggcggtgtgggaggtcagcgccgccgtgcgcgacgggatgcagcgggaccgggtccgcgccgagctccggggctacctccactgcgaggaggtgaaggagatgacgcggttcgcgtcggacgtcggcatccgcggcgagatgctccgcgagctccgcttcaagtgggcacgggagaagctcgaggaggtcgagttctaccggggcctcgacgacatgcgcgcccaggccgaggcggccgctaaccctgtcgcgctcccgccgcccaggctcgcagccttgccgcagaggaagggggagatcaagttcaagatacatgggttggacttgtcggacccaacgtggggtgaggttgtggagcgcgcggccgaggctgaagcgcattttgtgccacaggaggccaagccaatagaagggaaggcgaagaaggctgaggagaagctgatggcggttgatccgaggaaaggagacccggcgcctgccatggaagagtggaaggaggagctgctgccgaaacgtgccgactggatggcgctgctcgagcgtcttaaagcccgcaatgttgagttgtatctcaaggttgctgaaattctgctggctgatgaatcctttggtgcaaccattcgtgattactctaagttaatcgatcttcactctaaagcaaatcatgtggaagacgcagaaaggattctaggtaaaatgaaagagaatggtattgcacctgatgtcgtcacatccatcactttagtccacatgtattgcaaggtggggaatcttgaacaagccaatcaggcatttcaattccttaagggggaaggcttcccaccagatatgaagcttttcacgtcaatgatcagagctcatcttaagtctggagaaccaaaacaagcagaaaatttgttacgtgaaatggagagatcgatcaaacccacaaaggaactattcatggatgtaatcctggcatttgctcagcgtggcatgatagatggagccgaaagggtgaaaacatcgatgttacttgctggattccagctcacgccagagttatacacatcacttatagaagcatatggacggggtggtcacgttggccaagcatataccctgtttgagcagatgaggagttctggacatgaaccagatgatcgttgcgttgctggtatgatggttgcctacatgatgaagaaccaactggaccacgctctgagcttcctgttgaagttagagaaggatggacttaaacctggagttaaaacaaaccttgtcttgctggattggttgtctaggttgcagctagtgcaggaggctgaacaagttgtgcagaagattagaaaggctggagaggaacccctggaaatgcatgttttccttgctgatatgtacgcaaagtcacaacaggaagagagaacccgcaaatccctcaagattttagaggagaagaagaaattattgaaggcttatcattttgagaggattatagcaggccttctcgaagggggtttcacggaagaagccaataaatatttcaaaatgatgaaatcccatggctttgttccatcaccaacaattgagattggggtcaaggctagttttggggttagggggggtgttcatccaactggtaggcatcgtggttaaggctttgtccgttggcagtgatcagctgccattcaggcactgattctggtttgaaaatcttgaagtagcactgacgacgccatagccaattctgtcaactgaagcggcaaaaaaaatttccggcttcaattggttttgtttgatctgatatcagatgtcttcattttgaagatgcctccatgaactatggattcatacaagtagatggccgcttgtcctgttattgccgggattttttttcctcatcaattgtacttgcatgctcacacttaataagtcttttagtcactgtaacgcctggatatctaggttgtgcttgtgccaacaatcggatttatcttagcaaatatcagttatgacttacctgtcataggcatttgtcaccaaataaatgtttacattttaatgaacaatgaaattatatcacactgtcaaattggtgc

SEQ ID NO: 25869 - DNA, 1390 bp, Oryza sativa
  ref <308>: DATABASE ACCESSION NUMBER: AK101311
  ref <309>: DATABASE ENTRY DATE: 2002-08-28
ggccgggcagaggcaaaggggagaacgagcaggcgacgacggcgcccagccccatcggttcctggtaaggatggccgccgccgtctcgttggcgagccctttccggcgagtccttcacgtccctttcgcacgccgcgctatccccacatcgtaccacttcttccctagcggacggtgtcacgcggctctctccttcgccgcggcagcagcaggagattcggcggttaaggcgagcttggataggaatgcagccgaggaactcaggagcatcctggatatggcacaaagggcttcccaacggagagatgttttccacaccaattttcttactccacctatagtgaaggagtgcatgctggcaattgagaagttagcagacatcaaagcggtagcacaggggggctacccacaggctgagcgatgccgagtttcagttggacatccggactgtatgacaagcaacccagatgtagttgctgctttgagcatctcagggaatttcagattggaaccctgttctcatggtgactttcttggtgctattcttggggcaggaataacaagggataaagttggagatatacttttgcagggagagagaggtgctcaggtccttgttgatcctgaacttgttgactatctgacttccacacttgaaaaggtggggaaagttggagtttcatgcacacagattcctttgcttgctctagaatatgaaccaccaaggaccaagtcatttaaaactgtagaatcatcactcagggttgatgccctgggtagtgcaggatttaaaatctcacgtacaaagcttgctagcttgatcagtgctggggatgtccgtgtgaattggtcaccagtttcgaaaaatggagtgactctcaaggctggggatgttgtttctgtcagtgggatggggagattaaagattggggaaattgtgactacgaggaaaggaaagtacgcagttgagctgattcgatatttgtaggtttgcaagggataaatggatctctcaagattactgactcaaatgaacggactcaaatccttttttaactgcaacttccgtgagggcttgttctgctctgagaccaaaaaacaaggtttgtgttttaaaaccagaaggagtttcgcaaattcattacctaactttgcctactgcataacgtagcctattctatattcatatgatcaagtgctaccatggccaaccatgaaacatgtgacttcgattatgacaagatggaggcaagctgtttattgggaaaactgatgacgactagtcatatattcagcgcccttttaatgctaaaaagcttgacaaatgacaacggctattctttgtatcacaaaactatcacaattcacaagattcagtttttcaagttgc

SEQ ID NO: 25870 - DNA, 2783 bp, Oryza sativa
  ref <308>: DATABASE ACCESSION NUMBER: AK101312
  ref <309>: DATABASE ENTRY DATE: 2002-08-28
ggttatgttccgtttcttccagctttggtgctctctcaactctgaagaagaagaggttttctctgtctaggagggagagattgtgcagcgaggtttctttctctcactaggaggtttgaggttgctgggagtggttacgaagctaattaggagctttgccgctttggttgagtttcttggtgagaggtgaggagagcgtgagcgagctcgctctcagtctcacgccttttgtgttgtgttgtggaggaggagaaaggaggcggttttttgttgtttctgtcagcgttttctcgtcaggtacagcctactatacttctttcgagttcatataccgtgctgctctcgaattcggaagcccttttttttctgctatcttgcgaagctcctgtgtgcaaagtcgaaaaagtttgccgaagatgaagtcttgctgaagctgccctgctttgcagctgcagtttcttgtcagtttccatggatgagtagcatgaacaagacgcgagcagaaaatggcatcttcaaccagtggaggaactcgagctcacccatttgatcctgttccttgagcattctatctcccaaaggagcaatcgcttctcctctttccatggagatgatggcgagcaagaaccctaccaaaaccctcctcctcctgctcctcctcgtcttcttcctctcgctggcttgctcccagccgctccactcggagcccatgtccaccaccaccaccgccacccagcccgcgccaccgcctcccccgccgcaatccaagattccccacgcggaggccggcggcgccgcccgcctccgccgcatcgtgctcggcgtcctcttcggctccctcactggcttcctcctctccctcgccttcctctacgccatccgcgtcgccatcctccacgccaagtacgccccggcaatcgtcaggggccccgtctccttcaccccgcagatttcccccaagaacctccactccgcgctcccctccgcgcagccgctcgcccatggccccaacggcaagtattacaagctggttcttgacaacgatgtcaccgtcgccgtcaagcggctcgaggctagccgccctgaggcctcgccgtcgtcgatgcccaatgtttccaagtctgacatgaggagggtgcagaggcagctggagttgctagctcgggtgaggcaccagaatgtgatgggattgaaggcgtatgtccgggaagccgaccggctatcgctggcgtacgatttcgtgcccgggggcagccttgaggatgtgatgaagagggtgaggtctctgcaggtgaacctcaattgggatgcaaggaacaggattgcgattggagtggccaagggattgaggtacttgcattttgagtgcaccccccggatactgcattgcagcctcaagccgtcgaatgtgatgctagatgaagatttcgaaccgagattggcagattgcggcgtttcaaggctaattgcatcaggttcagctgatccagaactggccagcagcctttattctgccccagagtgctaccaaagcagcagatacacagataagagcgatgtctacagttttggcatgatccttggcgtgttgctaactgggagagacccaacagatcattttttctcgggagaaaccgggcgcggtggattagctagatggcttcggcacatgcaacaatctggtgacgcaaaagacgcactggatagtagtgtcttaggagaggaaggggaagaagatgagatggtgatggctgttagggttgctatcatctgtctctcagatttaccagccgatcggccatccagtgatgaactagtccccatgctcacccagctccacagcttatgatctccgtcgaacgcttcttcgtaaagtactaatctctggatgttcttcatccatggcacagtttctgaatcatgctggagggtcaaaactcaaaaccctggatgcacaaactagtgtagctttcagtgtattcccttggaagagcccatgctaaatggcccacatgggaggggagctaacagttttcagaggccaatgtaggaaggaaatctggtaggtcttactagttcagttgtcagttatgttgtgtgttgcagctacatgctggtggttgagtgagcctcattgtcatgtgatgcttctttgcccttacatgatttggaggaggtaggcaaggaagatgtgaatattgtggtgtctttgtagagagaaagctgtctttttcttggatctattgcagacctgcagtggtggtggtatgatgatgtgcttctgcattgaccgatccatcaattctatcatgtactagcagtacatcggctccaccccttgcccatgacttgctgcaggagtgtcggggtccaaacaccattttgatggcatttttctcttcagttcacatgctcgcctgtccaacagcattttgatggccatgtatcatgcacagtcacattttgtgtaaaatgtaagggcctgtttggagagtttttggcagctgcggattctgagaaatcatagttgtagaatagttttcccaacttctcacaatctgaaagttgcttttcagaatctaaaactcccccaaattggctctgtaaatctcctttggcatgggaaaatttcattggaaacctaggagtactcttcctatgcttagcttagcatgtctgcatgtgtaacttgtgttgttgagcatgaggagaggagcctactactagtatgttgacaagaatccaatgtgaaatgaaattgtgaacctgaacaaacgttgagc

SEQ ID NO: 25871 - DNA, 1250 bp, Oryza sativa
  ref <308>: DATABASE ACCESSION NUMBER: AK101313
  ref <309>: DATABASE ENTRY DATE: 2002-08-28
gacagaccatctgcttgcatcttcccaatctttgcaaagcaacaacaatcctagcaagttaagctaagcacccagttagctaagctagctatagcagccatgaattccaagttccagctgatattgtcaaccttcgttgtcattgccgctttcaccctgcttccacgtccttgcgcttccatcgagttctaccgcaagctctcaagctggtccaatggcggagctacgtggtatggtgctgctaatggcgctggaagtgatggtggggcatgtgggtaccaggctgccgtcgaccaggcaccgttctcgtccatgatcgccgccggcagcccttccatctacaagtccggcctgggctgcggctcttgctaccaggtgaaatgcagtggaaatagcgcttgctcgggcaacccggtgactgtggtcctcaccgacgagtgccccgggggcccgtgcctcagcgagccggtccacttcgacctgagcgggacggcgttcggtgccatggcgaatcctggccaggccgaccagctgcgcgccgccggcgtcctccaaatccagtacaaccgggtgccgtgcaactggggcggagtgatgctcaccttcgccgtggacgccggctcgaaccccagctacttcgcggtgctcgtcaagtacgagaacggggacggcgacctctccgggatggacctcatgcagacaggggccggcgccgcctggacgccgatgcagcagtcgtggggcgccgtctggaagctgagcgccggcgcggcgctgcaggcgccgctctccatccgcctcacgtccagctccggcaagacgctcgtcgccagcaacgtcatcccttccggctggaagcccggcgcgtcgtacacatcgacggtgaactactaatgatcgcaagcactgcaccacaacttgcatagctgcatgtgcatgtgcaccatgcatgcagctttgcaatacatatatgtctgcaggcaaaaggcatatatatattggatcgattggtgcaacaacgatgtgtacttgtaagtgtgaaattaataacggcgagatacgtacagaggaggaggcgcagatgatttaccagttctcccctcatcgctgcagttgtcgtacgtgtcaatgattatcgttatacgtgttaattactgtgtgtgtgatcagtgtttgtaatggcataatagccgaccagtgcttataaacgtgctactatatatgaagttatgaactcaattcacaatttc

SEQ ID NO: 25872 - DNA, 3119 bp, Oryza sativa
  ref <308>: DATABASE ACCESSION NUMBER: AK101314
  ref <309>: DATABASE ENTRY DATE: 2002-08-28
ggccgtcgccgccaccgccaccgccttcccctcgatcgccggagcggcgagcccacggcggcgagcgccgcagccatgtcgcgggctctcctcccgcgcggcagcattctactcgtccttcgaccgcgagtcccgtccacaccccaccgatgcttcgcgattggggcggcggcggcagttgacggcggcgagacgtggcgggggcaactccggcagggggagggggaggggaggagcagggcggtgaaggtgtcggtgtggtgggacttccagagctgccacctcccgcagggcgccaacccgtgccgcgtcgccacgcgcgtcacggcggcgctgcgggacgccggcatccgcggccccgtcgacatcaccgccttaggcgacgcctacatgctcccccgcgccgtccaggaggctctcgccgccaccggcgtcgccttctcgcacgtcccttccagtggaaagggcggtcccgaccaattgttcatggctgatctgacctattggattgctcagaatcctccaccggcccatttcttccttatatctggcaacaaaggccttgcaaacattctgcatcgcctccggatgagcaattataatgtactgcttgcatgccccagtgctgactctagtgtattgtgcagtgcagcaacgattatgtggccatgggatgctttagttaaagggttggatttctcaccaaaacattttaaccaaccacctgatggtatatccttttcttggtacggtcactataggggaccccttgatgacttgttcttgaactcagagtcagatgactctatggcagagtcagaggactccctggcagagtcaagggaccccaaggcttttcaaccacataccaagtcagtgaaaccacctattttacccaaatctgtggccaatggggttaggcaagtactgtactcctttcctgaaggtatcagtcttccaaatcttcgagcagagcttagaaagaatcatgtgttcatggataaaggattatttggcttcaaaaacttctcttctcttctccaagccatgcctgatgttgtgaagtttatagatcctctaccaggtgaaagaaaccagcctgctgtggttggggtttccaagagatcaatggagcctgctgagcaaatttacaagggaaagagttctgctcaaagcagtggtgagttcaaacgcctcgttcagactcttaatgagaaaccaccatcatcacatgtcccatcttcttcatcagatattttatctgcggaccgcaagaaagttctagcagttgatgccccatcttcccaatctgacttgttatctaggaaccaagagaaagctccccctgttgatttgactacacaacctgaaacacctgcaagctgtatggaagctgatgtggagagtgttgctggagcttctgcctttacaggagagcaaattactgttgacaaaaaggggctatttgaaaggatttgtgtactatggaatgatacagagcctgttaagcctatgctttctccgtctcaagatgatacccattctaaaggctccaatgatttactaactcagtatgccaatagtaacgaacataacagtcttttgacaaggaccttgaagatcttttccacaactgacaattcagatggagacaatgttgacagcacttcagcaattagcagcagtttctcaaatatgactgccaatgaccattcggacaaattaaatgtcaaggagaatgtagggaatacgatcatccattctagtagatcagttgacacgagcaacgctgaacataaagttgggtttatagaaaaaagcaaaggaatatttagctgggctgcaaagtggtgggcgtctggaaaaccagacacagatgacaatttaagttcagtacatatcaatgatggaacaagggaagaatcagaaaaagaatctgcatttgtaaagacagctgctactgcaagtgaacagcaagtaggagttgaactgttcatgaaaccttacttctgggatgcactacagcaatatttgtctacccctcatggatcagatcttgtttcaaaagcaaagacaagggaggagttagcgcatggactacagaagcaaggccattggcctctaaaaagccttggtgggaaacaccaccaccaattagtagatttgcttatctcagaaaagcaatggatcaaagaatcttcatcacaaacgtctccttttcgacttgccctcccccagagaagagctcgttctccactactttcattttttacgaatgggaggccatcaggccagcgtaaacatgtcgatgacagaagcccaactctgtctagaacgtcggtccatgttttacctacaaaaaatgggaagggtcaggccagctgcaagagcaatgagaatcaaagtaagagtgatgactttttggagaaagagcttggtccagtatctgacagtggtaaaccatatcgacaaaatgataaagcagtccggcatcatcctcctacctgttcagatgatgaattttctgatgatgaaaatcatgaggtggtccaagaggctgggagagatgcagcacaaagttcactcttcaaaattattgattcgtggaacactagtaagactatttgttctagcaagaaacagcacggcattggtggtatagtggactgctctagaatcaacagaggtaatggtggtgacaattcgatcacagaaaatgcagaaaaggctacaagcttatcaaaacattcttatatgacctcagattcagattcagattcagatgaagagaagttattcaacagtgtcttgggcagtctgcagaatgcaaagaactcaagtttgcccggttgaaatgatgtatgcagtcatactaaccccatgaactcttctgtaatcaatttggttccataccatcatgtgataatttgatctttctgccattctgggctaggtggaggcgtggagcagcttgaggatgctttagaaacatcttcccaagctcagttagatttatgaagatcacgttacagtagaatgttctgtttattttttattttgttggagaggaatcctcatattcttttgagatgctaaggtttgtgctggtgtagttaatt

SEQ ID NO: 25873 - DNA, 1956 bp, Oryza sativa
  ref <308>: DATABASE ACCESSION NUMBER: AK101315
  ref <309>: DATABASE ENTRY DATE: 2002-08-28
tggggggcaaggaggagtactgtagcttgtgaaagcgagtggttttggatccaagctggttgattgattgctcttcgtctcccctggctataaaacgagcggggccgcagccgggctgcggcgaggccgccctccacagatttcttggcgatttgtctggttctgcctgctcttgctggtttcagatccgggaggggactgagcctccgaagttatcaggagagtgaaagacataatggggatcagcagcgaatcgccgaatgggagccagcagattgtacaaaaggaaacacgagatgagacaacaccacttctgccggtcaaggtggaggaggaggggtttcatgagttcaatggagcttcattttccggggcggttttcaatttatcgaccactattgttggggctggaattatggccttgccagccagtatcaagatgttgggcatcatcccagggattctgatgatcatcgttgtggcgttgctcacagaggcatcaattgacatgcttgtcaggtgcagccaccagggcaagattacatcttatggttggctaatgggtgaggcttacggacagtggggaagaattgcactgcaggcctctgtcgtcataaacaacattggcgtgatgattgtttacatgattatcattggtgatgtattatctggaacatcatcaaccggtgttcaccatcgtggtatacttgagggctggtttggagctcatctctggaattcacgtgccattgttcttcttgcgacgactcttttcgtgtttgctccattggtgagctttaagcgtctggattcattgagatacacctctgccctatcggttgctcttgctgtggtttttgtcgtcattactgctggaattgctatcatcaaactcttcaatggaactgtagcgatgcccaaactttttccagaactagatggtcttagttccatctggaagctcttcacagctgtccctgttcttgtcactgcctacatctgccattacaatgttcacagcattgacaatgagcttgaagacagaacacaaattaaacctattgtgcgaacatccctgttcctctgctccagtgtttacattgctacaagtttctttgcatatctcctcttcggcgagggtaccctagatgatgttctcgctaacttcgatgcaaatcttgggattccatttagttccgtctttgatgatatagtgcgagtgagctatgctgctcacgttatgcttgtctttcccatagtcttctttgcccttaggctcaacttggatggactgctcttccccacatcaaggcacatttctcgtgacaacaagagatttgccataatcactatctcactcctcgcagtaatttatcttgctgccattttcataccgagcatttgggatgcattccagtttactggtgcaactgctgctgtcctgattggtttcatcttccctgccatggttatacttagggatccttatggaatcgcatccaagcgtgacaagatcttggctgtaaccgtgatcgtgcttgctgtcctctccaattctgttgctttatacagcgatgcaatgaatatcttccgtaaggaagaggaggcatgaatgtcagactccaaaggaatgtcatcaaatatcagtgatgaaggaagcgtggcttcatgttatgagacacagatgctgtgaagggaaattatttcctggaatccagcgaacgaagatttcttggtcagcggtcgaggttccagtcactcgaatgaattggatggttgaatctgcgtggcttctgtgcgaaccggctcaaattcgaattgagctgctcgcgatatctgtattgttagtgttcttgtatccacaagcaatgtatggctttaaaatgcctggtttacaataatgtacagtttcaaaaatacttcagatgagttaaatgtctatgtgaacctggactc

SEQ ID NO: 25874 - DNA, 1218 bp, Oryza sativa
  ref <308>: DATABASE ACCESSION NUMBER: AK101316
  ref <309>: DATABASE ENTRY DATE: 2002-08-28
gagcacgcaaccgagtcgagactagacaaggggagcagccgccgcgatccaagtcctcctccgccgccgccgacgccgccatggatccgaagctggtggaggtgacgcagctcttctcccgcttcaaggcagccttcgccaggaacgacttcgacacctgcgtagacctgctgtcgcagctcaaggtccgcctcaccaagttcccaagccttcctccatcatttcagcagacaccgaatgcagtggaagagctgaaaattgcgagggacatctatgagcatgcagttgttctgagtgtgaaaattgaagaccaagatgcatttgaaagggacttttgtcaactcaaaccttattacatggatacatgcggcataattccaccatcaccacaggagtatccaatcttgggtcttaatcttctaaggctgttagttcagaacagaattgcagagttccacactgagctggaacttctgccggtcacagcacttgaaaatccttgcatcaagcatgcggtggagcttgagcagtcatttatggagggtgcttacaaccgagtgttgagcgctcgccaggctgtgccccacgaaacatatgtgtacttcatggatcttcttgccaaaacagtcagagatgaactggctggttgcagtgagaagggttatgattatatgtcaatagctgaagcaagacaagtgctgatgttcagctctgacaaagaattgcaccagtacatcgcagaggagcaccctgaatgggaggtaaaggatggttccgtcttcttccagaaggcgaaggagacccagccctgcaaggagataccatctttgcaggttatcaaccaaacgctcagctatgctagagagctggagcggattgtatgatttgttaatgaatatcatttgagatcatttgggacggcatgttcatgctatgtacacatcaggtgtcacggttgagatgcgcatgttgcagctttgaacgtttgagatgcccatgttaccttatgatacttttttaaaaatttcatttaatgggctggatctgtgtctgatgtttggctgcccagtaactctgatcgtgttttgatatgtcagttcgtgatcaatttactttgctgaatagctgtcctgaaaatgttcagtattagtcgtgaattgcaactgcaaactgttgggcttatgatgatgaaatgagatcgtacttattttgatgacc

SEQ ID NO: 25875 - DNA, 1751 bp, Oryza sativa
  ref <308>: DATABASE ACCESSION NUMBER: AK101317
  ref <309>: DATABASE ENTRY DATE: 2002-08-28
tcaggtcccccctttgcccctcttctttaccgatgctgccaggcacaccaccgtaagagtcgtcccccgtgctcctcctcctcctcctcctcctcgtcgtggtgcgaccccgcgccaagcaatctccggcgagccggcgtcgccggaggcggcggcccgaggctcgcggcccgcacccccccacccaccgccgcaaacctcgtccgcacccgcggagcctctccctctcttcgttcgtcgtcggtgcctcgaggattccctcggcgtcgactcctcgcgagtgagttcgctcgccccgtcgcctgcgccgatctccatccccgcgagctgagcagggggagggcgccgcctccgtcgtcgtcgtctgtcctgctgcttccgccgcatccccggcaaatcttgtaaaaagcctatgggaaattcaaaaactcctcaaccatcaaagaagtcccgaattatgttgtcagatactgatggccaccaactggacaatgatgagttttcatctgaaagtgcatcaaatcaaatggttctgttcaaccctgaaactgtagctaaagggcaagatgaacttggagagaaccattcaccatctttgcagaaatcagccaataatccgaaccgaggaatgccatctattggggcattcactgtccaatgtgccaagtgtttcaaatggagacttattccgacaaaagagaagtatgaagaaattcgtgagtgtattatacaggaaccttttgagtgcgaacgagcccgtgagtggagacctgatgtaacatgtaatgatccagaagatatatctcaggatggaagcaggctttgggctattgacaaacccaatattgcactacctcctcctggatgggaaagacagatcagaataagaggcgaaggaggcaccaaatttgctgatgtgtattacacttctcctactggaaggaaactgaggtcactggttgaaattgataggtacctcttggagaatccggattatgttgcacagggtgtaacattaactcaattttcattccagattcctaggcctctgcgacaggactatgtcaaaaagcgccctaagatagtgaatccaaatgatgaagcaagtgtagtaacgaccaagtccgttaagccggaagaagtgagccccatagcctgggcagcaccatcggtacatcaggagggtgaagctggcgaacgagcttctcatgctgatgagccacctgaagcagaagaactggagctaacacgaaaaaggaaagcggaaagccctctgttcgaagaggcacattctaaccatgtttctgatgaaccaaaaaccaagttagaggatactcaaaatggaggcccttcagcttgaagactgcaacacagtgataccttaagctccccatccatggttttattgattctcttttgcgcttcataatttgggggccagtttttcctgtaatgcaaggccttactggcctttatatgtatcatgccacgttggtgccaggttggaggctgaatctgactcaaaatcaagttttcggacacgttacaattgttgtatccaaaagccatgttggaactcttttcaggagtgtgctttttctagtatgggcctaggtaggaaacctgccgtgtaagattagctcctctccttgttttctctttgtaagataaggaaatgttgtagggacatgtttttcttgtatgtgggtttgatcccttttattatctaagacatgccatttctgatggtg

SEQ ID NO: 25876 - DNA, 1284 bp, Oryza sativa
  ref <308>: DATABASE ACCESSION NUMBER: AK101318
  ref <309>: DATABASE ENTRY DATE: 2002-08-28
ggcgcgagttcgcgaaagaaagaaactgaaatccgaattcgattccaatcctctcgaccagcgagaggcctcgccttcctcctctcccccacgttggcgtagctcgcgcgcgcgcgcgcgcccgcgcccgaatccacaaacagcgtggtcgcgggcgggggttctcgatgaggcggatgctggaggtggcggcggacgccggctcgtctgcggcggcggcggcggcaaacggcgcggtggactggtggcgcgacgtgaacgagtcgccggtgtggcaggaccgcatcttccacgtcctcgcggcgctctacggcttcgtctccgccatcgcgctggtccaattgatcagaatcgaatgtagggtgcccgaatacgggtggacaacacaaaaggtgttccatttcctcaacttcctcgtgaacggcgtgcgatccatagtgtttgtgctgcgacgaaatgtgcagctcatacatccagagatacttcaacatgtgcttctagatatgcccgggctcgcattcttcacgacgtatgcacttttggtgctcttctgggccgagatttattatcaggcgcgtgcaatgtccactgatgggcttaggccaactttctattggatcaatgctgtgatctatgcaattcagataatattatggatggttctatggtggaaaccagttcgagttatgatcatcttgtcgaagatgttctttgcaggtgtatcactgtttgcggcttttgggtttcttctctacggtgggaggttattcctgatgttgcaacgtttcccagttgaatcgaaaggacggcgcaagaaattgcaggaggttggctatgtgactacaatctgctttacttgtttcttgatcagatgtgtcatgatgtgtctcaacacatttgataaagcagctgaccttgatgttctgaaccatccgattctgaatttcttttattacttgctggttgagatcgtaccttcagctttggtgctattcatcctaaggaaactgccaccgaaacgggggatcacacaatatcatccaattcattagagcagccctggcagggacagaagaggttttcttatgagtagtctatacagcgtggtaaatacagaaaaggcaatgtgaaagataccacacttgctttcgagcttgccccagcttttgtaagaggaagcctttagaatctcagggtaccatcgtgtgtaaaaatgcaatctggtgttgttacagatttagaaagtgttaacttatatatatatatatacctttgttcttcttc

SEQ ID NO: 25877 - DNA, 2801 bp, Oryza sativa
  ref <308>: DATABASE ACCESSION NUMBER: AK101319
  ref <309>: DATABASE ENTRY DATE: 2002-08-28
gtgccttgttgtaacaaagaaacaaggatccatcgatcgatcgatcgatctccatcgacatcgagtcctcactctctgcctgcggctgcgccgtcgcgtgccgccgatctccatcaccacctgcggcctccactgcccaatccccgtctcctcgctgattcccgccgccgaggaggagggggagggagggagggagggggggcagcagcggtgggtgccccgtcgtcctgctgctctccgcctccgctccggatctggagctgagattaatgaaataagatgctcctcaagagcaaattcaagttggccacagcgattggcatcgtgctgtcgatgctatcgctgctggtgcaccttttccttgcgaattattctgctgggggaatcacaagatatagtctgcatatggatgatgtccttccgtttggaccaaggcctcgaccccggagattgtggggttcgttgagtacacttgatcatttacacccttatgcgaaacctagaaaaatctaccctgctctggattatcataatggttttatttatgcaaagatctatggtggctttgagaagatacaatcttcaatctgtgatcttgtcgccgttgccaggctcttaaatgccaccctagttattcctgagattcaagcaacgacacgtgcaaaaggcatcagttcaaaattcaagagcttttcatatctatatgatgaagatcagttcatttccgcactttccagtgatgtagctattgtgcgtggtttgccaaaggatctcagggaggctagaaaaaagataaaatttcccacagtatcacctaaaaactcggctactccagaatattacgtgacagaagtcctgccaaaactttccaagtcaaaagttattgggataatcattaatggaggcaaatgtctccagtcaatccttccagcaaccttggaggaatttcagaggcttagatgcagggtagccttccatgctttgaagttccgtccagaaattcgtgctctcgggaaccaaatagttagcagattacgtgtatctggtcgtccttatctagcatatcacccaggactgctaagagatactctagcttttcatggttgtgctgaactgttccaggtttgtgtaatttggattaaatttctaatgtaagcagatggatatccttctaatatcttcctagcagttattgtttgactggctgttagtttcttcttctctaggatattcatacagaacttattcaatatagaaggaatcagatgatcaaacgaggaactgtaaaggaacaattatcagttgattcagtgtccaggaagataaatggttcatgtccactcatgccagaagaggttggacttctgcttcaggcattaggttatccatcaactacaagaatatacttggctggttctgaaacttttggtggacagagaatacttattccactacgagctatgtatgccaacttagttgatcgcacttctgtatgtagtcagagggagttatctgatttagttggcccagaggctcctcttgcatcagatatggcacaccctccacctcccaaaactgagaaagaactcgttgacgaatggaagagagcagggcctcgcccaagaccgctgccaccacctcctgcaaggccatactatgctcatgaaaaagtaggctggtatggctggattggtgagaatgacacagaaccagatccttctcccgttgaatttagaaggcaagcgcatcggttgctctgggacgcacttgattattttgtttcggttgaagctgatgcattctttcctgggtttcataatgatgggagtggctggccagactactcaagtttgatcatggggcatcggctataccaaaccccatctggtataacctataggcctgacagaaagactatttctgcgcttttcgaaaatgttagtgaccatcggtatcacccgccacggaattggacattggctgcacgccaacatctcaataacagtgcaagtgtagaaggcattgtaaaatcagcgatgctgtcaaaacctgtatcttttcttgcccacccattaccagagtgttcttgtagaacgccaaagtcacctggtgttcagtcgacgaaagatagccatggtaggctcctatttggaggtgaagaagagtgtcctgattggatggttcgcagcttggccatggtgtctaccaagaataatgagcctcaaaatgaggattacgacggcgacttgcctgaagatgattctagccaagacacacagcaggaatctgatagagtgacatgaataaatcctcagaacaggatgaggagatggatccagatgattgaacacatgcggagcttggtactatggcgcaccttttatccgctatatcagctccaggtaaccttgagtgatatcagcacacattgcaatttgcagggatctactggacaaatcggatcagtttgcagcaacacatcctgagctaggagagcccaagaatgatatatgatatgtacacctcggatgctttgcttggactactatcttgagttatacgacctcgacacaggaactaacacttaggttctttttcctccttttacgccttctttttgacctgaagaaattgcttgtgtacaaatgtctattaacagggaatacattgatttttttggggtgagtttgatttctgttactgtgaatgtgaaggaatccaatgggcttatgccttgttgatgtgcatctgtaaaggacagcattttttcccctttaactgctgcaaacgttacatgtgcc

SEQ ID NO: 25878 - DNA, 1714 bp, Oryza sativa
  ref <308>: DATABASE ACCESSION NUMBER: AK101320
  ref <309>: DATABASE ENTRY DATE: 2002-08-28
ttggtcttggagatgatgatcaatgcattgaggatgacttcaacgcatggaaagaaactctctggccagaattggatcagttacttcgggatgaaaatgatgtttcaacaggcactacctacacagctgccattcctgaataccgggttgaatttgttaagcctgatgaggcagcccatttggagagaaatttcagtcttgcaaacggttatgcggttcatgatgctcagcatccttgccgggccaacgtggctgtgcgacgggaactccacactcctgcttctgatcgttcatgcactcacttggagtttgacattgctggcactggtcttacgtatgaaaccggtgaccatgttggtgtatacacagagaactgcctcgaggttgtagaggaggcagagaggttgttaggctactccccagaggcttttttcaccatccatgcagacaaagaggacggtacaccactaggtggtggttctctggctcctccattcccttccccgattactgtgaggaatgcgcttgctagatatgcggatcttctgaattcgccgaagaagagtgctttggttgcattagctacttatgcttcagattctactgaagctgatcgtctgaggttcttggcctctcctgctggaaaggatgagtatgctcaatgggttgttgcgagtcaaagaagtctattagaagtgatggcagagttcccttcagcaaagcctccactaggagtcttctttgcagccgttgctcctcgtcttcagccgagatactactcaatttcatcttcacctagcatggcacctaccagaattcatgttacatgtgcacttgtccatgaaaaaacacctgctggaagggtacataagggagtctgctcaacatggattaagaatgctattccatcagaagagacaaaggactgcagctgggctccagtttttgtgagacaatcaaacttcaaactgcctgctgatccttcagtaccggttatcatgattggcccaggaactggtcttgctcctttccgcggattcttgcaggagaggctgtctcaaaaacaatcaggagctgagcttggtcgctccgtattcttctttggatgcagaaacagcaagatggacttcatctatgaggatgagctgaacactttccttgaggaaggagcattgtccgagctggttctcgccttctctcgtgagggccctacgaaggaatacgtgcagcacaaaatgtcgcagaaagcttccgaaatctgggacatgatctcccagggtggttacatttacgtctgtggtgatgccaaaggcatggccagagatgtacatagagttctccacaccattgtacaggaacagggatcacttgacagctctaaggctgagagctttgtgaagagcctccaaacggagggtaggtatctgagagatgtgtggtaagaggtgattttcagcacaccaaaaacgcctgtattcatgaggcacaacattcgttcatatatagtagtacagaagttccttcaaggagcaatattgctggaagaatattgacacatgaccaagatgaaatgcttttagtagctcagcatttttttttcttctctcttttctttttttttccctttcttttatctttcttgagttccataagaggttttttcgactgtgtattatagtatgatttatatgtataatatgaggacaattttggc

SEQ ID NO: 25879 - DNA, 1343 bp, Oryza sativa
  ref <308>: DATABASE ACCESSION NUMBER: AK101321
  ref <309>: DATABASE ENTRY DATE: 2002-08-28
gaggaggagctgagcgggtggagctagctcgatctcgccgcgcgcgctcagctcgtcgacaaggcagcgtgcacccaccaagatagcgggatgatccagtgagcgcgtggaggcggtgtttgattctagattgttctagaaccgaacgagcgagcttagctagctagctagctgctgctgcttcgatcgatcggtcgttgcctcatgcaggagttccagtccatcccggggctcgccgggcggctgttcggcggcgcggcggcggctgacatccggcgcgcgcaggcgcagcagggcccggcgtcgcggtgcggcgggataccgtcgccggaggcggtgaagtgcccgcggtgcgagtcgaccaacaccaagttctgctactacaacaactacaacctctcgcagccgcgccacttctgcaagagctgccgccggtactggaccaagggcggcgtcctccgcaacgtccccgtcggcggcggctgccgcaagaccaagcgtagcggcagctcgtccgctgcgtcctcggccccgtcgacgccgacggcggcaactgacaacgccaagaaccagcggcgcgcctcggcgtcgtccccacgatccagtagcggcggtagcggcaacacgagccccacggccgccgcggcgacgaccccgacgacaccggccacgccgtcgtcgaacaccatcgccgtcataaaccacgcgacgacgacgacgacgacgacgaaccccttcccgacagacgtgccacctccggcgccgattttcgccgaccaagcggcagcgctcgcgtcactgttcgcccctcctccgccgccgcctctcccggtgttcagcttcgcagcgcaggcgaagaccgaggacgggattgcctccgttctactcgccggacagacgacggcgcccactgccgccaccgttgccgacatgacgccgttcacgtcgctggacgcggggatcttcgagctcggcgacgtgccgccggcggcgtactggaacgccgggagctgctggacggacgtcccggacccgaatgtctacctaccctagctcggtgtagttactcatcacgatcaccttgattaggtctttgattaagctgtggttaaaacgcttcttaaggacgaccactagctaccactagtatgtcttttactactacattcatctactctactgttctccctgtaagtttttttcttcttttccttgtcttctctagctgcacttctgctgctgcaaaggtacgtgtaactgtccaagaaagctaacatttgtgtatctactgcacgcgtgaaaaaaaaaatctgaattggatcgatcattgttgcaacatcgcc

SEQ ID NO: 25880 - DNA, 2462 bp, Oryza sativa
  ref <308>: DATABASE ACCESSION NUMBER: AK101322
  ref <309>: DATABASE ENTRY DATE: 2002-08-28
gaatcactgttatggagcatatatcctctcttcagcttgcagctcaagagtgtgagagtgttgtctaggtgatcatcttctcctttttctgttcagttcttggttcacactgtcaaatcttttcttctccttctcctttttcctgaaaaatatcttgttctactttcccctcctgcaaatcctgggagcaatactagaaaagtttttctcttgtgtgctgtctgtgcccatctcttcgtttggtgccagctttggcaaagccctttattatcactctcatctaatctagtatctgtcccctgtgctgtcctcatcagcaaatttactccctacctgagcttggtatgctagccattaatgctctcccctggactgatgtgtgatgtgagtccttgcatttagctatcaaaggaaatctcctttcgtggtcaagctttaggtggagtttgatgagttcggctgggcttcatttattcccaaagatttgagctcttgatgctgctttaatagttcagagattccagcgtccttcacttcttgcagctcaggaaaggattcgatctttgagcttctagtgtttcttggagctttgctcttcgtgttcatcgatcccaaaatcccccttttttgctggtttctttagcttgcctgatcaatcatcccaagatcttagcagaatgggttcttcttggtggtggcatggaagggcggcggcggcggtggcgtgttgggtgtggctggcggcggcggcggcggtgggggtggaggcgataggggcgaactgggggacgcaggcgagccacccgctggcgccggacacggtggtgcagatgctcaaggacaacgggttcgacaaggtgaagctgttcgacgccggggaggacaccatgagcgccctgaggaagagcgggctggaggtgatggtcggcatccccaacgacatgctcgccgccatggccagcagcatggcggccgccaacaagtgggtcgaccagaacgtctccaactacctcaacgacggcgtcaagatcaggtatgttgctgttggtaacgagcctttcctggagacatacaatggaagctttctgcaaactacttttcctgccatcagaaacatacaaagtgcgcttgtgaaggctggcttgggtagtcaagttagagtgacatgccctctcaatgctgatgtttatcaatcatcgactagcaagccttctgatggggacttccgcacagatattcatgatctgatgctcaccatcgtaaaattcctgagcgatactggtggagctttcactgtcaacatctaccctttcataagcctctattctgattcaaacttccctgtcgactacgccttctttgatggtgccgcatcacccattgttgatggctctgcgacatacacaaacatgtttgatgcaaactatgacacacttatatgggctttgaagaagaatggctttggaaatctcccagtcattgttggggagattggatggccaactgacggggacatgaatgcaaatattcagatggcgcagcacttcaaccaaggcttcctaacacatattgccacagggcgaggaacgccgatgaggcctggaccagttgatgcttacttgttcagtctaatcgatgaggatgagaagagcatacagccaggtaattttgagcgtcactgggggatattcacctatgatggcttgccaaagtatcaactgaatcttgggcaatcacatggccttctcaaagcgaagaacgtgaagtaccttgagaggaagtggtgcgtgctgaagccttctataggccttactgatccaaggctttcagatagcatcagctatgcctgctccctggcagattgcaccagccttggttacaagacatcttgtgggggactggacaccagaagcaacatctcgtacgcgttcaacagctactaccagaagaacgatcaagacgatgtcgcctgtgggttctcgaacctcgcaacgatcactggccaagaccccagcaccggaacatgcagattcggtatcatgatcgaggttgactcggccttctcgtggaagctgcagcatgttagaagcagcaacctcttgatgcttctgctagtgcttctccagctttgcctgtcattctcatagatgcttgtttcacaagagatatggctgtagtaagagcatcagccatctggcaggaggataaggatatttgatgtctgctgtcagtatgttcattcatgtaggaaccttttctttttttgctcttttttccctctttatttttccctggtggatgccgcgaacccgctatcgcgatcatgcttggattcttgttagtgtagcctttgatctaccagtgccattgtgatgaggatcatgccttgaaccattgattgacaatcagagatgttgggcgatgttgccgaacctgcatgcaatcaggcgagttcagacttc

SEQ ID NO: 25881 - DNA, 2598 bp, Oryza sativa
  ref <308>: DATABASE ACCESSION NUMBER: AK101323
  ref <309>: DATABASE ENTRY DATE: 2002-08-28
gctctcaaaaccctctcctaaccctagccgccgccgcagccgcagccgcagccgcgcgtcgtctcctccgcccgcgagctcctcttcccgccggcgagagatcaggagcacgcaaggcgcgcggccatggcgtcggagaccgagacgttcgccttccaggccgagatcaaccagctgctgtccctcatcatcaacaccttctactccaacaaggagatcttcctccgcgagctcatctccaactcctccgatgcattggataagattaggttcgagagcctcacggacaagagcaagctcgatgcgcagccggagctgttcatccacattgtccccgacaaggctagcaacaccctgtcgatcatcgacagtggtgtcggcatgaccaagtcggacctcgtcaacaacctcggtaccatcgccaggtcggggaccaaggagttcacggaggcgctcgctgctggtgctgatgtgtccatgattgggcagtttggtgtcgggttctactccgcctaccttgttgctgagagggttgttgtgaccaccaagcacaacgacgacgagcagtatgtgtgggagtcacaggccggtgggtccttcactgttacacgtgatacctctggtgagcagcttggacggggtactaagatcaccctctacctcaaggatgatcagctggaataccttgaggaacgtcgcctcaaggatctggtgaagaagcattctgagttcatcagctaccctatctccttatggactgagaagacaaccgagaaggagatttctgatgatgaagacgaggaagagaagaaggatgctgaggagggaaaggttgaggatgttgatgaggagaaggaagagaaagagaagaaaaagaagaagatcaaggaagtctctcatgagtggaacgtgatgaacaagcagaaacctatttggttgaggaagccagaggagatcaccaaggaagagtatgctgctttctacaagagcttgacaaacgactgggaggaacatctggctgtcaagcacttctctgtggagggtcagcttgaattcaaggccatcctgtttgtaccaaagagagcgccatttgacctctttgacaccaggaagaagcaaaacaacatcaagctgtacgtacgccgggtgtttatcatggacaactgtgaggagttgatcccagagtggctcagctttgtcaagggcattgttgattctgaagaccttcccctcaacatctcacgtgagatgctccagcagaacaagatcctgaaggtgatccgcaagaaccttgtgaagaagtgcgtggagctcttctttgagatcgctgagaacaaggaagactacaacaagttctacgaggccttctccaagaatctcaagcttggcatccatgaggactccaccaacaggaccaagattgctgagctcctgaggtatcactccaccaagagtggtgatgagttgaccagcctcaaggactacgtaacccggatgaaggagggccagagtgagatctattacatcactggtgagagcaagaaggctgttgagaactcccccttccttgagaagctgaagaagaagggatatgaggtcctgtacatggttgatgccattgatgagtacgctgttggtcagcttaaggagtttgagggcaagaagctcgtctctgccaccaaggaaggtctgaagcttgatgagagtgaggacgagaagaagcggcaggaggaactcaaggagaagttcgagggtctgtgcaaggtgatcaaggaggtgctcggtgacaaggtggagaaggttgttgtctctgaccgtgtggtggactctccctgctgtctagtcactggggagtatggctggactgctaacatggagaggatcatgaaggcaccatggcagcgtactccagtcaaatcagtaaggatagtgatcggatctacaacttaccattcacaggtggtaatgggtcagatagtctacatgattggcatgttgatgagttctttagtaactcagaatttggctttgctgagcatggttcttctaagggtgacaacgctaagccagggagtgctggtggatctccgcagtgccgtctggctgaaggcctgtttgtcgaaggacttctaggtcaagtgcctgacaatccatggacagtgcctgaggtcccctcgccaccgacagcctctggtctctattggcaaaataatttgctttgcccttcgtacgacagcaccatgttcgtccctgagatttcctccttggagaactctcagaacaacttcactgtatctgctggtttgaagcgccgaaggaggcagttttgatctgccgatagcatcagacaccattcggtttagttggcaggtcacgttgagaggagggcttcttgcctgcctgaccaaagccacaaaacacagggatggatgatcatccagtggtcagtctaaaaatatgttgtaatgtttgtgtttcgactatacgtttgttgctgaagtttaaaggcgagggaattgttgtgagatctgggatgacagatttgttgttaccaattttgtgaatagtgaaaataaaaagagcatggataagatcatg

SEQ ID NO: 25882 - DNA, 2604 bp, Oryza sativa
  ref <308>: DATABASE ACCESSION NUMBER: AK101324
  ref <309>: DATABASE ENTRY DATE: 2002-08-28
gcccttcccccaatctccgacagttgccaaatttcccttcccacccccaaacccaaaccccagcgacgacggcgacgacgcgcagcagacgaaagcgagcgagaggcgagagaaatcccatcgtttcccaaaccctaaccccctcctcctcctcctccagatctcggcggccgcgcggctgatgcgaggtgagccccgtccgccctagggtttgcggcggggtgcgtggtggtggtggttgggccgggggggacggggccctcctgctcgcgggggtgggggttgggtggggatggcggcggcgcgcgcgcacgtgaaggacccggcgcaccggaccaaggtggtgctccggaggctgccgccggcgatcgcgcagcaggccgtcgtggaacaggtcgacgcgcgcttcggcggccggtacgactggtcgtgcttccgccccggcaatgccagccaaaagaatcacagatattctcgactctaccttaacttcaagggcccagaagatgtcgttgaatttgctgaggtctccaatggtcatgtgtttgtgaatgaaaagggtgctcaatttaaagctcttgtggaatatgcaccatcgcaacaggtcccaagtcaaacacgaagaaagatgctcgtcaaggaactataatgaaagatccggaatacttggagtttcttgaatcgatttcaaagcctgctgagcatctgccaagtgctgaaattcagctcgaaaggaaagaagctgaaagggcagctgctggaaaggaaccacctgttgtgacgcctcttatggtctatgttcgccagcaaagggcagctaagagtatggctcagagatctggaagtagtagactcagtagaaaagttgcgggtgttgttactagcagtcctagtccttctaaaaggggttctgagaagcgcaggacctctgcttcgacgcaatatgttctacgagagaatgctaaggagaagccaacttatatcttagtgccaaagagagacgagcatgcgcagagggaaaaagatgctacaagtggcgggatttctggttctgctcatgtcgcggaaaacaaaaaagagaaaattgtgcttttgaaaggaagagcaagggtcgattctaatacatctgatgtcacatctcagcagcagtcagggacccctatgaaaaatgctgcacaatctagttctaggcaagatccgcggcttgagggcagtggcagaattattaagactatactttcaaacaaggaaggacggcatgtggttacgtctcaacatgatcaggaaggtcacataattacagctgagaagcgcccaccacggattccaaacccacgttccgttgttaaagatcaggtagttgaaaatgctgagaaaaaccatttggatgacaaacatagtcatctccatggttctgggctcatcagtgaaaagactgaaagacatgctagaaatagagataggcctgatcgtggtgtatgggcccctcgtcgctatgacaaatctgcatcaggtgggacgcattcctcgtcatctgagttctcaccaatgcagcaacattctggtgaaaatttctgtcagcaagcagatggccatggagagagaaaaatagacccaaggggtcatggtggtattcgcggaggccctgtggaaaatggacatagacatgctaaccgccgtggtcctccacgtggtctgaaggagatggaaatttctgcaagcacatctgatggaaagccttcaaagagagcctctgccaactatggtgctcatgagaggcaagtgtgggttcaaaaatcaagctcggcgacgtgatcttgtccaatgatgatactcatcaaaacaaatattgcaagttgtggagttctggattttgcagcttgatcctgtgaagtactgttaacaaaatgcccccgatcatatgcttccatgaagtgcaatctcagatttgtcaatcgaaatctcagctttagctgaaaagggagcttatatgatttgattcacagcaatagtgaattaacataacccactttaggtagctcttgattgctttgggtgagacttgatttgggcccaaggttgctattctggagcaatggaaggatttaggttggcatcattaccctcgtgacagtggtcacatatttctgagacccctggagaatatacacgacctcaactaatcagagatgggtgtacatatctctagagaaagaagaggtctggttctgacttctgttcgcaggttagcggtgccatgtatctacaaaagagataaaaaaaagttatcagactgcctggtttgctaaataaaagtgaattagttgatagattatgagaatccactgtttaggcggctgcgaccgtggtcaccaacagaagttaccctagagtgcaaagtggcatctcattttggttttgtgcccctgccccccctgagtaacgggatgtggtattgttttgacatgtggatgttgatggtgtgcgtcttcctgttaatgtttcaccagataattatgggggtattgttaagaatgatgatatgatgtacagcatcaaaggtgcttgctgttttaatcttgagcaagttgtcgtgcttctatg

SEQ ID NO: 25883 - DNA, 949 bp, Oryza sativa
  ref <308>: DATABASE ACCESSION NUMBER: AK101325
  ref <309>: DATABASE ENTRY DATE: 2002-08-28
gacctccttccctcctccatctcgacacctcctcctcgtctccggccgccgcttccccctcgccgccggcgcctcctcgagaccgtcgagatcgagatagagagagagtgatggggtgggcgacgcggttcctggcggcggtctgcttcttcgcggcgggcgtcgtcttcgcccccgacgtcctcctcggcgcccgctccggctccggctccggcggcggcgccgccgcggccgccaaggtggcccacctcctctgcttcgccacctcatggggcgccgccctctgggccaccttcatcggcggcatcatcatgttcaagaatctgccgaggcaccagttcgggaacctgcaggggaagttgttcccggcctacttcatgctcatctccgcctgcgccgccgtctccgtcgccgccttcgcctacctccacccgtggaagacggcgtccaccgtcgagcgctaccagctcggcttcctcctcgccgcccttggcttcgacctctccaacctgctcgtgttcacccccatgaccatcgagatgatgaagaagaggcacaagattgagagggacctgagcattggtgaggaggttgggtggtcgaagaatgttcaggtggcaaaaaacaaccctacccttgccgcaatcaacaagaagtttgggatgatccacgggctctcgtctttggccaacatcatgtcattcggcagcctagccatgcattcctggtaccttgctagcaagcttgagatgtgaagtgaacaaacacccttgaccaacattcagttgaatcagatctgattgcatcacaatattaatgtggcaaagcctcatttggagagcttgcaaatatatttacgtgtacaatgattcgactcgagattagttgtacttaaaataatgtacagaatccacgcatttctcgccagtttattataagttcatgaacc

SEQ ID NO: 25884 - DNA, 1950 bp, Oryza sativa
  ref <308>: DATABASE ACCESSION NUMBER: AK101326
  ref <309>: DATABASE ENTRY DATE: 2002-08-28
gagttgtactcgtgccctcctcttcctcccactcctcctcatctgccctctcgtccactccaccgctgctccccgctgccgccgcagatgccgcccaaggtggtcgccgtggccgccggcgaggcccacacgctcgccctcaccggtgacggtgaggtgtactcgtggggacggggcatgttcggccgcctcgggaccgggcgcgaggccgacgagcacgtgcccaccgtggtcgccgccggcgggaggccgcggcccaggttcgtggccgtcgcatccggcgcctaccacagccttgcgctggacgatgaaggttcgctctggtcatggggttacaacatctatggtcagcttggctacggggaagagaattctcttttcccatgtttggttgagcgttttcaagatttgggttcacctgaaacgctgcagtctgaagcacagaacagtagcacacagtcttcattgaagttgtcttctgttaaagctgggggcatgatgtcatttgccatagacactctgggagctatgtggatgtggggaaattgcccgcagcagactgatgctggagagttttgtatagcacctagctgtgtcccactacctgtgtgggatttccatggtcacactgttgttaaggttgcctgtggtaatgagcatgtcgtagctgcagtcagtgctggagagacctatacaggaggtgaccttgtttgttatgcctggggcaataacaaccatggccagttgggtctaggtgacaaggaaagtagatcccgtcctgtgcttatctcagcttttagcgaaggatcttcttgggaggtgtatgaaattgcctgcggaacttggcacaccgctgtccttaccaataagaagtctttcgacgtggatcttgaatctcgttgctggacgtttggccttggtgataatgggcagcttggccatgggaccactgccaccatttgctctcctcaacctgttgatggcttgccaactggttccttccttatttctcttgattgtggattgttccatacaactgtagtttcttctgatggagaggtttggtgctggggaatggagagaggtcttgggttgtgccctgatgccagcttttcaggagttgattcaggggatgctctacgcccgataagagttcagtctcctgagacaaatgggttcaaatttcttggtgcagtgcaggtcacttgtggagctgctcacactgttcttgttgctggtgatgggtataggatgtgggcttggggcagaggccgcagtggtgtgcttgggagaaaccagactgctgacagttacataccatgtgttgtgatgtggcctcctcttgatgagaacttccaagaaattcatgaggatagagcacaggcatcaacatcgggagtgaatgaccggaatagcgctgagttggaacaaaagctatctgctgcctcagaagagctggagtttcttcggtcaaaactgacacttatggagagatatgccaacatacttcacatttcaatatttcgtaaacctctagatgaacgaacacttccacgttcccttcaagaatctcctgtctttgatattagaaaggaatttgagaacatcttggatacagcaggtactgatgaactcaatcgcctggagatcttctaccgcagcatgctttctggtgtgaaggataagcttttgaagagaagagtccaggaaatggtccaagagtgcattgtttcgctctcttcagggagacaaaccccatgaggtcagtaaattagatgattaatcaccaaattgtaattcctgttgtgcagcatctatcaaattttgtgcattaaaattgtaataagctctgatgctgccagcttgttgttttatcaaagttaaattataatacaaaataatctaaccattttggtaaacttatcagttatggtcactccgtcattatgt

SEQ ID NO: 25885 - DNA, 1858 bp, Oryza sativa
  ref <308>: DATABASE ACCESSION NUMBER: AK101327
  ref <309>: DATABASE ENTRY DATE: 2002-08-28
gagagggggagtcgtcgtctctgctctccggtctccagaaaagcaaaaggggaggcgaagccaagccaacccaaccacacgccaatccactcggaatccgcctagggtttcctcctcttcctcttcccctcgcggctgctgctcggcggattctgctgctgcggaggagggcggcgggggttggggctgcaagctggtccgatcagcttttcctgctgctgaggtagcgggagcgacaaccagggcatttcttgtacaaggatgaacagcctgccccggctcaaataatatttgcggttggatttattttttttcgacatgaacgggcagccaaggtttcacgatatgataggcggtggtggcaagggaatgcaagataatgagatcaatggcctcttcaacatgccgtcttaccataagtttgtggagggctcccagatgtctgttgacagcgccgacggcttcaacatggccaactacgttgggggttccgttgccatgtcggtggacaacagcagcgttggctcgaacgagtcccgcacggttatacttaagcacccaggcctccgtgatgccccgacggcaagctattcggttggcaacagtgtcttccgccccaaccgtgtggctgcgcacacgctaaatgaggatgcgttagctcgtgttttgatggatccgagccatccgactgagatcctaagtaattatgaggaatgggccattgatttggggaggttggacatgggggttccttttgcccaaggggcctttgggaagctataccggggaacatacaatggagaagatgttgccattaaactactggagaagcctgagaatgatccagagagagcacaagcattggagcaacaatttgtgcaagaagttatgatgttgtctagactgaggcacccaaacattgtgaggtttataggtgcatgtaggaagtcaattgtgtggtgcatcattactgagtatgctaaaggtggttcagtccggcagttcctggcaagaaggcaaaacaagtcagtgcctttgagattggctgtaaaacaggcattggatatagccagggggatggcctatgtacatgctttgggatttatccacagggatctgaagtcagataacctattaattgccgcagataaatccattaagattgctgactttggagtggctcgcatcgaagtaaaaactgagggtatgacaccagagacaggaacctaccgctggatggcaccggaaatgatccagcacaggccttatgatcataaagttgatgtatatagctttgggattgtcttgtgggagcttataactggcatgctcccattcacaaacatgacggctgttcaggcagcttttgctgtggtgaacaagggtgctcggccagtgatcccgcaggactgcctgcctgctctaagccacatcatgactctttgttgggatgcgaaccctgaagttcgccccgcatttactgatatcgtttgtatgcttgagagtgcagagatggagattctgagcaatgtccgtaaagcacgcttccgctgttgcatcactgagcccatgacaaccgactgaaattaaagcaatgtagatgattacaacatggatcgagggaggaagcaagggaggatgaagaaagaggcaatctcaatgtattcattagtaccagctcatagggtctgtgtgcccacagaagttcctaggctttgagcttctgtgttattcgattctatcttgtgtgagttgcacagctcaagtaacctcttctggaatatagatgttgccttgtatgttaacaggatctaatggagctttcctatgttaataacatctgcttgttggtgtaacc

SEQ ID NO: 25886 - DNA, 2575 bp, Oryza sativa
  ref <308>: DATABASE ACCESSION NUMBER: AK101328
  ref <309>: DATABASE ENTRY DATE: 2002-08-28
gccttccctccgagtgccgtacggccgctgccgccttctggaacattcgcttgcctccgccaaaaaaaaaaaaaaaaaatccctcctcccctctcccctcgagtggggcgcagccgcctcgctcgtcttccttcctcctccaccgccgcgcgtgcgcgagtgcgcagccgccatcgccgtgcgcttctctgcctcccgatctgcggtgcgaccggtgtgatcgcggagcggcggccgacgagaaggatttttttgagggaggggggcgagtggtgcgacgccgctgacctccttcaattccacctgccccaatctcggttgggaatcgaatcgaaaggaataagatggaagagaagagaatagctcggatttcggtcacttggagaggcagacagctcgatgtcgatgcagacccgagctgtacggtgaaggaattcgggcaacttttgcaggatttgactagtgttaacccagagacattgaagcttattgttccgcagtctacaaacaaaggctccaagctgatcacaccgttttccgaccctcattcagttttgacattgaaagaagctgctattagtgatgggaagcctattagaatgatgggtgtttttaatgatgaaatcgaggaagtatcggacaatggcaaaagaacagatctacggataattggatttgaggaggaagaacaacggctgaggcaacgaacatcaggcaggccccaagttccactcaaacttccacagggccaatacatcttctgtgattttcggacacttcacttacctgggattgagttgaatcccccaccttcagaagctctgaaaagaatgcacatgctagcatgtgacccaggcataattgcgatcatgaacaagcatagatggcgagtgggaatcatgactgaaatggcaccagtagggtatgtaggcgtcagtccaaaatgcattctaggcttcaataagaacatgggagaggaaatatcccttcgcctacgaactgatgacttgaaaggatttaggaaatatgaaagtatcaagagaactctactccatgaacttgcacacatggtgcactccgagcatgatgcaaatttttttgctcttaataagcagttgaatgatgaagcagcttccttggactggaccaagtcaagaggtcatgtgctgagtggtcgcaaaatcttcgattcctatgaagacgaatttgttctggagccagacagtgttgttgttggccacaaacttggaggaggatccagttcactggcaagtgctcgtgtgttgtctgggtctgctgcttataagcgttttttgaatgcatcagcggatttagagagttctaaagacagcgttactatacctggaaatgaaattcttgtgcctaacacaaaatttgagcctgatccagatgatgttggtcaagatttttctcaggacaacactaaggtggagccagacccagatgataatgatgacatgaacgtggatgtagggactggggcatcttggtcctcagtttctagatcatttacagaacaagataccatcagtcactcagagcctgaccctgatgatattcaccagcaaagcactgctggttgcctagaacctgaccctgatgattcctcaaatgttgatattcttagccaggagttgacgattgatgggaagcagaatggagaacctgatcctgacgataatggtactagcaaatttattcccgaacctgtaaacaagatggaagtagagactgaattgggaagtaacttcgcagttcagaattctgaacctgatcctgatgattcctcaaatgctattctgaataagaagctgggaactgacaggtctgatgaaactacatgcgaagctgttgtagaagaatgtgtaaacaagatggaagtggagactgaacagagcagaaactcgacaatgtcaaaatctgagcctgatcctgatgatcatgctgctaattcaaacatcagtgagctccagaggatcgaagaaccagtggcagccctctgtgcacgccttcagaaggccattgaaatgcttcgctcacaagcaacacctacagaggcaacttctgctcttcaaacactctttaagatcatcaagaatgtgatagagcacccacatgatatcaagtacaggagactgcgtaagtccaatccacagttccaaaggagtgtggcgaactacaaagctgcaatggaggtccttgaactgattggtttctgtgaggatgtcgtctcggatgagattggtcgtgcagagacttacttggtattgaaaaggaacgatcctggcttgctgtggcttgcaaaggcctctcttgaagtttccatggcctgaattgtttcaccaagcaatctcctattgcttctgtatacctgtaaatcattttcattactgttgtggggatgctcatatgctgctcttaggcaaatgatgtagtatggtcttcctacacgatgattgtttgtatatggaaacaccaaaatggtctatactgtctgtcaacacacttcatgatttctcatcaaatatacaaactatagataaattacctggct

SEQ ID NO: 25887 - DNA, 1153 bp, Oryza sativa
  ref <308>: DATABASE ACCESSION NUMBER: AK101329
  ref <309>: DATABASE ENTRY DATE: 2002-08-28
gattgatcgtttacagcagcgtcaatactgtaataattgaccaaactgtcaaagcagtttgtgacaacattacgtgtgattttggtgcgcgcagggagatcatgcacgcgatgtggaggccgcagaagttcaaggcgatctacctgatggcgacgctgtacgtgctgacgctgacgctgccgtcggcggcgagcgtgtactgggcgttcggggacgagctgctcacgcactcgaatgcgctggcgctgctgccgcgcacggcgttccgggacgccgccgtggtgctcatgctcatccaccagttcatcaccttcggcttcgcctgcacgccgctctacttcgtctgggagaagctcatcggactccacgactgccgcagcctcttcaagcgcgccgccgcgaggctccccgtcgtcgtgcccatctggttcctcgccatcatcttccccttcttcgggcccatcaactccgccgtcggctccctcctcgtcagcttcaccgtctacatcatccccgccctcgcgcacatgatcaccttccgctccgcgcacgctcgtgagaacgccgtggagccgccgccgcggttcgtggggcgatggacgggcacgttcatcatcaacgcgttcgtggtggcgtgggtgctggtggtcggcttcgggttcggcggctgggccagcatgaccaacttcgtccgccagatcgacacgttcgggctcttcaccaagtgctaccagtgcccgccgccccctctgccgccggcgggcgccgctccgaacgccacctggccgccgttcccggcgacgccgttcaacgccaccaccgccggcctcgctccggcccctgctccttcgccggcgcatttcttcggccgccaccaccggcatcacagccacgggctctgaacactgaaatgtacgtaccagggcaatgctcgagctttggtttagctatagttgttcactagcgccgtcactaattagtcatagcttagcacaaagctgcatcttctctagctatcagtagcatgtcagtcagacggagtatcccgtttcaagttccttggttctgtactgcctcctggcgtggagctcaaaaaacgaacagaaaaaaagggaatgttgctacggccgcagatgcaagagccagctaatct

SEQ ID NO: 25888 - DNA, 1339 bp, Oryza sativa
  ref <308>: DATABASE ACCESSION NUMBER: AK101330
  ref <309>: DATABASE ENTRY DATE: 2002-08-28
gaccctcgccattttgacgcttctatctcgcccaccggccaccgctgccgtctccatccatcccgcgaggcgccgccgccgactccgcctccgcctccgcctccggcgatccccatccatcacgcgaggcgccgcctccgcctccggcgacccccatccatcacgcgaccgccgcttcgtcggcatcctcccaccgcatccatcctgaagaagatcatcgtcaaaacatgtcgctcatttcgaagctgcggttgatcactgtggatgtcaccggtactctgcttgcctacaaagggcagcttggtgattactactgtatggcagctaaggctgctgggaagccatgtcctgactaccagcgaatgcatgagggcttcaagcttgcatacaccgagatggcaaggcaatacccatgctttggatttgcagcgaagatgccgaatatcgactggtggaggatgtgcgtcaaggattcttttgttaaggctggttatgagtatgacgaggagacatttgagaagattttcaaacggatttactcttcttttggctcgtctgctccgtactcggtattccctgatgcgcagcccttcatgaggtggcttcgcgggaaggggctcacggttggaattgtcagcaacgcagaataccgttacaaagacgtcatcttgcctgctctaggactgaaccagggctccgagtgggactttggggtgttctctggaatagttggtgtggagaagccagatccaagtatctacaggattgcactggaaatggcgggcaaggtcgcgccagaagaggcgcttcacataggcgacagcatgcgcaaggactacacccctgcacggagcatcggaatgcacgcgctgcttctggaccgattcaagaccgccgatgctgagagctggaggaagtctggagcaactgtgctccctgacctggtagctgctcaggagtggctcagcaagaatctcaaggatgagccagtagcagctgaacaaaatgtctgaccttagaaaattcagttcccctgtcactgagctgaattccctcttgtttcctagttatgaaacgagggaggcaaaagaaatgtgccattgatgtatttgtattgtactgatggaataggttatgtgatggttcttggctgctggattatgtaagctgtttggtgttgaactgttgatgctgattgctgaatatgtcaagcaaatcagtgtggcagagcattgttgtagtctcccatgaactgtgtttcagcgaagaaaactagttttgtttggcatcttcgcctgtctgaagcaataaaagcagggcaatttcagttctgtttgtc

SEQ ID NO: 25889 - DNA, 2385 bp, Oryza sativa
  ref <308>: DATABASE ACCESSION NUMBER: AK101331
  ref <309>: DATABASE ENTRY DATE: 2002-08-28
gagtcttcccgttcccctcggcgtcgactcccccccaaactccgtctcctcgcgcgagttcgcccgccgcctgcgccgatctccatccggcgaggcgccgccgtccgcccggctgcttccgccgattgcatgattccaccacaatcagaaattgtaggtgagaacaacgcatccaagagtgctgctaaagagcagattctttctagtacaaatgagaaaatgactactagtgttccccagggtgctagctcctcaaaatcaccaaagggtgcacaggagaaggctagttttttgggtaaaggtggagaacaacctttctaccaacccaatgtgtacgcacctcagccacaaacaatctattctggaggatacctgaaccatttgggccaatgggaagaatacccccattatgtcaatatggaaggactccattctgtatcacctggaatttacaacgacaaccagtcaatcatgttatctcctggatatgcaaacaaccctcaaatgatgtatggagcttattctcctggcgttggagatggccagccatacctcccattgcactttcccttctcaagtccttactaccagccaccagcctctcctagcatgggatactctaattccgccactggaatgtctcaaggagatcctatgctgcagcaggagtacttccttcctgacggccttctctactcgccaacaccaggttatcatcaaccattcgggtcttttgacagagcatccacccaaccaagcagcactcctggtttgtttggtcaagggaacacaccgctggcttttggaatgcatcatgggtcaatgtatgcccctggatcctataagccacgccaacaaggtggtaagtttggaggcactactccaagttggagttctggtcgcagatttggtacttttgacttaagcgccaatcaacagaaagggagcatgccatttggtattcagaatggtgctcttgagttcctgaatgagcaaaaccgtgggccacgtgctacaaaaccaaagaaacaagacacagagaactcttcaatagatgacaaaaatgagaaaaatgttcctctggttgatagtgaactgtataatcgccctgattttgtcactgaatacaaggatgcaaaattttttgtaataaagtcctacactgaggaccatgtacataggagcattaagtacaatgtttgggccagtacagctagtgggaatagaaagctggattctgcttatcgcttggccaaagaaaaagaagactattgccctatttttctatttttctcggttaatggcagtggtcagttctgtggtgtagctgagatgattggacccgtcgattttgacaaaagtgtcgattattggcagcaggacaagtggagtggccagttccctgtgaagtggcacattattaaggatgtcccgaacaacctgctgcggcacatcattcttgagaacaatgacaacaaacctgtaactaatagcagggacacccaggaggtgaagctggaacatggtctgcagatgttaactatcttcaagaaccatgaatcggagacgaacattcttgaagactttgacttctatgagcagcgggagaaagccttgcaggagaatagacgtcagcagcagcctgccagcccagagctgcagaaaccagcagagaataaggccctaggagaacttatggcccacatctcagacacatttggtcagactgtccagctaaaagaaactgagaatggcgaaagcaagcctgcagttgagggtgtttcttcagctgatgaagcgtccaccgcaaccaccaaggctgaagatggaacggcgagcacgaacgctagccctgtggagtaaagcagtcgattttctcccccatatcatttactaatttggagcagcagttggatcatatgatgctcttatggaggtgagaagggttaaaagagcaggttggttatgtcaggtgttgctgctgcttcagttgtacaacattataggctttgtttcacctccctttaggttataattccaatttcatagttccgaaattcttgctgtcaatcttctttcctgtctcaatgtgttccctttcgcttttacttgtgttgcgtcatgaatgctgttcaatgtgagtggtggtgtttagccataagaagctgcataattatgctgccggtagctttccagtctcatgtctctctggttccatcctttgtatatttgcagagcgccattcttttcttgtgaacttggagcttcttaagctctcatgtagcacaattctgtagcaaagctcctttggtcacgcggtacttcatgactgaaatattcaacttgtgatacaaggggaacctaattgggaagcattcagaaccg

SEQ ID NO: 25890 - DNA, 1555 bp, Oryza sativa
  ref <308>: DATABASE ACCESSION NUMBER: AK101332
  ref <309>: DATABASE ENTRY DATE: 2002-08-28
ggcttgcactagcatactgagccactacggccctcgatatggacaggccctatcctcctcttcttccccttgctctgctcgccctcctcttcctctgtctcctccacggcgagcgcgccgccgccgccgacgacgacctcacctccggcaccggcgacggcagcgagctctggggatacgtccaagttcgcccgaaggcgcacctgttctggtggtactacaagagcccgcagcgggcgtcgtcgccggggaagccatggccgaccatcctctggcttcagggcggcccgggagcgtcgggcgtcgggctcggcaacttcctggaggtcgggccgctggacgtcaacctgaagccgcgcgactcgacgtggctgcagaaggccgacctcatcttcgtggacaacccggtgggcgtcgggtacagctacgcggacgacccgagcgcgctggtgacgacggactggcaggcggccacggacgccaccgagctgctcagggcgctcgccgccaaggagatacccaccctgcagagcagcccgctgttcctcgtcgccgagtcctacggcggcaagtacgccgccacgctcggcgtctccctcgcccgggccatccgcgccggcgacctcaagctcaacctcggcggcgtggcgctcggcgacaactggatctcgccggaggatttcacgctcgcgtacacgccgctgctgctggaggtgtcgaggctggacgacaacgccggcgacgaggccagcaagatggcggcgacggtgaaggagcagatcacggcggggcagcttgcggactcgcagcagtcgtggatcgacctgctgggtttcatcgacaaaaagagcgccagcgtcgacatgtacaatttcttgcttgactccggcatggacccggtgtcggcagacttaccggcggcgagctcctcatcgccgtcgtcaagcagtgctcagttgatgaagtactcaacataccttagcagccaagcggccgattcaggctccaacacgatcgagggcatcatgaacggtgtcatcaaggaaaagctcaagatcatccccaacaacctcaagtggcaggaactgtcggatccggtctacaatgcgctggtcaacgatttcatgaagccaagaatcaacgagatcgatgagctgctgtcttacggtatcaatgtgacggtctacaatggtcagcttgatgtaatatgctcgacgatcggtgcagaagcatgggtgaagaagctcaaatgggatgggctgaagaacttcctgagcctaccaaggcagcctttgaagtgtggctcttccaagggcaccaaggcgttcgtcagatcatacaagaacctgcatttctactggatacttggggctggacactttgtacctgctgatcagccctgcattgcactgagcatgatcagtagcataacccagtctccagccagttagatatctcccatcagtaacagatatactcaagaaaagatagaaaacagaaggcaaacagatatacctcactctcaattagcagagtgacattgtaccgtttcttc

SEQ ID NO: 25891 - DNA, 2467 bp, Oryza sativa
  ref <308>: DATABASE ACCESSION NUMBER: AK101333
  ref <309>: DATABASE ENTRY DATE: 2002-08-28
gagatctggccactcccacgcacccagtctcctaaaccctacacaccctccccccctctcctctcgccggccgcgccacccgccgccgccgcggccatggccgccgccgggggtctcccagcctcggccaccctcctcctcctcgtcatcgccgccgtggccgtcgctcccctcgcctccgccgtccgcccggtttccgacgcccacagatccgctgccgccgagctcttcgccgcttcccccgacggatccttcggcgatttggagacgacgtatgaggcggtcaggacgttccagatactcggggtggagaaggacaagggcttgattggtaaggcgtgcaagttcgccgccgagaagctggcctcctcgtcatcgtcgcccgcgaaggatctgttccacgcggcccggatcagcggcgtcctcaagtgcagtgttgattccggagtttacgatgatgtcgctacgaggcttaaggctgtgatcaaggacactaactcgctgctggaactctactattctgtgggagggttgctcagcatcaaggaacaaggccacaatgttgttttacctgatgcagataacacatttcacgcaattaaggcacttagccaaagtgacggaagatggcgttatgacactaacagcgctgaatcgagcacgtttgctgctggtatcgcactagaagcattgtctgcagttatttcactggcagattcggaagttgactcatccatgatagctgtggtgaaaaatgacattgtgaagctatttgacacgatcaagagctatgatgatgggacattttactttgacgagaagcatgttgatgctgccgaatacaagggccctataacaacatctgcttcagtagtaaggggtgtcacctcttttgcagctgttgcttctgggaaattgaatatccctggtgagaaaatactgggtttggcgaagttttttcttggtatagggctaccaggtagcgcaaaggattgctttaaccagattgagtcattatcattcttggaaaacaatagggtatttgttcctctggtcctttcacttccttccaaagtattttcgctgacctccaaagaccagcttaaggttgaagtcaccacagtatttggatctgctgcacctcctctcagagtgaatcttgtacaagtgctgggctctgactctaaggtcatcactactgaaaccaaggaacttcagtttgaccttgataacaatgttcattacctggatattgccccattgaaaatagatgttgggaagtactcgcttgtttttgagatttctcttcaggaacaagaacatgaaactatttatgctactggagggacaaatactgaggcgatctttgtcacaggattgatcaaagttgataaggcagaaatcggaatttctgataatgatgctgggactgtggagtctgttcaaaagatagatctgcagaaagatactagtgtttctctttctgcaaaccatctgcagaagttgcggttatcttttcaactgagtacaccactcgggaagacatttaaacctcaccaggtgttcctcaagttaaagcatgatgaaagcaaggttgagcatttatttgttgtaccaggctctgcaaggcagtttaaaattgttctagactttcttggtttggtggagaaattctactacctttctggaagatatgacctggagcttgcagttggtgatgctgcaatggagaattcatttctacgagcccttggccatattgaattggacctgcctgaggccccagaaaaagccccaaagcctccggcccaggctgttgatccattctcaaaatttggtccgaagaaggaaatatcgcacatattccgttcaccagagaagaggccacccaaggaactctcatttgcgtttacgggcctcacgcttctgcctattgttgggttcttgattgggcttatgcgtctcggggtaaacttgaagaacttcccgtccttgccagcacccgcagcatttgcctcacttttccatgctggaattggagcagtgctgctgctctacgttctcttctggattaagctggatcttttcacaaccctgaagtacctcagcttccttggtgtcttccttgtgtttgtgggccatagggctctatcttacctttcctccacgtcagcgaaacagaagactgcttgagaggacgatccaaagaggagtattccgaatcacaaaattttcaagcgtcacaagttgcttaggttccttattttagcaccttcgctttgatattctgaccatttttcttgagcaacttcgagttacgagggacgagtcgatttcagttttgtgggggttaagaatactggagctagaatgtaggacctcaccttcttgtatgatgatgccctgatgtgttctcaatagacgtatgtttgatgatagaattaataatatcttattctgcaaatgc

SEQ ID NO: 25892 - DNA, 2131 bp, Oryza sativa
  ref <308>: DATABASE ACCESSION NUMBER: AK101334
  ref <309>: DATABASE ENTRY DATE: 2002-08-28
gcccaaacccctcctcacccgcagcgccccaacccaaccctccccgaggtcgcagccttatcctctcctctcccctccgcgaggaaatcatggcttcaacattcggtgccacttctacggttggcctcatggctgcgccaaccggaattgtatcagacaagaagccatcttctctatcttcggtgtcatctgtttctgttgccagccgaccacgcaatgcacgccttcagaggaagtgcaacttcagggtaaaagctgccaaggagttgtacttcaacaaggatggctcggctatcaagaagcttcagactggagtaaacaagcttgctgaccttgttggagttacactgggaccaaagggaaggaatgttgttttggagagcaagtatgggtcccctaggattgtcaatgatggtgttacagttgcaagagaggttgaactggaggatcctgttgaaaatattggagctaagttggttaggcaagcagcagcaaagaccaatgatttagctggagatggcacaactacttctgttgtgcttgctcaggggctgattgctgagggtgttaaggtcgttgcagctggtgccaatcctgtgcaaattacacgtggtatcgagaaaactgcgaaagcactagttgaagagctaaagaaattgtcaaaggaggttgaagacagtgagcttgcggatgttgctgcagtcagtgctggcaacaattatgaaatcggtaatatgatagcagaggctatgagcaaggttggcaggaagggtgtggttacccttgaagaagggagaagttctgagaataatctctatgttgtggagggaatgcagtttgaacgtggttatatctccccgtattttgtaactgacagcgagaagatgtctgcagaatatgagaactgcaagcttcttttggtggacaaaaaaatcaccaacgcaagggatcttatcaatgttttggaggaggccataagaggtgcatacccaattctgataattgctgaggatattgagcaggaggctcttgctactcttgttgtcaacaagcttagagggtcattgaaaattgccgctatcaaagcccctggttttggtgagcgcaagacccagtacttggatgatattgccattctaactggagcaactgtaatcagggatgaagttgggctgtcacttgacaaggcagacaaatcagttttaggaacggctgcaaaggtggtccttaacaaagagtcaacaacaattgttggtgatggcagtacacaggaagaagtgactaagagggttgcacaaataaaaaatctcatcgaggctgccgaacaagaatacgagaaggaaaagctcaatgagaggattgcaaagcttgctggtggtgttgcagtcattcaggtgggagcacaaacagagaccgaactaaaagagaagaagttgagagttgaggatgccctaaatgctaccaaggctgctgttgaggaaggtattgttgttggtggagggtgcactcttctgagactggcagctagagttgacgccatcaaggacaacctggagaatgatgagcagaaggttggagctgaaattgtaaggagagcgctgagctacccgcttaaattgattgctaagaatgctggtgttaatggaagcgttgttaccgagaaggttctctctaacgataacttcaagtttggttacaatgctgcaactggacagtacgaggatttgatggctgctggtatcattgaccccactaaggtggtgagatgttgtcttgagcatgctgcgtcggtggccaagacattcctcacatcggatgtcgtcgtcgtcgagatcaaggagcctgagcctgcgcccgtcaccaacccgatggacaactccggctacgggtactgatgactaagttacagttacttgttctccgggaaggtcactggccgtcaatttttgggtagtaggcttgaatctgaattttggtgagatttgagtagtttcgagacaatttgatttgttcccatgggaagtgaaataaacagggtcactatagcaaaatttgtggtgtaactggaacggctgtcaaattacgaaggaagatatttgaaagatttcatgctctctggggtttaccgttg

SEQ ID NO: 25893 - DNA, 1559 bp, Oryza sativa
  ref <308>: DATABASE ACCESSION NUMBER: AK101335
  ref <309>: DATABASE ENTRY DATE: 2002-08-28
tgagatttggagacacttgttttcatttcgctaaaaaaaaaataaaacaaaagaaaaaaaaaacaccacacgagcaaaatctccttggcccgccgccgccgcctccgccgtcgcgcggcgatctccaccaccgcgacgcgagcggcggtgcccggcggcgtccagctgctcccgccgccgcgtaccctcgcctctggctcctcctcgccgcgcccaagccaatctctccccacccgccacctcggcctctcgactcgcgagcgagttcgccgatctccatccatcacccctcgagccagcggcgccggccgacggcgtgcttccggtcctcccctgccaaagtgttggtgttgatttgaagcctcaaggattcgagcgaaatgacttcttccatgagcaaatccgacaagaagaaggtgctagattttgcggcatggagtttcaacatcaccacatccgttggaatcatcatggtcaacaaggctctgatggctacacatggattcagtttcgccacaacattaactggtcttcattttgtgacaaccaccttgatgactatcgtgtttcggtggttaggcctcagccagccctcccacttaccaataccagatctgattaagtttgtgatcttttcgaacttgtcaattgttggaatgaatgtgagcttgatgtggaactctgtgggattttatcagatagcaaagctgtgcatgatacctgcatcatgtctcctggaggttgtcttcgatcgtgtacattactcccgggacacaaagctgagcataatggttgtgcttataggtgttgcagtctgcacagttactgatgtcagtgtaaatgcaaaaggtctggctgctgctgttatagctgtttggagcacagctttacaacaatattatgttcattttctccaaaggaagtactctctgaactcattcaacctcctgggccacactgctccagcccaagcgggatctcttctgctagttgggccctttgtagatttcttgttgacaggcaaaagagtggatcactttggtttcacatcgattgctttgtttttcctgactctctcatgtgtcattgccattggtgttaatctgagccaatttatctgcattggtcggttttctgccgtatccttccaagtcctgggccacatgaagacagtgctcgtcttgtcccttgggtttctcttctttggcaaggaaggtctgaattttcaggtagtccttgggatgatccttgctgttgttgggatgatatggtatgggaatgcatcagctaaaccaggtggcaaagagcggcgcagcgttcttccagtaaggtctgagaagcctaatggagcattagacgagaaggatggcagtgagaaatagtacgtgacctgcgatttatatgacaatttcttctgtgaagtttttctggtgatgcaggtatgatatacaaaggaaaccttgcctggcgtcttcgtttagtgctgaagccgtagatttgccatctagaaactcagcattgtcatagctatagattacagtcaatatacacttgtcatc

SEQ ID NO: 25894 - DNA, 3431 bp, Oryza sativa
  ref <308>: DATABASE ACCESSION NUMBER: AK101336
  ref <309>: DATABASE ENTRY DATE: 2002-08-28
ggtttctctccccctcaacaacctccaacgccgcacgcccgcaccctaatcgccgcccgcgccgtctcccacctcgccggtgtcctccgcgccgcccccaatctccgacttgtcgaccgcctccgcgtgtgccgacggcttcgccgccaccgatccggagtcgcctgagtcgtcgtcgccccccccccccccaccccaagccgatctcccacacccgcgccacctcccccatcgctgtttcatccatcttctcgtggtcgcctccgcgctatatcgcccgccgccccgcctcctctgcttcgacgcttatcccctcagccgccacctccgccgcggtcatcgacatcatcttcccgagcgcctgaggaaagggattcacgccgctacaatgccgagaccgagcggagaggtggtttgaggccagtagagctgtacggcaagttttctcttttgttgtctttcaatctcttctcccttccgatttgattttgattgtgatgagcaaactattttgacttatactacccaattgattttgattgcgatgaacgagtaaagctattttgcccatgcacatgaggtgttcgattgaatgccgcagaaacaatctgccactctgttcatggaaaaactttagaatccagtgtcaaaatccccaatgatatagtgaatcacaccctgctcatccagcatcggcttctttaacccagtaaaatgcattttaacaaccactgacggattattttgtgctgtccatagttccgatagagcaatcagttttgatcttgtaaattgtaagcacctaatttggagttcgacagctggcaacggcatgttttgtcagggtacccgtcgccaggacgccgccgacgccttacacggtggttattgatctccacgccttggcctacagcaatggacaacgctgttgggatccctaaactcatgatttgtatctaataacagttgaatttaacttcagaatattgctgccagcttccggcctcctcaacatcagatcagtgtttcagcatttgattgaatttcttacattgggtttccaacaagtcgtcgtcgattactcgtcgtctggtccccttcgcgcctcctcgcccccacgccgctagccaggctacagccatcctggtgtttttagtgctgcacctctctatatatatcctttctagaaatggataagattgttgggggctccacaacatcaactacaaaatcaggccctcttgctgacataaccaatataagtggttccggtttggcaaattgacggggcaaggttggaaacaagtcgttacgtgccgttgaaagatacgacgagaattgtgatgtctttacaaataacactcccaactgcttcaaatgttgtgcatcctgtggtgacgcctaatagtcatccatgtgcggaaaaccgcgatgcgtccttcaatacacccagcaatgtgcatatgtgtacaggtttgcatgaagatgttagtcaccttagtgtggctgaactaaaaagaaagcgtgctagagaccggtacgcagcattgaccccagagcaaaaagatgataggaacaagaaggcacgtgaaagaaggaaaagaaagaaggaggaaactcaagtttcagccccacttggcgatatttcaaatataagcgctgttgatataatgaagtgccaattggaagtgactgattcttccccgctgcatcaaggaaaaagtgaagcttcccatcttaatatcacaccaagacgtctcccatttacaatcatcaacaatgtagctcactatggtcccaacgaagtaccaatgagtcgcttcactcaaagtacctaaacatgaatacttctgactttgtagttgataattcaggatgtgaaaatcaatatgaatccagtttttttgaaggcagcgatcaaaatgagtgcgaccacgatgacgacatctctctaggtaacacattttacttcatcacatgttttttttatataaacttgtcaaacataaaacctctttgcttacatatgagaagtgcgctaagttagttattattatctattcatgtttgtacaatttaatatttgaagtgagcaaacaatcccataaatctactcatgatgatgttggcacatcactagataatgaattggtgcgtgcgccaaccaatgagacaaaagaacgattgcagtcaaagctagctcgagctagggagaagtatgcaactcttacaccggagcaaaagcaagctaaggtggaccaacggagaacacaacgtcaatcactaacaaaagaacagagactagagttgaatgcccgtcgtagggttgcaaggcaatctatgccagatgtggaaatccatgatatgaatgcttgccgtagatcaagacgacaaaatgttactcctggggaaagatctgctcatctggcacgacgtaacgcactctatgcagctaggcgtgacaaaccatgcgctgaatccattgcactagagtgccctgagggatctatcccattgttgctaaatccaacgccttgcttggaaacaaccggtgatgtgccatctacatcgagcctgcaaactgagcatgctgtagatcatcaggcgcgatcatgcacattcaatgatggtatcatctatatatgttttcattcgtactcgcaatttgggggaatttaactatattccacttttagatttggcaactatccaaatgcccttcttaagtttgctcttaattttttgcccctcttagatggtggcttcttaactatttgtcactgttggccatgtggcaatccatggcaaaagtgccaattagttaagaaacgtaacaagggaatttggataactgccaaacctaaaagtggcaattagttaaattcccctataatttgtacccttccgcatactaacttctcatatctcattgtactaaagatgatatggattccttcatggatgatgactccgacgatgaatactacatgtttgctgggctaggcgacgatgaggatgacgagatggtacaatctgatgacgatgacacgcaatcaccgacctcttctgttcctgatccgtatgactatatgtacagcaacattccacaaagcacaaatgttctgaagcctgaacctgactgtaaacactgtggtgccaagaggttccagtacgaaccgccgagcttctgttgtcggggtggcaagatcaagcttgtacaaaatgaaacacctcctgaactgatgaggctttggacaagctcggatccagacgccaagcatttccgtgataacaatagatacttcaacggccacttctcattcactacccttggtgtaagccttgacaaggcctttgcaaacatgagttcgggcgtgtacacttttcgggctcatggtcagatatatcataatatacattctttcagtcct

SEQ ID NO: 25895 - DNA, 2119 bp, Oryza sativa
  ref <308>: DATABASE ACCESSION NUMBER: AK101337
  ref <309>: DATABASE ENTRY DATE: 2002-08-28
gattccccccccccccccctctctctccctctctccctctcacgagcaacagggcaatggcggcggcagtggctccgacgagcggcggtgtcggcggcggctccgaggagtggtgtgggcggtggctccgcccgctctcctcgccgcctccgccacttcccctccttgcccccttcgccgccgaccatgacgagcgatgacgacagctcgctgcctccgccgccggctcccctcctcgccgcctcctctgctggccacgacgcgcgacgacgatggctcgcctcctcgctgcctccgccaccggcatccctcctcaccgcctccgccactggccacgacgtgcaatgcgccggctcgcctcctcgccgcctccgtcgccaacttccctcctcgttgcctccgccgccagccacgacgcgcgacgacaacggctcgcatcctcgccgcttctgccgccgccgccggctcccctcctcgtcgatgcgacgatgacgacgaagaacgcgccgacgcgacgatgaccacattgaggcgacgacaacgtcgatgactgccgtgacgatgatggcggcgacgcgacgatgatgacaatgacgcctgtggaggccggcagaaggaggaggagaggcggtggctcagatcctccctctcctatgtggggtggcggacggaggagagccgtcagccggagggggaagctggtagcggtgcccgtgggtagggctgccgccggtgggtaggggtggtggatttttttttatttgctgagatgattttcgcaggcgggcacgttggtccccgatggctatcccacccaccacggatcgattatcgcatttagtgggtcaagttttgttggtgcgctcgttaagccagctcggtttatgttagatcatttaatcacatgagaaaccacctggttatccgggtcacatcagttcaactgcgataattgagctgctcatgctatttgttccagttattccgttcaaccgccagtttggtccgaatttcttactatatatgcttataacacaaggagagttagattatttcactcttgtgcttggttaattaattcattcacggattaaggtggccaaaatgcctaacctgagttttggatattcacatgcatgaaaaatgatcacaattgatgtgtgcattagcacatattattggaactagtctatataaaatcactacaaatttatatcttactaacgtatactgcttaatttggattgcagggattgttgcaatcggttgtgactatgcatttgctagagactttgccgcccctgtgcatgctggtcttggtcctaaaacaagccccgtactctctcaatccctctcataaccctaattctaaacaaatcatataaaaataatgacatgtttattatgaatttggtccaaaatagactaactagatatgctatttaatttattgtacacacaaggaaataattgaccagatattgtttccgtattcaaatgtgcagaaggacgcaccattacctcacttgtcgatatacataaagaacatctataaaggaatgcacgggagtgacacaggtgcactagatgctaaaggaaggtttgttcctgcaaagtttgaggaaattttctcgaaacacgcaaaaaatagaccagatgcattaacatccttggaggtcaaagagatgattctagcaaatcgagatccagatgacccacaatcatgggctgcacctatacaggagtgggggctaatttatggtcttgcaagtgataagaacggatattttcacaaggatagtgtgagaggtatatatgatggtagtgtgttcgtcaagttggaggaagagagggcatcttcacaaagtacagtttgccggagcctatcatttaggagtactgtataaagtaattgggaaatgaagttatcccaaatacattgtattgcatcataggtattgttcgtgtacttacaaaatgccatatttggagaagcactggtgtatggtagtggagttatagttgcatgactttaatcattatgatttaaatcttggtttatatgaatattatgtatatacggatgcactcttaataagatttgaaaaacctattttat

SEQ ID NO: 25896 - DNA, 1899 bp, Oryza sativa
  ref <308>: DATABASE ACCESSION NUMBER: AK101338
  ref <309>: DATABASE ENTRY DATE: 2002-08-28
gagtggatgaaactccaaggctgattcaatttgccagtgtgtgagaaacgagaaacaaccaagaggctcatcaggatcaagtggctgatcatcatcatctctctctaggatgtagagctagtggtgatcatggtgcaaggtgaggagagttcttggaggatggcagcaagcacccaccatgagagagcaatacctctcaaccaagcacttgcctatggagtccaagcccatgcttctccttctgttgctgctgcaccacctgccagcttcttggacttccagcctgctgccgcggcagctgcctacttcggcgagctggaggaggccctcatccatggcgccaacgccggcggcgtcgtcgatcccggcatgatcagagccgacgtgcacagcaagtcggcggcagcggcagcgacggcaggatatctcgcggccaggccccccacgctggagatcttcccttcatggccaatgaggcagcaacagcagctacacagtgggaattcgcagtcagtcgggagcaccactgactcgagctcagcccagaacacaatgccgcagatggagttggtgtccccagcgagtatcagggcctcctccgagcaccagcaccagcagcagcagccggggcaggaggtcatgatggtgaccactgatgattacagctacaagccaggcctcgctgctgcctccccaagctttcagcagcagcatcagctccagcaccaccagcagcagcagctgcacggaggaggagaccatgacaagaggaagcatggatccacaagaaaagatggcaagtcagtggatgccaagacagaacggagattagcgcaaaacagagaggctgcgaggaagagcaggctgagaaaaaaggcttatgtgcaaaacctagagaccagcagggtcaggcttcagcagatcgagcaagaactccaaagagcacggtcacagggcctgtttcttggggggtgcagagcagcaggcgacatgagttctggcgcggccatgttcgacatggagtacgcgcgctggctggacgacgacagcaagcggctgaccgacctccgtggcggcctgcaggcgcacctgctggacaccaaccttggcctcatcgtggaggagtgcatgcagcactacgacgagctgttccagctcaaggcggcgctcgcgcgctccgacgtcttccacctcctcaccggcacgtgggctacccccgccgagcgctgcttcctctggatgggcggcttccgcccctccgaccttctcaagatactgatacagcagctggacccgctgacggagcagcagatgctggggatctacagcctgcagcagtcgtcggagcaggcggaggaggcgctcgcgcaggggctgcagcagctgcaccagtcgctcgccgacaccgtcgccgccggcacgctcaacgacggccccggcgtgcccaactacatgagcctcatggccatcgccctggacaagctcgccagcctcgaaagcttctaccagcaggctgacaatctgaggcaacaaacgttgcatcagctgcggcggattctaacaacccggcaggcggctcggtgtttcctctccattggggagtattaccgccgcctccgtgctctcagcaacctctggtcttcacgtcctcgcgagaacttcattggcaccgagagcgtcagtcccacaggaaccgagctgcaaccgatgcataatcagcctcagcagaatcagtactcaggattttgagagcttctcctggaggatgtaaactccggccaaaagtgatgttagaaagagagggtgggagagggagaggggttgtaatgttctattattaaagtattgagaaagcaacatcactaggaaaaggaagaggcaaaaatttgttgaggtgct

SEQ ID NO: 25897 - DNA, 3774 bp, Oryza sativa
  ref <308>: DATABASE ACCESSION NUMBER: AK101339
  ref <309>: DATABASE ENTRY DATE: 2002-08-28
ggtcactccctccgccgcctctctcccctccgcccccgccgacgccgccgcggcggaggcgcgcgcgggcctcctccgttgttggcgtggcttcacacctgacgacgcgacggcatgcaaaaggcgaaggtgagagaggagaaagaaaggaacagagaggacaggcgcattcaattctcccatttaccatcgccacctacatcgccttcccacccagccagccgcattcaatgccctccccctctctcctctcctcctctcactccccacaccaccaccacccatccgcgccctctcctcctcttccccggggatccagcacggctacgccgccgccgccgccgctgccgccgtgcaatgcccgtggcgcctgctctcccaagaaaagcttcccttcttggtacatggtcgtcgtctccccttccccgattgcctcgccgccgacattcccctcgccctcgccggaccgccgccccccctgctccgaggcttagtttgctgcggattgggattcgtttgctgctgctgttgcaaaggtggaggagcaccagcagtcgcattttatcccgaaagattggggattgtatgcttccactgaaccccgatgcgccacgttagccgctgcaccatccctgattggaaaaataattttgtgtagacccctccaagtttcaagaaatggacattgtgcctgttgtagcattgtgctgctgcctggtcttgctgcccagttgggcctatggccttggatccatggcgtccatcgccgtgtcctacggcgaggacggccccgtgttctgcgggctcaactcggatggttctcacttggtcacctgcttcggcgcggatgcctccgttgtgtacggtgcccccagcaggatcccgttcgtaggggttactgcgggggatgggtttgcctgtggcctattgctcgacaccaatcagccttactgctgggggagcaactcctatgtcaagattggtgtgccgcagccgatggtcgagggagccatgtactcggagctcagtgcaggagacaaccacctttgtgccctacgaacatctgtcaaggggtttcacagcttgaatggagatacatcggtgattgattgctggggatacaacatgaccgccacacatacagtcaccggagctgtatcggccatttcagctggttctgtgttcaattgtggcttatttgcacggaacaggacggttttctgctggggcgatgaatcggttagtggtgtcattgggctagctccgaggaatgtgcggttccagtctataggagcaggtggttaccatgtctgcggggtgctggagaatgcgcaggtattctgctggggtaggagcttggagatgcagcagatgtcaacacccagttctactgatgatggtgatgtgaacatagttccgatggatgcaatggtctccgtggtcggtgggcggttccatgcttgtggcatcaggagtcttgatcaccaagtggcttgctggggcttcacacttcagaacagtacacttgcaccaaaagggctcagagtttatgcaattgtggctggagattacttcacttgtggggtgccggccgagacatcgttgaagccaatgtgctgggggcatagtggcccattagcactaccaatggcggtatcccctgggatttgtgtatctgattcatgcagccatggctactatgaatacgcaaaccatggtgaagttggcagtggtagcaagacatgtaaacctgcaaattctagactctgcttgccctgcagtgttggttgcccagatgactcatatgagtcatcaccttgcaatgccacagctgaccgtgtttgccagtttgattgctcaaagtgtgcctcagatgagtgcgtgtcattttgtttgtcccagaaacggaccaagaaccgcaagttcatggcttttcagctgcgtatttttgtggcagagattgcatttgccgtcatattggtgttcagtgtgaccgctattgcttgcctgtatgtccggtacaaacttcgacattgccagtgttcaaagaatgagttgaggctggcaaagaatacaacatattctttccggaaggacaacatgaagattcagcctgatgtagaggacttgaagatcaggagagctcaggaattctcatacgaggagttagagcaagcaacagggggcttctcagaggattcacaagttggcaaaggcagcttttcatgtgtgttcaagggcattctgagggatggtacagttgttgccgtgaagcgtgcaattaaggcatcagatgtgaagaagagctcaaaagagttccataccgagcttgacctcctctccaggctcaaccatgcgcacttgctgaacctgcttggctattgtgaggatggcagcgagaggctcttggtttatgagttcatggctcatggatccctctatcagcatcttcatggcaaggatccgaacttgaagaagagactgaattgggccaggcgggtcactattgctgtccaagctgctcgggggatcgagtacttgcatggctatgcttgcccaccagtaattcaccgagacatcaagtcctcaaacatactgatagatgaggatcacaatgcgcgtgtcgctgactttggtctatctatattgggcccagcagatagtggtaccccactatcagagctgcctgcagggacacttggctaccttgatcctgagtactaccgtctgcattacttgacaacaaaatctgatgtgtatagcttcggagttgttcttctagagatcctaagtggcaggaaagctattgacatgcagtttgaggaaggaaacattgttgaatgggcagtaccattgatcaaagctggagacatttctgcccttcttgatcctgtcttatctcctccctctgatcttgaggctctcaagaagatcgctgctgtggcatgcaagtgtgtcagaatgcgagccaaagaccgcccttccatggataaggtaacaacagctctagagcgtgcccttgcactgctgatgggtagcccgtgcattgagcaacctattctgccaactgaggttgttcttgggagtagcaggatgcacaagaaggtatcgcagaggtcatctaaccattcgtgctccgagaatgatctcgttgacggggatgatcagcggattgagtacagagcaccatcttggataacatttccaagtgtgacttcatctcagaggaggaaatcctcggcatctgaagctgacatggatggacgaacaaccacagatggaaggaacgttgggagcagcataggtgatggattgcggtcgctggaggaagaaattagcccggcctcaccgcaggaaaacctgtacttgcagcacaacttctgatgaaatgtcaagaacagttgaaaattcaggcaactgtctgctgtttatggtcagcattgtgaattcagccaatgtgacctgccgttgctatattggaaattgcattgaaatgtttataaatccaatggtacctggccatctaaaagggagagagaactagctatagagagcactggaagaaattttagcagccggaggcatttctttgtagattattttaaatttttttggctctctttcctgatgttatttatatgtggatggtaacatttgatggatgctcatctgtagcttacagatctgtaccctaaacatcttttgcatgtctagtcttgctttttcctgcaaatttcaatgctgtatgccaatcaaaatgcaacttttaggttc

SEQ ID NO: 25898 - DNA, 2261 bp, Oryza sativa
  ref <308>: DATABASE ACCESSION NUMBER: AK101340
  ref <309>: DATABASE ENTRY DATE: 2002-08-28
gctaattacccccagcttcgccgccgccgtcgtcgccgtcgccactgcagcggcagccatgaagcagaggagggaggaggagaagaagaagaaggacatcctcgcgggctccgacaatgagtccgatggaggcggcggcgaggaggatctctccaagatccagatcaacgaggagtacgcccgccgcttcgagcacaacaagcggcgggaggcgctgcagcgcctggaggagcgcaagaagaagggcctcgtcccgccggaggaggaggaggaggaggacgacgacgacgacgagtccttgtcggacgacgatgacgccgccatcgcgtcccgccgcgtcgaccgccagatgttcgaggtcatccgccgcatccggcgcggcgacgccgccatcctcgacgcgaaggccaagatgtattcctcctcgtcggagagtgaacccggcgacgaggagggggagaagcccaagaagacgaagaaggagcggcccctgtacctcaaggacgtgaacgctcgccacctgctcgaggagggccccgagttcgcggcgcaggctagccatggcggccacagcagcagcaagtacgacaagatcgcctacgacgagcagcagaggaaggggctggaggctttccttgcggcggagaaggcggcattaggcaatggcgatggcgatggcggcgaggatgatgacgatttgttccaagtgaagccgaagggtggagatggtggtaacaaggaggatgatgacgaggagaagaaggagactgagcagatactgattgatattttcggcaaagacgaggagctggacgagaacagcaagttcctgaagaaattcttcctcgagaggccgtatctcgagacgggcagcgagaagaaatactctccggatgatatccaggaggtatcggacgaagaggagcatctcatagagcaggaggattatgagaccaggtataacttccggcatgaggaagcagccgcgactggtgcggatgtaatggacagggtgatggggcattcgcggtttgtcgaggggtctgtgaggaagaaggagagcagcaggaagcagcagcgcaagaacaaggaggagcggatagcacgggccaagcaggagcaggcagaggagttgaagcgtttgaagaacttgaagaagaaagagatcgccgagaagcttgagaggatccggatgattgccggaattgatagcgatgcagcttgcaagctcggagccgatgacttggaggaggattttgatcctgaggagtatgacaggaaaatgaaggagacattcaatgacaattactatgaagcagatgatgttgatcctgaatttgggagtggtgaggaaattgatttggaaaaaccagactttgacaaagaagatgaactgcttgggctacccaaggactgggctcttgatgggcaagatggatcgtctgcagcagctgagggggcttctcagaaaaagaaaggtggaaaagatattgcaaatggtgaggggacaaatcagaaaatgaaaggaaaaatttctttgaaggacaaggtggagcttgagaaggagatggaagagtactacaagttagactatgaggacactattggagatctgaagactaggttcaagtataagcaagttaagccgaacagtttcggcctgagcacctatgagatattggcatcagatgacaaggatttgaaccagtatgtatccatgaagaagatagctccttacagggaggcagaatggaaggtgacgcatcataagaaactgatcaaggattcgatccttggaggacaggataaagaaggcaagaaggtcaaaaagaagaagtctaagtctgaggaaggccctgcttcatcagaaccagagaaggagctgccgaatgaacagggggatgcagatggcaaggcaaaatcaaccagaagtgaacgaaggaagcgtaggaggagggagttgaagatgaccaccgaaaggcaagcagcctatggaaagataaaccctaagcgtcacaagagccattgagctttggagattcggcatagttcatctagaaaattattatttttttgtttatgtgatgcatttttgtctgggcgttgtccttgtggaagcatctgtttagggcattcatgatatatctggagctgtgaacccgttattgtcacagtggtaacatatggttctatggaagttttgcttacatattgtaatttcatgagccatataatctttttgtttttacatttgcctctgc

SEQ ID NO: 25899 - DNA, 3092 bp, Oryza sativa
  ref <308>: DATABASE ACCESSION NUMBER: AK101341
  ref <309>: DATABASE ENTRY DATE: 2002-08-28
gagagataactagcagagcactcgcggaggcgaggagagagagagagagagagagaggttggaagaggaggggagagtccacgtgagtgagaggaggaggaggaggaggagatccctctcccgcgcgcatccgcccctctcgccgatccccaattcgccatggatccaccctacgcaggagtacctattgatcctgctaaatgccgattgatgagtgtggatgaaaagcgggaacttgtccgtgaattatcgaagcggccagaaagtgctcctgacaaactgcagtcttggagtcgccgtgaaattgtagagattctttgtgctgatttaggaagggaaaggaagtacactggattatcgaagcagagaatgttggaatatctcttcagagttgtgactggcaaatcatctggtggtggcgttgtggagcatgtgcaagagaaggagcctacccctgaacccaacacagccaaccatcagtcccctgcgaaacggcagcgaaagagtgacaacccatcacgactaccaattgttgcaagcagtccaactacagaaatacccaggccagcaagtaatgctcgcttctgccacaatttagcttgcagagcgactcttaatccagaagataaattttgcagacgctgttcatgctgtatttgtttcaagtacgatgacaataaggatcctagcctctggttattctgtagttcagatcaacccttgcagaaagattcttgtgtattttcgtgccatcttgaatgtgctcttaaggatggaagaactggcatcatgcagagtgggcagtgcaagaaacttgatggtggttattactgcactcgctgtcggaaacagaatgatctgcttgggtcctggaagaaacaactggtgatagctaaagatgctcgccggttggatgtattgtgtcatcggatttttttgagtcataagattcttgtctccacggagaagtacttggttttgcatgaaattgttgacacagcgatgaagaaactggaggctgaggttggtcctatatctggagttgcaaatatgggtcgtggaattgtgagccggcttgctgttggtgctgaagttcagaaactttgtgctcgagcaatagaaaccatggagtctctgttttgtggatctccttctaacttgcaatttcaacgttcacggatgataccatcaaacttcgtaaagtttgaagctataacccaaacatctgtcactgtagttttggatttgggtcctatacttgctcaagatgtaacatgctttaatgtatggcacagagtggcagccacaggctcgttctcatcaagtccaactggcatcatacttgcaccattaaaaacgttagtggtcactcaacttgtgccagctacaagctatatattcaaggtagttgccttcagtaactacaaggagtttggatcgtgggaagccaaaatgaagacaagctgtcagaaggaagttgatctgaagggtttgatgccaggtgggtctgggctagaccaaaacaatgggagcccaaaggcaaacagtggtggtcagtctgatccttcttcagaaggtgtggactcaaataataacactgcggtgtatgctgatctcaataaatcaccagaaagtgattttgaatattgtgaaaatcctgagatacttgattcagacaaagcaagtcatcaccccaatgaacctacaaacaactcacagagtatgccgatggtcgtagctagggttacggaggtatctggattggaggaagctcctggactctcagcatcagctttggacgaggagcccaattcagcagttcaaacacaattacttagagaatcctcaaattcaatggagcagaaccagagaagcgaagttcctggatcacaggatgcatcaaatgctcctgctggaaatgaggtggtgattgttccacctcgatattctggctctattccaccaactgcacctagatatatggaaaatggtaaggatatcagtgggaggagcttgaaagcaaaacctggtgataacatccttcaaaatggctcttccaagcctgaaagggaaccagggaattcttcaaataaaagaacatcaggtaaatgtgaggaaatcggccacaaggatggatgcccagaagcatcttatgagtactgtgttaaggtggtcaggtggctggaatgtgagggttacattgagaccaacttcagagtgaagtttctgacttggtatagccttcgtgctacccctcatgacaggaagatagtcagcgtctacgtaaacactcttattgatgatcctgttagcctttctggccagcttgctgacactttctctgaggccatctacagcaaaaggccaccttctgttcgctccggtttctgcatggaactttggcattaaagagaggggagctcgtaccgttctctttgtaggggagcatattttggtcccattctttcgtagcagatcgttgcattgattcttcattggaaatttcattgaagcggttaacttatacaatctgttcattgctctactttatttgctatgacagtaggtttaatttatccagcaacttatttctgttttttcacttaggagtccatagtttacagttctgttatccgtaccgccatgttggtacagagcatcaagagctgtgctcttttggtcagctttaggaacattctgaaattgccacaagtgtgtgggtacctgaagctctgttgctagctgctgtgagagggagggatgattctcaggatgtaccgggaaacattgggatgaagcaggcttcgtgtcgacactgacgaatccgagctaaccatgccttgtcaggataaatgatgatgtggtgctgtatctggggttgaaagaaatgcaaatgtgctgctgacttctatggggaatgggaggagtcctgatgtttttccttttcttaagacaatagatgcaaaatgtctgcactaatgttatgttcggtttagacccttgcttttactgtctcctactgcactttcttgccttctagttctaccgtttgagaagttaaatttatgtgcacatgcaaaaaggtttggacc

SEQ ID NO: 25900 - DNA, 1281 bp, Oryza sativa
  ref <308>: DATABASE ACCESSION NUMBER: AK101342
  ref <309>: DATABASE ENTRY DATE: 2002-08-28
gaggcgatgcgcattggtcgggggaattcgggataagcagcgaagtcattcatggtcgcgccagcgacgccgaggccgtcgcggatcctgccgcgagcgtcgcactcccactcccagccggccgccgtcggcctcgcgtccgaccgcgccgccgccgccaccgtctcctcccgccgccgccgcaacttcgtcttcgtcgtcaacccctccggcgccaatggccgcacgggcaaccagtggaagcagctgctcccgcacctccgcacccgcttcgctgaccaatgcgatatttgtgagtgcatcacctcggccccgttcgacgccatagatatcacgagggaggctgtaaaggatggggctgatgccgtgattgctgttggtggtgatggaacacttcatgaggtcgtcaatggcttcttctgtaagggaagtcctgtccatgctcttgatcaaggacctgatcattccacagcgcttggtctcattccacttggaactggttcagactttgcaaggacatttggctggacaaatgatcctcatgaggcgattgatcgaattgtgagaggagtcaaatcaaaactagatataggtatgatggaaggcccagatggaaacccacattattttgttaatgttgctgatatccatttgagtgctaaggcgggttatttttcttctatgtacaagagatttggcaacttatgctatgtttttggagcgctcagagccttttggggacatagtaatcgagatcttagaataaaggtaaatggtggagaatggaaaaccattcgtaaagtcactgcactatgcataggaaatgccaaatacttcggcggtggtatgaagatcactccaacagctgatcctttcgggggtgaccttgaggtcgttattcttcaagatttcaaatggcatgatttcctgctcaagcttcatagattgtatggaggaactcatctatcagtgactggtgtgtcatcgataagagttcagtcgattgaagtagcagaaaaggaagttagtgctgacatctttgtgcaatctgatggggagcattttggttttcttccaaccaaattttcagttcttcccggtgcagttgatttcttctgctagattagtatgcttcttcctgtgggatacaaaggtttcttaatccttgtcaagtcactacgtgtactttgaactagctgtgttattttgaagtgatatcgtaattgaatagttacattcattttctggcaatacatgggataaaatctgttgtcacccgcc

SEQ ID NO: 25901 - DNA, 2667 bp, Oryza sativa
  ref <308>: DATABASE ACCESSION NUMBER: AK101343
  ref <309>: DATABASE ENTRY DATE: 2002-08-28
gatctcccccctctttttttcccccaaatctcgcatcgccttgtctccccctccccccgtgcgcctccgatccggcgccaatccgccgcggaatccggcgaatccggcgggggcacgggcgcggcgcggcgatttggtcggggaggcggcgcggggcgctgcggatcgagctccgggtcgacggatttggccgcgtggaacgggagctcgactcgatttttgcggaggcgcgcggtcgccggaggcgggagagggagagggagagagagggacggcatatgcgtgtgacggtgacgcccaaggacgaggagaggctggtggtgctcatggcgcgggagcggccgcggtcggcggtcgtggcacccgggggagacctcgttacggcgggtggcggcggcggtgggggagggggaggggaggggtccgacggggactcgtcggggtcgctggaggagatcagcgccgacgacttcaagaaggagtcgtcggccgccggcggcgcggcggcggcggccgcggcgcagcagagatctagggtttggatggggtacaacatcccgcggagctacgcgccggcgttccacagcttcacgtgggcgcaggccgtgcagaacaagccgctcgtgccccgcgccgccgacgccgccgacgaggacgaggtggagcacgtcgtggacacctcggacgaggagaaggaggagggcgagatcgaggagggggaggccgtgcagaccaccaccacctcctcctcgtccccgccgtgcgcgcagccgcccgaaaccatcgacctggactccgacgcgccggagaagtccgagtcgatggtggccatgtatggcggtggcgccgcgccggccggtgctgaggaggaggaagtggactttgaccagcgtgtggggagtatactcgaggagcttgagatggtctccattgaggaagctgagaagtcgtttgagggtgcatgtacgcgtctgcgaacgtgcttcgagaacctgaagccgttattcccagagagcgggagcccaatgcccatgcttgatgcccttgtgcagcaggcgtttgttggaatcgacaccattaccaccgtggcaaattcgtatgacatgccgaagagggagcagaccaagaacatgcttcttaagttgttattccacataaaaaacagatattcagacatgctaacacctgaccaacgagatgagctggatagccgtgtgaggcagttagtgtttgaggatggaaaagacaatgcaaatggtccaaatgccacttcaactaatgctgcagctccatctggtcaggttttatcagagagactaccatttgaatcaggagcaggaaattcatttagcaaggttgaaataccagcaaagaatagaatggttagccccttgttggatcttcatgcagattatgacgaaaacagcttaccctcaccaactcgagatagtaaaccaccttttgatgtgccaaagcccattggatatggagcacttccaatggcacctgacagaccatcggttctagaaagagttgagcctgcgaagaattcttcgtatcaatcctttaacgatgcactgaaggctgtttgctattaccaacagaagcatgggcagaagtctaactttgcaagcgatgatctaccaagtccaactccttctggtgatggagataaatctggagacaaagggggtgatgtatttggtgaagtttcgagcttttctgcttcaaacaagattgcgttgccaattgtgaatcagatgccctctcgacctagcacagttagcagcaacagtgacagttttgcaggtggtccaccaggttatgctaaacagattgaaaactctgtttcaggatccaaccacctgctaaaagctacagctaaaagtagagatccaaggcttaagtttttaaatcgtgatactggtggtgttgcagatgcaaaccgacgtgtgaattttgcagaaccaaatccttctaaagataggaccatgggtggtggagtatcaatcaatagccgtaagaataaggcagttgatgaacctatggtggatgagaacgcgttaaaaagatctaggggtgtcattggcaacctgagagatatgcaacctacaggtcgaggtgggtgggctaaagatggaggtaatattagctcatattctagtgatgggtttcagccaaatcaaaatacaagacttggaaataacacaactggaaatcataatatcaggacagatagtacacttgctagtaacttaaataatacgacaaataatagtggaactagtcctggaattgtacaagcaccccaaactaattcagctccgcaaaccagttctgctcctgctgtttcattgcctgctatgttaaaagacattgctgtcaatccaacaatgctcatgcaatggattcaaatggaacagcagaagatgtcagcatcagaacctcagcagaaggtaactgcttctgttggcatgactagtaatgtaactcctggcatggttttaccacttggcaatgctccaaagaccacagaagttgcagcagtcccttctgttagaccacaagttccaatgcagtcagctcccatgcactcacaaaatgatactggagttatacgtatgaaaccacgtgatcctcgtcgcatactccatagtaacatagtgc

SEQ ID NO: 25902 - DNA, 1195 bp, Oryza sativa
  ref <308>: DATABASE ACCESSION NUMBER: AK101344
  ref <309>: DATABASE ENTRY DATE: 2002-08-28
gaattcatccccaagtccaccaccacacacacacacacacgcacaccactcctctccccacaacccatccactcccacgccgccgccgccgcccggatcgccgcgagatggagcagtacgagaaggtggagaagatcggggaggggacgtacggggtggtgtacaagggcaagcaccggcataccaacgagacgatcgcgctcaagaagatccgcctggagcaggaggacgagggcgtcccctccaccgccatccgcgagatctcgctgctcaaggagatgcagcatcgcaacatcgtcaggctgcaggacgtcgtgcacaaggagaaatgcatatacctcgtcttcgagtacctcgaccttgacctcaagaagcacatggactcatccccggatttcaagaaccaccgcatagtcaaatcgttcctctaccagattctccggggcattgcgtactgccactcgcaccgtgttctccaccgagatttgaagccccagaacctgctgatagatcggcgtaccaactcattgaagctcgcggactttgggttggccagggcatttggcattcctgtccggacatttactcacgaggtggtgacattgtggtatagagcacctgaaattcttcttggtgcaaggcattattccacccctgttgacatgtggtcagttggttgcatttttgctgaaatggtgaatcagaagccactatttcctggagattctgagattgatgaactctttaagattttcagtattatgggcactccaaatgaagaaacttggccaggtgttgcttcactacctgactacatatcaactttcccaaagtggccatctgtggatcttgcaaccgtggtcccaacacttgattcttcaggactcgatcttctctctaaaatgctccgtttagatccaagcaaaagaatcaatgcccgtgctgccctcgagcacgagtacttcaaggacctggaagtggcgtagattatgcctcatcttgtccatttgtaaattaagattgcattgtttgctcagccgagttcttttttggctttccttaatctaagttggtgtgctcctcccccaactctatttttgcccttttggttgtgtagagatgagaacagaaggtacctcctggctatccctctgtgtaattcaagccaattgaaagatccttattgcgggagccc

SEQ ID NO: 25903 - DNA, 1112 bp, Oryza sativa
  ref <308>: DATABASE ACCESSION NUMBER: AK101345
  ref <309>: DATABASE ENTRY DATE: 2002-08-28
gagccacctgcggatctgccccaatgccacagcatcatcaccgtctctagccagagccgcgaaggccgcggcgtagctgctcctgcaccagggacgctcccatccacgaatcgtgggtaacgcaccgagagcggcggcgcacggaagccacggccatgggcggcggcggcggcgacgacgcgctgtacgcgcgatgcctggtgatcctgtacctgatcagcccgatcaccgtgttcctgctccggttcgtgtcggcgccgtacgggaagctctcccgccccgggtggggtcccgccgtgccggcggcgctcgcgtggttcctcatggagagccccaccatgtgcctcccgcccctcgtcctctccgccgccgcctcctcgtcggcgctgcgcgccgccgctctcctcccggccgcgctgtacgcgctccactacgtgaaccgcacgctcgtccacccgctccggctcctccgcctccgccgcgcgccggcgcccgttccgatcctcgtcgccgccttcgccttcggcttcaacctcctcaacgcctacgtccaggcgcgctcctgggcgctcgacgccgccgctccccacagcaccgccaccgccaccgccacgcccgcggccgtcgcccgctgcctcgtcgggctagccctcttcgcgtgggggatgcggaccaacatcgcggcggacaaggcgctcctgaggctgaaggaggccgggaaagggtaccagattccccgcggcgggctgttcgacgtggtcacctgccccaactacttcggcgaggccgtggagtggctcggctacgcgctggtggcgtggacgccggcggcctgggccttcttcctctacacctgctccaacctcgggccgagggccagggatcaccgccggtggtacgtcggcaagttcggcgacaagtacccggcgtcgcgcaaggcgttcgtcccgtacatctactgattcctctgttattgctgatggatacgtatcggccagggagtgatgcgcattgtgcttcacctcgaaacagcttttgattcatactgttggcatgcgcatgtggttctgttggattggaataaaaatgagccgtatcgtggctgtttgtcc

SEQ ID NO: 25904 - DNA, 2131 bp, Oryza sativa
  ref <308>: DATABASE ACCESSION NUMBER: AK101346
  ref <309>: DATABASE ENTRY DATE: 2002-08-28
ggttccccacttcctccccactgcgccccgcgccgccgccggcctggggctgccgcccggccgccgtcgtcgccgtggtgcggcctccccctgtcgccgccttcgtcctccgcctccccacccccctccctcgccacgccgtggcgtgagccctctctccgtcgccgccgtcattgaccgccttcctccgtcctcgccacgtccccctaagcaccaccaccacggcccttccctcaaatccgcctccgtcgccgacccatccgcgccgccgctcgccctcccgcacctcctcctccccagtgatgtctcctgcctccatccccacctcgtgcaaatcgggggaggtggacttcggcgtggaggaggtcggcggcgtggaggagttagcgaacctcgagtcagcacggaggcgaagcggagtttgtcggtggcggcggctgcagtacgaggccacgtcggcgtcgttcctgccgatgggtggtcgattcgacgagcgtgctgctaggtacgcagccccttcgtctttcttcttccctgcgacccgccttttttcctttcagcatcgggtcagcaacgtaccccccccccacgccgcccctctcctccgaccttccccatgcgtcggcagccgcctgccctcgcctccgccagtcctgttgttgccgctccactcccctcctcatggtcggacgggttcgttccgtgtggcggtcgccggcgggggccatgatttggtggagttgagtcgattcggtggatttggggagtagtgtttcttcctcggtttagtctcttctttccctcacaagttgtggctgtttctttgggtttcttctcctatgggtttccttccgctgtgtttgctgactggaggaggagctgaggatgctcggcgggatctgcgcagcggtggtcggggatggcgaggaggagaagcagctctgtcctatctgcctcgacggcatggaggccgggcacgccgtgcggcgtgcgcgtcctccccggatgtagctgcgccttccatcacgactgcgtccaccggtggcacaccatcttgccgcgctgcctcgtctgcaacgggtgggttatgccgccgttgccaccgcccgccaagcctgctctggattcttgagatggcagcgttgccgccctaccgatcatggctcagttcttggttcttgacgagttcttgatgaattctcggcgattgtcatcgtcggtttctaggctctggacagcggttcttgccaatttcttgttggctatcttgttctcttaagtgagttgttctataaatctgacatagtttcagtggatttggccaccgctgacgatagccaccgacagctcgggttctctctgctatcaatgcttcttatttgaccagtgcttctgtttacagatttgttggtctacatattagtaaattcagatgagctgatgaatcagggaattcagtttcaggtataaaaacgacttggacttctatttcatggagtcatggttaggaataaggaatattctatgaatattccttattcccaaatttgaggactctagcatggacatcctaggagttcctacactggtgggtcgttctcaagaattcttcaagccgagttgtttctttctcttttttttcatctgatctttgtctcacatggaaccatttatttccaggatattaactacgtcattcagatcccacagtaagctaattacgcccaacgatctaacacaattcctttctcagctaattatgcactcttttgtcaggaagagctgcattcctggttctgctgtaactgagggttgatctgcctgatgttgatgtgctgttcagctgttgctgttatgaagtgggaatctctattaccaaatgatacctttcttattgttgcctcctctgatggcgcatttgagaaaatgactatgcaggatgtctgtgatctgatgttgtacgtgaaacttggtgttaagcaagaattaggatcctttgcagtaacacaacagaatttggcggattatgtagttgacctttttttatagatagggacaacggacaatgtagcagctgtgattgttccatttggatctcattatagctctaaagttacactaaaagattggt

SEQ ID NO: 25905 - DNA, 1705 bp, Oryza sativa
  ref <308>: DATABASE ACCESSION NUMBER: AK101347
  ref <309>: DATABASE ENTRY DATE: 2002-08-28
gactgcgccgccgctcatcggcgcgacgctccggcggccggcgctcgcgggctccgagccggtcgccgcctccctctgctctcctctccgtcgccctctcctccaggccgccccctccggtgctccaccgtcgccctccctcgctccggcagctcacgctcgggggctggccgccgtcgccctctccggcagggttcagaattgcatttggtacgatggaagagggcagcaactattatcttgtcaggaagggggagatggtagctgtttacaaatctttaaatgattgccaggctcaaatttgctcatcggtatctggtcctgctgcaagtgcctacaagggtaactcttggagcagagaaaaggaggaatacctctcttcgcgtgggttaagtaatgctacatatgtaatcaatgcagctgaacttagggaagatctatttggtacccttatcccctgtacttttcaggagataactgtttctagttcaaatcaatcagctctaaatcatacaggtgtccttaacaatacaagatatcagcctggggcacaatccgtggatctgaactacgatgccgtgggatctggtcaagcctcagctgagcactatagccagcgtattaaccaaggctactctgttcggggacaagcatttaacaggctggaatcaagacctagttcttccagccatttctcaccgaataatcttgatcagagtggaactgttgatgcacaacctctctcgaaacaatatatggtatgcttacttcacttcgatggtgcatcgaaaggaaatccaggaaaagcgggtgctggggctgtgcttatgactgaagatgggagagtgatatctcgacttcgcgagggtcttggtattgttaccaataatgttgctgaataccggggcctgatcttaggattgagatatgctattaggcatggtttcaagaaaatcatagtatatggcgactctcaactagtctgttatcaggtgaaaggtacatggcaaacgaagaaccggaacatgatggaactgtgcaaggaagtgagaaagctcaaagaaaacttcgtctcatttgagatcaaccacattcgacgggaatggaatgccgaggcagatcgccaagcaaacatagctattactctttccagtggtgtggtctctgaggagcgtggcgatggctagccttctccggctataacccttctagataatgggagtaactagtatatgtagttaactaattagcaggtggagacctatatgatgggagtaactaatatatgtagctaactaattagcaaccagagacctatgttttgcatcttgctgctctggcctctgggagtccagcttgcagtaacctgttgaagatgatccgtgtgaagggtacacctcgatgatgaacacttgagttaccaggcctcattttggagcactatgtgagctccagctagttattcttggtgtaagcttcactacttgggccttcacataggcgttgcccaagttagtagactggcagcgatgaactgattgagtgcgatgatgcaattgctagtttgccatgtgttgggttttggttttggggggctaagaaccaagtttggcctctttacctacgaaagcatctgcatgtaaactgagctataagctccattttgtcaggcttgtgaatgaaattgaaaactccgcggatcttc

SEQ ID NO: 25906 - DNA, 975 bp, Oryza sativa
  ref <308>: DATABASE ACCESSION NUMBER: AK101348
  ref <309>: DATABASE ENTRY DATE: 2002-08-28
gagacgcgaacggcgaaccgcaaccacctctgctgctacgctagccaccaccaccaaccacgatgtgcacgctggagcagcgcggccgcgtgttcgtgctcacgctcaccggcgacggcgagcaccgcctcggccactccctcatcggctccatccgcgccgccgtctcatccgtcgcggcggcggcggcggcggccgggccgggcgcggcgctggtcaccgtggcggaggggcggttcttctccaacggactcgacatcggccctggcgggatccccccctcgcgggtcggggagctcgtcgtggcgctccgccccctcgccgccgatctcctcgcgctccccatgcccaccgtcgccgccgtcacgggccacgcctccgcgggcgggttcctcctcacgctctgccacgactaccgcctcatgcgcgccgaccgcggcgtgctctacatgagcgagatcgacatcggcctcccgctcccgccctacttcgtggccatcctccgcgccaagatcaccgccgcgcacgccctccgcgacgtcaccctccgcggcaggaagctcaaggccgcggaggccaaggagatgggaatcgtcgacgtggtttgccccaccgccgctgaaacggcggccgaggccgtcaagctcgccgagcagttggcggcgcggaagtggaacgggaacgtgtactcgtccattagaatatccatgttccctgaggctgcaggtccgtcggaattgtcgaggagagcgatgaggagaagaggaatcactttgcttctaagctatgaggatgtgaaagggattctgtggaagtggaccattgagctcttctcaacattatgtgtacattggctagccaagtagccatggatgctttgtatgaaggaccaaataatccagtatatataatttctggaaagcttgtaaactgttgctctatctgcaagtggggaatatattccagttcctttgc

SEQ ID NO: 25907 - DNA, 3654 bp, Oryza sativa
  ref <308>: DATABASE ACCESSION NUMBER: AK101349
  ref <309>: DATABASE ENTRY DATE: 2002-08-28
gaattgttcatcaccatttttgctttgcgacaccgtacgtccatgttgccccaaacaactccgcttaatttgcattgacgatcacttctgccaccaggggaagtggagatccatctcgatcgatcgatagatatgggttagatttgttttgtggagcttcttttacttgtccttggagatagacaggaattcatcatgcgtcgggagcgcattgatgcgactagtgttgaggcggcggtagaatcactaatcccttacttggaggataccagcagtgctgcacataagtccatctactttgacggatgggatggactgggtgcgtctgcggtgctcagagcgatagcagaaaatccagcgccatctctgaggaagaaatttgacaggattatccatgttgactgctcgagatggaagaaacgaaggcaactgcaaagagcgatcgctgatcaactcaagcttcctcagcatgtaatggatttgtttgataggcaggatgaggaggatgatttcagcggggttgaagaaagctccagagcagaggtaacagatatcggaaaggagatctatcaaaccatcaaggacctcagttgtttgttgatttttcataatgggagtgacgacacagttgatacaagcaaacttggcttccccctatacgattggtctgataataaagtgctttggaccttcagaggaaggctacggctcattccaaaaattgcagataatgtggacagttcacacctcaatatttatagtcattattattatcatttttattcatttgaaagtttgaatgatttattaccaagagaagctgaagaaatcactcaatactcaggtgagctccaccttgatggcaccaaagctgcagaatgttgcttgtatctattgtctctgaattataggggtggccacatcatggactacaactgggcaacccatgcctgcaactattgggtttgcgatggaataataacagtacaagaagaaaaaggaggaggtagcctacaggaggaccaagcatgggagcttgcagctgctctgcatcaggagatacgtctagaggactactcatccaacagagtgcctggttttggtcattatttggatactcccccaaatcgatgggttttggtcacccaggagtctgacatgaaggacaaaccaactctagaaacaacgtccttgttcattgcattccaaagtgtggtattgttaccggatgacatgttccatcaagcaaacaaagtccaagtactgagattgtgcaactgtgccttcaacttttcgtcacctcctttccattgctgccacaacttaagatttcttggcctggataaatgccaagatcatcggacacaagaagctggagaggataagagcaacactagttcagcactggagttttttcagaggctatgggtattagacatatgctacatagattgggagctgcctttccctacagagagtacaagagagcagcaaatggcaatgaacattagggaggtacatataaacaagggaaggatttggcgcagaaattttgcatggcggcgattgaagaaccttcgaaagcttcgagtaattgagcctacacacccttggggtaacaaaggggaaatagatgagtttgctgacatgctgaagctggagatcgttgacctgtctaagaatactatgatacaagttttgccaagcctatgtggtgccagtagcctcaaaacactgatcctagatgattgtgttgtgctggaacaagttggcccccagggacttcctccttcgcttgaatcattcagctttgcttcaagagaaggaaacaaagctaaaatctcatctatctccttggctggttgctcgagcttggtgaacttcacattacgtgggccattgcaaaaccttaggggattggacctctctggcacaatgataaaaatgcttgaccttcgagatgtacaagactcatgtattggacaaataattctgctacggtgtgagaagctatgcaccatattatggccagagaaaggattcccaaacctaagcatgctacacattgattcattggtttgccatgtagaaacagagcagcagcaagcatatgcaaccgtgatggatttaagatttgttcaatccttggtgttaagaagcaataacaagttctgttggaactgcaataagacccatataaatatatgcatctcttctaccccaaaagatgcaacaccaaaaaagaagacaatgagctattacagcgctcaaaaagtagttggctcacctctacacatgccaatagtcaccaccattcaacctgttgtttgctacaaggatgtcaacttggccatgatatctgctattgagctggaaggcagcagtgcaccacggcatgagccactagacatccatgtggagatcggagagggaataagctatgctaatgttgtcagtgaacaagcattgagtgcagtatcatttatgatgaacaaggccaagtctttgcacgtacatgacaatttttcaatcaccagtgttaaccctaaacacgtgattttgacagaggataaggaaattacatggtattgtctaaagaggtgccacattgagagatgtcacaagttgaacactgtcttctctaccgattatatcaaataccgctttcaaacactggaggcattttcagcagctgagctcatgatggcaaattgtatttggagcagaggaaggacattccctggttggaacagtaatatgtttgcaaaactgaggagtatacacttacactactgtccgaggctcacgtttgtgcttccactatcatggcctactccatactcacacttgcccagcttggagactctccacatcgtctactgcagtgaactcagacagatcttccccgtggaggcagttgctctaagggaacaaccaagaggtgtgctgagattcccaaagctgaagcacatccacctgcatgatgtccccaagctgcatcagatatgcgaaatcagcaggatggttgctcctgtgctcgagacaatcagggtgaggggatgctgggctctcaagcgcatccccgccatcaacggtcgcccaatcgtggactgcgagaaggactggtgggagaagctggaatgggaggggatgaatgttggccatgacccctccctctttgagcctcgccactcgatgtactacaagaaggctctacccagatgctctcttctccggtgaggcgacatgcagacgctgtatcaactgctgctcacttgttaagatttactgatggatcaaccaagttgtctgcatgctttcttccgtctcgctgcagtggtttcgagtgtttgcttgttttctgaagaataaattggtgcatcatgtgcttgcagcaagcacctctgagttgtatatattgttgtgtgcttgcatactaagttaattaattcgcgtgtgtgtctctcaggggagtgacgcagaaccatctgtgtgtgtggatttgttgatgatgtatgtgcttgaaataagagggtctgatgggcctctgtggtgtgcctaccactagttcccagaagttcatggtgtgacagtgtgtaattgcaaacgaatggacataaattaaatattgatgctgcatcgtggtgatgctgc

SEQ ID NO: 25908 - DNA, 1264 bp, Oryza sativa
  ref <308>: DATABASE ACCESSION NUMBER: AK101350
  ref <309>: DATABASE ENTRY DATE: 2002-08-28
gacactactagtcctcttcaccccgccgcttccaccagatgggccgcaagaggagggctagggtttcccgcgacggcgacggcgaggaggaggaggagcccgcgccggtcgccgcagagagcgagagcctctacgagatcttaggggttgagaggacagcttcacagcaggaaataaagaaggcttatcacaagttggccttacgtcttcatccagacaagaatcctggagatgaggaagccaaggagaaatttcagcagcttcagaaggtgatatctattcttggggatgaggagaaaagggcattatatgatgagactggaattgctgatgatgatgcactggtaggagaagctgcagacaatcttcaagagtacttcagagctgtttacaaaaaggttactgaggctgatattgaagaatttgaagctaagtacagagggtcagattctgaaaaaaaggacttgaaggatctatatacaaaatttaaaggcaacatgaacaggcttttttgttcaatgatttgctcagatccaaagcttgattcccatcgctttaaagatataattgatgaggcaattgctgaaggtgagctgaagtcaacaaaagcatatgataaatgggccaagaagatctccgagattgaacctcccacaaacccattagagagaagagtgaagaagaacaagaagaagagcgaggagaacgatctgatcctcgcgatctcacagcgcagggcgcagcggaaggaccggttcgactcggtgctctcatccatcatgtccaaatgtgacccaaaggggagcagcagctcggagcccacggaagaggagtttgagcaagctcgtcagaggctcgagaaaaagcgttccaagaaccgcaaatgattcgccttgcagcctcccttgtggcttgtgcaattctgtttcatcgagtttgttaaccaggcctatctttgacagatcagattgtctgatattctgatccctagtatctatgtgagattggctgcttctgttgtggtgcaagttcaggctggaatctgaacttcctgctcttttgctgaaactggggccgatctttagcatcactgcatatgtgtataatcaaaatcttaaatgtttcctggatgtgaacttgtgatctagtttctgtataagttaatccagtagctgtcttgagtttttacgcctgtaaacgatataaacaagaatgcatcatcaacagggacgagaggcgggtttgcaatctcgttttggggttg

SEQ ID NO: 25909 - DNA, 3539 bp, Oryza sativa
  ref <308>: DATABASE ACCESSION NUMBER: AK101351
  ref <309>: DATABASE ENTRY DATE: 2002-08-28
gggtttttcagccccggcacggtcgttctctccctcagcttccgccctccgccgccgctctatatcccccgcctccgtcccctcccctcccctccccgccggcgagccctcgcctttcctccacgcggccagcgcctaggtgctgacggttgttcgcccctgcttccgtgtgctgctggtcttgcttcgcttcgattggcgagagcatcatccatggcggaggcaaaaggcaaaccgacgtccaccaagaaaggcaggaaggctgcggccagcgcggtggcggtgggcgacgacatcgactcgctcaagtccgatgtcgcctccttcgcctcctcactcggcttccttggtgccgccgccgcctcctccggcttcgacgattctgatttccgcaagtccggccccataattcctcccaaaacctcaaaatccgcgcaaaccaccgacgcccccccaaaccctaaacccaccaccaccaccaccaagaagccacatcctcttgatatccatggcaccaatgccacaaccaaatcagtatcaggtgctgtcaccaccaattacccgctgatgaaggcaacggctctgtccgggcagtggtacgcagatgctggtgagctcgaggcgagcgtcctcggcgctcgaaagcaagtcctgccttctgtgggtctccaggagatgcagaggatctcggagggcaagcgacagctggcggagaagcttatggcgcagtacacggtggaatatgacatggtgaagcggggtagcggcgacctgaagcttctcgagatatcggcaaagtctggcacatctgctgataaggtttcagcattcacatgccttatcgaagacaatccaattgcaaacatgagggcactcgattctctccttggtatggttacatcaaaggttggtaaaaggtatgcgttcacagggtttgatgcattgaaggagttgttcctcaaaagggtattacctgatcgtaagttgaaaagtcttattcagcacccattagatattttaccagaaacaaaagatggctactcacttctcctcttctggtattgggaggactgcttgaaacagaggtacgagaagtttgttattgcattggaggacgcattaaaagatatgctgccaaatcttaaggacaaagcaatgaagacggtttttatccttttaaaggaaaaggcagaacaggaacgccggttacttacagctcttgttaacaaacttggagatcctgaaaggagagcagcctcaagtgcggcatatctgttaacaagtctcctatctgctcatccaaatatgaagatggttgtgatagatgaggtggactcatttctctttcggccacatgttggtcttagggccaaataccaagctgtcaactttttgagccagatttttcttaccagtaagggtgatggcccgaaaatagccaagcgtttggtggatgtttacattgcgcttttcaaggtactcatgtcttgctctcgtgctactgaaggagttaaacacagcaaatatggcaagaaaactaatgaaaatgggaaaaaggaaaagggcaatgacttcaattctcatgtaaagcatgaagacccttgtgcaggatcagatttagagatggactctaggattctctctgcacttttaactggggttaatagagcattaccatatgttgcaagctcagaagttgatgatattgtggaagttcagacaccaattctttttagattggtgcactctgtaaatttcaatgttggtgtacaggcattaatgcttttgtaccaaatatctacaaaaaatcagatcgcaagcgaccgtttttaccgtgcactgtatgcaaaacttttgagtcctgcatccgtaacctcgtcaaagccagaattatttcttggtttattggtgaaagcaatgaaaaatgatgtcatgttaaagagagtggctgcatttgcaaagcggttgctgcaggttgctcttcagcggcctcctcaatatgcttgcggatgccttttcatactgtcagaggtccttaaagcaaagccaccattgtgggcaattgtgctccagaatgaatctgttgatgatggtattgagcactttgaagacatagtagagaatactgattgtccagctattacctcaagaactacagataaatgcaatgacatattagctactcttgagaaatgcaattcagatgctgaggatgcctgtgatactatagaatgtgtaagtccaatctcaagtggtgagaaagatggaaaaggcacatcagctgaggggttgacacttcaggcatcttataatccacgacacagagagccttcttactgtaatgcagaccatgccagttggtgggagcttactgcactggccttacatgtgcacccatcggtatctactatggctaggacattgctatctggtaacaatatcgtttatagtggtgatccattgacagacctatcactccctgctttccttgacaaattcatggagaagaaaccaaaaggaaaccgcatcgctgaagggaaatggcatggtggatcccaaattgcaccagctaaaaagcttgatcaaagtcatcatctcattggagaagagctactagaactggtagaaaaggaagttcctcctgaagatgttgttttccatcgtttctacatgaacaagactggccctattaaacctaaagcaaagaagaaaaccgcggttctggatgaagatactggagagctctttgctgatgatgtagatgatgctagtgatgaaagtgatgatgaaatgcaggagctgggaattgggtcgatagaagatggagaatatgattatgataatctggatgcaaccacatttgaggaggaaggggatttgcttagatatgacagtgatgttgagttgcatgacatttcagatgatatctcttctggagcagattctgatactgaagcccttgaaggtgctaaccattcagatggcaatgacagtgatggagaggagccagtccaggggcaaaagaggaaacatggtgcaaagagtggagcatcgccatttgcaaaactagaagactatgaacatctcatggatggggaagcggaaaagccaacgtttaagaaggggcggaagcacagggtaaccagagacagcaaggagaagagaaaaggtctgagcagcaaggagaaatcaggatcacgaaagaaaaggtcgaagagatcagaatgagataaacatttttaccattttcatgtttatcgtaatcgcaatgatggttatgaaatttttgtagcttatagtttcggtgtttgtatccttcgcccacctttttcatttggacacgttcctgatgaatattacactaagaaatcacttggagattagggacagatcaacggggctggcttctccctatctcccctgtaatcttcagaacctgaagatggaccaaggcgttccagactcttcagacaggtggtatggtgatagtagtgcgtgtggcctgttgatatgctatataatccaagaatatttcggcc

SEQ ID NO: 25910 - DNA, 2152 bp, Oryza sativa
  ref <308>: DATABASE ACCESSION NUMBER: AK101352
  ref <309>: DATABASE ENTRY DATE: 2002-08-28
gctcctctctccgtctcgcttcggttccttcctcgagtcgaaacctcgcgaagccgccgccgccgccgccgactctcgctagggctagggttttcctcccgccgccgggagcccctccccctgcaaccgcgctagggatggctatgcaagttggggaatcagttgctcctttaagtccacaaatgattggaaatgcgtttgttcaacaatactacaatgttctccatagttcaccgggtcaagtttgtaagttctatcatgattcaagcacccttggtcgaccagattctaatggaaccatgacatctgtaaccacattgactgctatcaacgatgaatttctctctacggacttcagtagctgtttgattaagttagagaatgtggatgcacagttatccctcaatggtggtgtgcacattttggtaactggatctattggacacaatggcactatgaggcatagatttagccagtcattcttccttgctccacaagaaagcggaggctattttgttctgaatgatatgctaagatatgattctctgcaagaaacactgttgactgagacaaatgattctccacaagaaagactgttgactgagataaatgattctctgcctaaccatgttgatgataacactcacagtgtcacatttacatctgagccagagacttcaggcaatgtcaatgagactgcagagcttggagcttccatctgcagagaatgtcaatgacaatgttgagaatctgcctgccaatgacagttctcccgaagaaaatgttcttgttgaggcatgcacggaagtggttagttcgtgtgcagagaacattcctgcagctgcacctgcacctgctcctcgtgcctcgactcagaaggatgttactaaacagtcatatgcatcagttgttaaggttacaaaggagggcacaccaactccacctgttgcaaagcccaagcccaaacccaaaccaaagccaactgcaaaagtgactgacaatgtggagaaagctgtgtcctcacctgtgaaacctactaatgcagctgataccacatctccaaatgacaaaaatgttcttgttgagcaagggtattctgtttatgtaaagcacttaccttatgaatgtaccacgaaagatgttgaggaaaagttcaggaaatttggtgctatcaggcctggtggtattcaagttcgacaccgtcagcccgatggattctgctttggctttgttgaatttgagtctcggcaatccatgctagcagcaattgaggcctctccagtttctattggctcaaaagcatccattgttgaggagaaacgaactacaactcgagttgttaatggtgtcacccatattgaaaacaatggcaatgctcggggtggtcggttccagcaagacaacagaggtggtggataccgtggggacaacttcaggggacgagaagcaggtttcgtgaacaatggtaactaccgtgatggtgataacatgaggaacggattcagaaatcagaacgagtactcagggcgtggtcgtgggcctcaggggaatggttaccatcagaatggtaacggtggtggttaccatcagaatggaaatggataccatcagaacggtgatggataccatcagaatgggaacagatacaatcagaacgggaacagataccatcagaacggagatgagtactatcagaacggcaatggcaatggacatcggcagaatgggtctggatactatcatcagaatgggaatggctatcgtcaggaccgcatcttccacaatgggaatggaaatgggcggcctgctcgcttcaatggacccaggcaaacaccggttcaagcgtaggcgtttcttgaatatccaaaaaatccttttgtcaatcctaggatcgccttatttatctgtgttcttttgcaccccattcggctgcgacaaagttcagtcccagcccttcgttttgcctcgatgcttttgctgactagttggcatgttctggatgtacttggtgagaccaggaagtgtaattttggaaaggttgggagcttactgcaaggttcgtgacttcatgtcgagacatgctatctaatatatgcattagtatttatggcacgcagatggatgaaggatctgttgtgtgcttttccttatg

SEQ ID NO: 25911 - DNA, 3627 bp, Oryza sativa
  ref <308>: DATABASE ACCESSION NUMBER: AK101353
  ref <309>: DATABASE ENTRY DATE: 2002-08-28
gaccacggcgacgcagaccaatgccgccgccgccgcagcggcggcggcggtggcggcggcggagagagagcgagacagcggcggtggaacgcgcaggctggcggcggcggcggcggtggtggtggagagagagcgagacagcggcggtggaacgcgctggccagcctgctttcgcgttcggccgtgcgtgcgggtccgtgggagggaggggagctggagctggtgggggagggcgaccgtgtaatggagccgtggggcgttttcaagtgctcgccaactgttcgaccttttgcctcgcagggcgtacgctcgatttctcatgtactgtaccttgaagagatgtgctccggtgtgtgcatccacggcactgaagggatcatctaagaggtaaacatcagaatcactatacaatgctctggcaagctgaatcctctgcttctggcctccactcaggttcatgcccctctcccctaccatagtcatatcaccattggcccataactccaaatctctatccaaagcacaaccatgcagcacctcctcatagaagcttctgtccatatccttcccaaagagcacattgtcttgaattgtcccagtctgaatccatgcactctgcgcaacatatgcccttgacccaaaaactgttgtttctgcaccattaatccttgggatctcccccatgatgctgtaaaggaggcttgatttaccagaaccaactggcccgcacactgcaaccttttgacccttgctgatgctcagctttctgtcaatcttaagcatgaattttgtcttcttcaagctattgtcaatttcccaaccatatacccctggttcaatttccattgcaccagtcatagacaggtccttagtcctagtgttattgtcagaacgacttggcttcccctggtgttcttctttgatgaactcttcaattctatctagggacaccttggtttgtgtgaccattgaaacgagctctgggaggttgtagattggatcttggaggattctgaacgtggcaacggcggataagactgttccagctgataatggcatctccacaagaatacatacaccaaatgtgacaaccgacaccaaggtcggtgaggcccaaaacaggaaggcaattgctgaacatgtgtagagatatttcctgagccatcccctctccacatcccttagattcagtagcttgtcaaagtaagctgtctcccatgcatgcagcttcaatatcctcatactcttcattgcttcagccatagcctttatccgtgagtccttcgcttccatgatcttcatgttgaggttctcctgtgactttgcaagtggtgtgttgctcaccataaccaaaactgttgcaaggactgcagacagcgaggccattgcaccaaggctacggtagagaatggcaagtgccaaggatatttgcaagggtagcagccaaattctatgtacgtaccagaagaattcgctaaccttctcaacatcgacatcgaggaagttcacaattttcccgctggctgtgcttgagttcttcatcagcagggatttctgatagatggataccatcagtgctgcacgcacccggaaaccaatcctgcgggcaccaaaataccattgccgctgtgaaagtgactccactgtctttgaggcaaagaaaaggcatgctagcatgtagccatggccatggcccttgtcaggattcttgtcagagagtagctccactaagtaggtgatcaagaatggccccatataggaagcaatagtgttaagccctggtaataaatgcaaagcatcatgttagtataatataaaggtcaaagggtagctccacttttgttcttccaatggctcactaacctgcaaagactccattggcgatcaaaggtgtccagacagcacaaataatggctctccgcataggcattggctcaggtttctgcttgtgaagtgtctcttgaagcaatgcataagattggtttgccgtgtcagactgtggaacagatgggatatggtcgagctcaagacgcaccttgtgtcccttctcaaagattgggtttaaccactggaatgtgaggcagctccaccacccggagttggagaacctgtctgtgctactgtcatcactgtcttctctcacaagcagcggttggttctggtcttgctggtttgctttggaaggtctcatagttactgccacgaggcagatgaatgtgcacaagggaagagaagtgaaatcgacaacagttgcagagttgaagaggtgaagcaaatgcaacgaagtgagaagtgattcggataagaagctgaagaaccaccacgagagaagaactgaaggccagttggatacaactcctgcaccttcatgtttgcagtagagcaagaagagagtcactagaagccatgagactgatttgaagatcaaatccagggagacagtttggcgcttccagaacacaagaacagaaaaacaaatatgcatcaaggagattgaagcattgcaaagtacaattatataagctggtagcaggacttccccttttctttgtgatgaaaccatgtcgccatgtccttctcggcgatgtctcttgttcagcctggcaagctctgcaaggatccaaaccagcaagatagcgaacgatgctatgcggacataatccaatactgctaaggtctccatccaatgccgaaatcaccagacggataatgggcttatggcagagagaaacagaacaccaagatgacaggaactgcactgttacattggagcaaggcaagagtctagggctaaggcaaacttgaaagagagccagcaaacaaagtgaggagtgcagagccgataagagcagaccaaaaggagaacctgattgcatatgacttataggatctggacttgggatctcctctttttaatcggacctgcaatcaactcgttcacgacaagaagtgctctgatctttaaaaagacatatccatgatttttgagattccatttccatgtccgggcctccaaggtaccttgagctgcagcataaagaaaatgtagtaactacagctgaagtgtttatccaaacgcaatggctatatctgcaacatgttatgagatgcagacagaaagtatggcaaaccgggacaccaatccaagttgcccacagagatcaaatctcggtgcggcatcctgacgccggatcggcaactttggaacggcatctcggtgacagtgggaactgccaacagtgtgctgtgcagacatgcatgtgtcgaccatgcgtgcacttgcatcgagtccttcggctgtccgatcgagtgcatgatcattgaactaccgaggtggccaatgcaaaagaggacggcatgtgagtagaaggtgagcgaaagacacatacatgcgtccaatttggttggttaggaccttgtggttgtggaagagaaggtagaacctagagcctggggcacacgacacctggtaggatgtttgtttttggccatgttaattacaatattattacttgataagtaaactattaataggtataggatacctgctatttttttctggatccgctactttatataagtgatgtacttgggaagaaagaatgggaaaatgagtgcttaacttcc

SEQ ID NO: 25912 - DNA, 1236 bp, Oryza sativa
  ref <308>: DATABASE ACCESSION NUMBER: AK101354
  ref <309>: DATABASE ENTRY DATE: 2002-08-28
gctagatctaactaggaagggcatctgtgtgctgaaggattgttcaatgctcgtaatggatgaggcagacaaactgttagctccagagtttcagccttccatagagcaactcatccatttccttccagctaatcgtcaactattgatgttttcagcaacctttccagtaaccgttaaggatttcaaagagaaatacctacctaggccttatgttattaatctcatggatgaactaacactaaagggaattacacaatactatgctttcgtggaagaaagacagaaagttcactgtctgaatacacttttctcgaagcttcaaataaaccagtccattatattctgtaactctgttaacagagttgagctactggctaagaaaatcaccgagcttggctattcatgcttctacattcatgcaaaaatgttgcaagaccatcgaaaccgagtgtttcatgattttcgcaatggtgcttgcagaaaccttgtgtgcacagatctgtttacaagaggaattgacatccaagctgtgaatgttgtcattaattttgacttccctaagacttctgaaacatacttgcatagggttggtcgttcagggagatttggacaccttggtttggcggtgaacttaatcacttatgaggaccgtttcaacttgtatcggattgagcaagaacttgggacagaaataaaaacgatacccccacaaatcgatctggcagtgtattgtcaatgatcaatgtaacattgtaacggtgtttttatcatttacttattgttaggcaagtacatcagatgtacatagcacctcatcagggttttatttggtgccttgatgacacatctaagcttatattccattagtgaggaagtgttttctgtcggcactgatactaatcatgttaactgtggacttgcatttttggctgcttgaagacgctgcttgaagacccagggctgcggccaaactgaacctttttcttgctccttgtatctgctcaatatttgctttatattcatttgctagcgacagttttggttgtgttatattaggatactgctgcttgagtctgttaccgtcactgtggttccttaattttcctttcctttttcccttttcttctcatgtttggattggactagtagaagtatttccctcactgtattcctcgtgtcaatttctattatccttggtgtagactgttaactttctttaatttaccctcgtttcgt

SEQ ID NO: 25913 - DNA, 2082 bp, Oryza sativa
  ref <308>: DATABASE ACCESSION NUMBER: AK101355
  ref <309>: DATABASE ENTRY DATE: 2002-08-28
gtctttcctgccttcctccccgcacttcttccttccctgccccaacctcccctccaccaagaacagcagtggagaaggaaagaacgaacgaagcgatcggagcagccccccgtcccaccctgcaaacctgcattgctgcccccgggtcattcttgggtcgtgggagtcggattcgggtttcttggcagccggctgcaatcatccgtggtgccttcaaagtattgcaagttgccgtgaaaggccattctagggaatgcagaaagatgtgcttgcacgccagagatatctcctatgaagagaagggcatttctcccattgatttgacatcactaattcttgatgagcgaggatttcagttgctcacctggtgcattctgcaatcacaaagtaataatgatgctatcaatgtcagaaatactgctatgctagatcatgcaatttctgatgatggttgaagtttttgcttttacggttttcctctaaaattccaataaagaattgtccgctagcattgttttgaatgatggaacttgagaagaatggaaacattctactgcgaaggtatgagattggaaaattattggggcaaggaacttttgccaaggtttatcatggtaggaacatcgtgacttcacaaagtgtggctatcaaggtgatcgacaaggacaaaatttttaaggttggcctaatggatcagattaaacgagagatatctgtgatgaaattagtgaggcaccccaacattgtacagctgtatgaggtcatggctaccaaatcgaagatatactttgtgctagaatatgtcaagggcggtgagttgtttaacaaagtagctaaaggtaggttgaaagaagatgctgcaaggaaatacttccagcaattagtaagtgctgttgatttctgccacagtagaggcgtttatcatcgcgatctgaagccagagaacctacttgttgatgaaaatggaaacctgaaaattaccgattttggattgagcgctcttgctgaatcaagacgacaagatggccttctacacacaacttgtggaactcccgcatatgtggcgcctgaggtgatcagccgaaaagggtatgacggtgtcaaggttgacacatggtcttgtggtgtgatcctgtttgttctgatggctggttatctgccttttcaagattcaaatttgatggagatgtacagaaagattgggaaagcagagttcaaatgcccagcttggttttcgtctgatgtacgaaaattagtttcgagaattcttgatccaaacccaagaagtagaatgccaattacaaaaataatggaaacttactggttcaagaaaggacttgatagcaagctaatccttaagaacgtggagacaaatgaaccagttacagctcttgctgatgttaatgttgttttctcctccatgggtagcagtagtagcaaaaagactgaggagaaacaggatgcaggaaagctaaccaaccttaacgctttcgatattatttctctttcggaaggctttgatctttctggcttgtttgaggagactgataaaaagaaagaagcaaggtttacatcaagtcaatcagcttcagctattatctcaaaactagaggatgttgcctcatgctcgaagttgacagtgaaaaagaaagaaggtggtgtgctgaaaatggaaggtgcaagtgaaggaaggaaaggtgtattggcaatcgatgcagagatcttcgaggtgactccttcatttcatttggtagaaatcaagaagaacaatggagatacactagaataccaacatttgtggaaggaggacatgaaaccagctcttaaggacattgtttgggcttggcaaggtgaacgccaggatcagcaacctgaagatcatggccagccatagaattgtttcaatgtcgaaatgtttcgttgccttaggaaaggcactgcttatccttttgcttattattcgttctatcttctgtcttcccaaaatccatagctcaatgaaattcgcacaacaatgtaattggattctaaggaatctgaacttataatgcagtgtaatactagttattttttgttgttggc

SEQ ID NO: 25914 - DNA, 3406 bp, Oryza sativa
  ref <308>: DATABASE ACCESSION NUMBER: AK101356
  ref <309>: DATABASE ENTRY DATE: 2002-08-28
gagcaggagtaattcttcagtctcctcttcttgctccccccatctggttggttttccttttcttccccgcatccgcacccgagtcgccagcgatcgatcgttttggtttggtgccatctccacatccaccggaaaactacgcttcccctacccaccgcatcatcctcttgcctcgatctttactgctctctactaggctcgagctgtgtgggtggggtgatgcggtgagcttttctttttcttcttctattgatcggagtggccatggcggggatggctgcggcggcggcggcgttggtggcggcgaagaggtgcatgaacgccgcgtgcggggccccggccccgtccccggcgggaggggagtggaggaagggctggccgctgcgatccggtggcttcgccgtgctctgcgacaagtgcgggttggcatatgagcagcttgtgttttgtgatatatttcaccaaaaagaatctggctggagggactgctcattttgtgggaagcgtctccattgtggatgtattgcttcgaagaactcctttgatctacttgatagcggtggagttcaatgtgtcacttgcattaaaaattcagcagttcaatctgttccaagtccagtcgtccccaagcttttttcatcccaaaataaccagagactttttggcaaaagcgatgatttattgtctggtagaccactggagacatcctcccttatggtcgatgccagaaacgatgatcttactattatcgctaagaacaaccttccattcatggtgaaaaacgtagaagctgggcaaagcagtaatattttgaggcaaaaagaactagagaatggtgcgaggcagattaaatgggaactacctacccttagtatcggggacatgggaaggatacctttcctaactagatctcaaagtgcattggagtctcgaagagatgaaaataaagacccaactacagaaagcacgacaagtgaatcactttctgaggcatgcctcaacatgagcttgggaattgctagtaatggaaacaagttggaggctacttcaactgtggaaagacctatgctatcaccaacaacaggatttcctgaaggaagagagcttaccactgcattatctccatttcagcatgcacaaagggctcgtcattttctgaccagaccgccaagggttggtgaaggtgctgtttttgatccaacgaaagatatgcttccgcatcttcgtgttgcaaggccacctgcagaaggtaggggccgcaatcaattacttcctcgatattggcctagaataacagaccaagagctacagcaaatttctggagattcaaattccaccattgtccccctgtttgagaaggttctaagcgccagtgatgcaggccgcatagggcgccttgttctaccaaaagcctgtgcggaggcatatttccctccaatttctcagccagaaggtcgtcctttgacaattcaagacgcaaaaggcaaagaatggcattttcagttcagattctggccaaataacaacagcagaatgtatgtcttggagggggttacaccatgcatacaatcattacaattacaggctggtgatacagtgacttttagtcggatagaacctggagggaaacttgttatgggcttccggaaggccacaaacactgtcagtttgccagactcacagatttcagctattgccaacggttccattcttggggatacattattttctagtacaaatgagaatttagcaatagtaagtggttattcaggatttcttcagtcaataaagggggctgcagatctccatacaagctctatatacgatcatcatgtgaactcagctgacggggatgttagttggcttaagacagataaattcggcagcaggccagatgaggggtctttgcagtttttaaagagaggccgcaatattggttccaaaagcaggaggctttcaatggatgctgaagaagcctgggaactaaagctttactgggatgaggttcaggagctgttgcgtcctgctccaactgcaaaacctactgtcgtgatgattgaggactacgaaattgaagagtatgatgaaacccctgtgtttgcaaagagatcaatttttaccatccgttctactggggaacaagatcaatggattcaatgtgatgattgctcaaaatggcgccggttaccacttaatgttattgttgcatccaagtggacatgtgctgacaacacaatcgactcaaaaagctgttcctgctctgcacctgaagaattaacccccaaagaattgcacattgttcttcagcaatacgaagatatgaggaggcgaaggaacagctttggttttaagcagaacatccccgaaatggatgcggtcagccttgatgcctttgccactgccgcagtctatggtgatgtcgggaaccaaggttccccttctgttgcgacaaccacaaagcacccccggcatcgccctggctgcacctgcatagtgtgtatccagccacctagcgggaagggcccgaagcacaacccagcttgcacctgcaatgtctgcatgaccgttaggcgtcgcttcaagacactgatgatgaggaagaagcaacggcagtcggagcgagaggaggccgaggcgagcaagaagatcgcttggatgaacagagatgagcctgagggaagcagcctgtcaagatccccacagacggttgacactacccgagacggagatgtgaccatgttcgacaaggttgacatcaacaagggccacatagacctgaacttccaccctactgccgtccgagacgaggagcggcatggcgggcagcctcgggtgagcatggtcagcctcctggaggtggccaaccggccactggagaactacatgaagcagaacggcctgacgagcttggctggggagcaagggagctccagcacatgtacaggtgcagccacggttccgcagccggctctggtggagagcgaagagcggacgtccaacaacgacggcgggcgtgtggcgacggcagagcagccggagagcatggccgtcgacgaggctggagataaccagccggacaaggctgccggtgactctgctgctgctttagcttgagcttgaggctgaccgtgttgagtgtgtggatggcaggatgggtatttgaatttgttgtgtgtgcatcttatcggcttccccctttttttacaggaacagcagctggtgagttttggtgttgagaatctcatagggtttcattgtgttcttgtagtccttcacttgctttcttgtgtaaacacacgtgtagaaggctgtatgatactgactgtaccttgtaatttttaaccacgaggctcaccttatttgctcatacctcggtgggcagctagttgttgtatgtatccaaagc

SEQ ID NO: 25915 - DNA, 1475 bp, Oryza sativa
  ref <308>: DATABASE ACCESSION NUMBER: AK101357
  ref <309>: DATABASE ENTRY DATE: 2002-08-28
ggaggaagaggaggacggacgctgcatgtcaccgtgccaggccatgtgccgcggcccaacatggcacgttctcccctccagttcacttctctctctgctcacacacactagcctagccagtgtactagtgttgtagtgtacccacctcgcttataaatacccggttccgcactacggccacacaaaccaacacccccactcatctcacttcactctctttctcttctcttcacttcaccaccgccacctctctcatcggatccctgcagaggaggagagggcagtggcggcgaaaggcgacatgggctcgctgtcctctctcgccgccgcggcggtgtttctctccctcctcgccgtcggccactgcgccgccgccgacttcaacgccaccgacgccgacgccgacttcgccggcaacggcgtggacttcaactccagcgacgccgccgtctactggggcccctggaccaaggccagggccacctggtacggccagcccaacggcgccggccccgacgacaacggcggcgcgtgcgggttcaagcacaccaaccagtacccgttcatgtcgatgacctcctgcggcaaccagccattgttcaaggacggcaagggatgcggctcttgctacaagatcagatgcaccaaggaccagtcgtgctccggcaggtcggagacggtgatcatcaccgacatgaactactacccggtggctccgttccacttcgacctcagcggcacggcgttcggcaggctcgccaagcctggcctcaacgacaagctgcgccactccggcatcatcgacatcgagttcaccagggtgccatgcgagttcccggggctcaagatcgggttccacgtggaggagtactcgaaccctgtgtacttcgcggtgctggtggagtacgaggacggcgacggcgacgtggtgcaggtggacctgatggagtcgaagacggcgcacgggccgccgacggggaggtggacgccgatgagggagtcgtggggctccatctggaggctggacaccaaccacaggctccaggcccccttctccatccgcatccgcaacgagtccggcaagacgctcgtcgccaacaacgtcatcccggccaactggaggcccaacacattctaccgctccttcgtccagtacagctgaaccgccgctcgccggcggcgaccctcggcgccggcatcgccgccgctgctgctgctagtaatactactactgctatgatgtaattgtgttaccggttgggttctttgagtttgttggggttggggattgtgtggtcggtctgtgttgcgatttgcagaaaccgggcgagcgaaagaagaaaaaaaaagctgtgtgggaaatggaggaggtaggcgtacaaggttacgctctcccgcccactctcgcttttataatttatcattttcaaatggtgatgataagatgattaatcaaaaggattatattgctacct

SEQ ID NO: 25916 - DNA, 1433 bp, Oryza sativa
  ref <308>: DATABASE ACCESSION NUMBER: AK101358
  ref <309>: DATABASE ENTRY DATE: 2002-08-28
gacacaactcagcttgtatctgagacacgcaatggcaaagcattccaccacaatgagctgcctcctattcttcgtcttgctctgtttgggctctcacttagcccaggctcaggttctctttcagggattcaactgggagtcatggaagaagcagggtgggtggtacaacttcctccatagccacgtcgacgacatcgccgcgaccggagtcacacacgtctggctctcgccgccgtcgcactccgtcgcgccacagggatacatgccgggacggctctacgacctggacgcgtccaagtacgggacgggggcagagctcaggtcgctgatcgccgccttccacagcaagagcatcaagtgcgtcgccgacatcgtcatcaaccaccggtgcgcggattacaaggatagccgtggcatctactgcatcttcgagggtggcacgccggacagccgcctcgactggggtcccgacatgatctgcagcgacgacacgcagtactccaacggccgcggtcaccgcgatactggcgcagacttcggcgcggcgcccgacatcgaccacctcaacacgcgtgtgcagacagagctctcagactggctcaactggctcaagtccgacgtcggcttcgacggctggcgcctcgacttcgccaagggatactcggcgaccgtcgccaagacgtacgtggacaacaccgacccgtccttcgtcgtcgccgagatatggagcaacatgcgttacgacggcaacggtgagccgtcgtggaaccaggacggtgaccggcaggagttggtgaactgggcgcaggccgtcggtggccctgcatcggcgttcgacttcacgaccaagggcgagctgcaggcagcggtgcaaggtgagctgtggcggatgaaggatggcaacggcaaggcgccggggatgattggctggctgccggagaaggctgtcaccttcatcgacaatcatgacactggctccacacagaactcatggccgttcccctccgacaaggtcatgcagggctacgcctacatcctcacacaccctggagtaccctgcattttctacgaccatgtgtttgactggaacttgaagcaggagatcagcacattggccgcggtgaggtcaagaaatggaattcatcctgggagcaagctgaacatccttgctgctgacggagatgtctacgtcgcaatgatcgatgacaaggtgatcacaaagattgggactcggtatgatgtgggcaacttgatcccgtcagacttccatgtcgttgctcacggcaacaattactgcgtctgggaaaagagtggtcttagagttccagcagggcggcgccactaggccaaatatttctttcaggactattttgtgcctgaaataagaagtttaaatgatgtcttaaataacaagaaagtgattgattgattgt

SEQ ID NO: 25917 - DNA, 870 bp, Oryza sativa
  ref <308>: DATABASE ACCESSION NUMBER: AK101359
  ref <309>: DATABASE ENTRY DATE: 2002-08-28
gtcactgcagagcaaagagagacccgtcgctttcccggcggcaaaatggattgccaccttcttcctcctccgcttcctgctttgatccggtctcgaccaacgacctagctaagcgaggcgaaaaccagcagaagagcctctcctcttcttcgatcgtcgcaagaagatactaccagagaagcagatcgcagcgagaggagaaagatcaaagatggacgatatcatgaacaagctggggggctactggctcgggcagaaggccaacaaggagatctcctccgccggcgacgacatcgagtcgctgtcggcgagcgtcggggagggggcaaagtggctggtgaacaagctgaaggggaagatgcagaagccgctgcaggagctgctccgggagcacgacctgccggagggcttgttcccgcgggaggcgaccaactacgagttctcgccggagacgcggcggctgacggtgcacatcccggcggcgtgcgaggtcggctacagggacggctccgtgctgcggttcgacgccacggtgtgcgggacgctggagaaggggaggctggcggaggtggaggggctcaagaccaaggtgctcgtctgggccagggtcaccgccgtcagggccgacgccgccaaggtgcacttcaccgccggcatcaggaagtcgcgcagccgtgacgcctacgaggtcgtcaggggcggcatcatcgtcgaggagttctagcatcgcgcgtgcgccgccagccacgatcgatcagaggaaataataatacgtgcttgtacgattagtgttcgggatgggtaatttaccgcgaatgacctttgtgattataactgattattagtaattataaaagctggatgtccatg

SEQ ID NO: 25918 - DNA, 1888 bp, Oryza sativa
  ref <308>: DATABASE ACCESSION NUMBER: AK101360
  ref <309>: DATABASE ENTRY DATE: 2002-08-28
gggcgggcggcggttgccgtggctgcagaagacgacgaagcggcggcggcgccacctgtccacctcacgccccacgcgtccgcgccgcaggctaccctccttgcatggcggcatggcgcggcgcctacttcggtgcttcccttcaaccacctcggtgtcccgtagagtcgtaggcgtggtattgtcgcgcgcggagaagaggggagggatatggcggcgcggtggtgcttcgcgttgctcttggcgctgtcggcggccgcggcgggggccggagccaagcggacgtgggagccggtgattcggatgccgggggaggtggtggaggaggaggtggccaccgtgccgcgcggcagcgagggcaccgaggaggaggagaaggacggcgtcgggacgaggtgggcggtgctcgtcgcgggctcctccggctacggtaactacaggcaccaggctgatgtatgccatgcataccagatattacggaagggagggctaaaggaggagaacattgtcgtgtttatgtatgacgacattgccaataatatacttaacccgagaccaggggttattgtcaatcatccacagggtgaagatgtttatgcaggagttccgaaggattacactggagacgaagtcactgaaaaaaacttttacgcggttctcttgggcaataaaactgcagttactgggggtagtaggaaggtcatagatagcaaaccaaatgaccacatatttatcttctactctgatcatgggggtcctggagttcttggtatgcccaatctgccatatctttatgctgctgacttcatgaaggtgttacaagaaaaacatgcctccaatacttacgctaaaatggttatatatgtagaagcgtgtgaaagtggcagtattttcgaaggtttgatgccagaggaccttaatatttatgtcacaacagcgtctaatgcagaagagagtagttgggggacgtactgcccaggaatggaaccatcgcctccttccgagtacatcacctgcttaggtgacctatacagcgtttcttggatggaagacagtgagactcacaatctgaaggaggaatcaattaagaagcagtacgaaatggttaagaagcgtacctctgacatgaacagctacggtgctggctctcatgttatggagtacggggacaggacattcaaggatgacaagctttacctataccaaggtttcgaccctgcaaatgccgaagttaagaacaagctatcatgggaaggcccaaaggctgcagtcaaccaaagagatgcagatcttcttttcctctggagaaggtatgagctgttacatgacaagtccgaagagaagctgaaagctctgagggagatcagtgacactgttatgcataggaagcttcttgacagcagtgttgatcttgtcggaaaacttctctttggatttggaaatgggccttctgtgcttcaagctgttagaccttctggtcagccactcgttgatgattgggattgtttgaagagaatggtacggatctttgagtcgcattgcggaccgctcactcagtacggtatgaagcacatgagggcgtttgctaatatttgcaacaacggtatctctggcgcttcaatgaaggaagcaagcatcgctacttgcagcagtcacaactcgggtagatggagctcgctggtgcaggggtacagtgcttgatctgccgcaacacgtgatatagcctcaaaacttatgccttgtactcgtacttcctcaaaacaataccttcaggactgcaaataaccgtccaaggatgtaccgctgtatgctactgtacctctatgtgtgcaatatagatgccctgtatatacgagtatatgaatgaatcgtgtgcttttacatgccc

SEQ ID NO: 25919 - DNA, 1491 bp, Oryza sativa
  ref <308>: DATABASE ACCESSION NUMBER: AK101361
  ref <309>: DATABASE ENTRY DATE: 2002-08-28
gactcgaccgctgttcccctcttgctctctctcttgccctcacggcggcgacggccggccggccatcgctcgcttttctccgccgttgacgaccactcccacgtgccctccactacactctgccatcgacaccccctccagatcatgccactccattgctgccccgactggcgccatggtggagatttgccgaagctccaccaccgtggttgcctccaagcaatcctctccgtccccttcctcctccgccggagcgtcccaaggtgagaccctcccacgcggatcagaaatgattcctccggcggtcactgtggcggagagctcgcgctggaaggagcagcaacatcagcagcaggcggtgccttgggcgaagctgctttcgcagtcctcacggcggtgcatgccttgagtgtccagcggtcaagacaagcagactagcagagcccacgctagcgtggccccgcgtggtggagcgaaggagccgcatgggcaggcgctggtcgttcctattagaagaaaccagatctggtccatggtaaggctaatctggacttccgtgcttgctccttctgctactatcttattaagcagctaagagagtacacatagctgatgaagcaacaacaatggcttagcattgagcagctggtggctctgctgcagtcacctcagagtaatctgtttatccatcgtttgttgaatcactatgttttccattattcaatttatgaattgcagttctttttacaataacaaaagttgtgagttaagcaatgtggtcttcagagttgagttttatctgttggtacttcgaaatgtatgtgtcaaagcaacttttaggctagatcaatcgatcaccactgcattctctttatacttcctaggctactgtttgtagcttctctgttgcagattatttctaatttcaatttacccattgaagtaaaataaaggatggaaatattgaatcatttgtttgcattactgctttttgtttaatcaatccatgcagcctaaattgcaacattcatttaatcattatcatctgagaattactaacagaagatggtcattatcttctgagaattactaacagaaggtggttgagacttgatcaatctgatgtttcatgtccaagtggcatataataacctagcaagttaatctggacaatgcagctgatggatggcacagcctaacaatatgatggaaattgtgtggtcagaagcacaacacagaagctggagcaattttccttccacttctaccttgacagagaagttctgaagactgattttcattctctgattccaccagccactatgacagagcataccttgcttccacttttttccttgatgaggttgtagtgttcccttccccatatttttttgttgttcaacttaagattctcgccgttaaaaaattgcaaacaagaaatttggttccatttgatactgtgcatgtaatacaggaggtttcatttggtct

SEQ ID NO: 25920 - DNA, 2339 bp, Oryza sativa
  ref <308>: DATABASE ACCESSION NUMBER: AK101362
  ref <309>: DATABASE ENTRY DATE: 2002-08-28
gtagataatccaatcttgacttggcagttgtgttcgccaccgaacggcaggagaagcgaagcgtggggaggaaaaggcccaaatcctcgcctcctcctgcctgcaaccaccgcctccgtcgtctcgtctcccccggcagaggaatccccaacccggaagctttcgggagtcggacgagctcgccttgactcgcgtccacctccctcgcgcgcgcgcgcgctcgtcgcctcctaaacttagcggccgcgcgggacgcggaggggcgctcccctccagaaataggcggggtgggtggcgaggaggatggggtacctgccgtcgtcgctgggcagcaaggcggcgcacttcgtgtccgacctcaccaccgtcatcctcaacccaatctccgagcgcgagccttcctccccactccccgaggtggacaaagacgaagaaaaatcagaggatgacaaagattctgagcaaaattctgacacccccgatggccctgacacatcttcctttagagcattcttgatctcattcctgtcatcatctggttctagtaatggttccatggagataattcctgatcagaatggggaattgggatacccaactttaacaccaatggggaagtcaaaaaagggaaagtctgggctcctaagtagaggaaaacattccattggaaaaatcattagcaaagcggctagaattggtggtttcaaacaaaatgtggagcctaagattgatagagaggtggtagatcatgttgaatcagtttcacctgtattggagcttgaagaatcaaaggaagttgcttccttcattaatttgccagctatgtcagaaccatctgttcttttgtcagaagtgatgaggttcaatatttatgcatcttttcctgttcttgccaaaggaatgaactgggtcttgctatacagcacatggaggcatggaatatctttgtctactctatacagaaggagcatgctttgccctggttactctctcttggtattcttcttctgtagcttgaagctgtttgatttttatagtttaactggtactccaaggccagcagccagtgtgccaatatacatattgaagttccaaatattcttacgtgggtgatactgtgatagcactttattccaataaaattctatggtttaaatatcggtctccataattttagctcatgttagttcagtttttacaaaacttctttttttttttgtttagtaataataataatattttccctaacaggtagttggggataaagaaggtgcagtttttggcggtttagttgaggctccattgcagccaaccagtgcaaagaaatatcaggggagcaatagctgctttgttttcactaatttacacagcaatcctagtatatatcgaccgactggtaatatttcacctcctgttttcatgttctttgcataagaacatcaaaagctgcgaaataattttgttccatttgaccctaccttccagactactagatgtatttctctgtgtagcagtgacttatgattgtttttgtcccctgattcctgttcaatatatataacactagcatactcctacaaaaattctgggggatcaagttgctgaatatattactgttaacactagcaaagacttaactcaggagagcccctgagcattcatttctggtattgcaggtgctaataactatttcacagtgtgctccaccgactatttggcattaggaggtggaggtcatttcgcactttatctagatgccgacctgtaatctcccacctcttaagcatgtctttcacgccgtcaaatctgctggttttattgccttttgtcattgatagctctcatcttttcttctgggttaccctttttcaggttgagtggttcaagttccaattcagagacttttaacaacatgtgtttatctcattccccagacttcgcggtaaaagatgtcgagctgtggggtttcgtctatccttccaagtacgatgagacgctcgccctctgccgtactgagaaaccaggaatttgccggtggtgatttggtggtccttgaaggcttgaattgtgctgaatctgcgaatgatgcatctgtacagtttttcgtagacttgagagaattttagtgcacaggatcgtgtaggattgtaggagtgatggaaacttgcgtttctcatgcgagcttgctcagagctgtacatatttgtaattttcttgctactgttagcgaaacatggacgcgctggttatttgtttcagtgttgtcagcttgtcattatatgagaacaatattactggcgaatcaggagataaatgacctgcaatctccccatgcctct

SEQ ID NO: 25921 - DNA, 1968 bp, Oryza sativa
  ref <308>: DATABASE ACCESSION NUMBER: AK101363
  ref <309>: DATABASE ENTRY DATE: 2002-08-28
gaggggaatttcttgcctctcgctcagatccgttcctccggcgaaaagcgacggcgactttgttgacgctgcggcctcttcccgaccgcgcagcaaagatttgaggtcaccaatggatgattcaacggatgacgattcgtatcatccaagaaaacactatgcttatgatcgtcaggtttcttcaagcagatggcgtaccagccgcgagtatatcagaggtcccggccccgaaactcatactactgagagtgctcaagatggacaggatccacctgctggagtatattcctatggttatttttctggcagtggtaatgatcctcaagttcaaggacactttgttccggagattcaaaagtacaacccttacgtgattttcaaaggtgaacaactcccggttcctatatgggaactgccagaggagaaggtccaagattttcatgataggtactttattgcaaaagacaagagtcgagttgaagccaggaagactctgaataggttgttagaggggaacatcaatacaattgaaaggggacatggatataaattcaatattccaaaatatacagataacatggagtttaatgaggaagtcaaggtttctctagcaaaagcaggcaagaccataagccgttccttttgcaatgcgaatcagcgggaagttgcatctaggactggctataccattgatctaatagaacggacacttggggctggattgaacatctcgaagagaactgtcttatacacaaacaaggatctgtttggggatcaaagtaaatcagatcaagcgatcaatgacatctgcgctttgacaaatatcagaaggggctctttgggtataatagcagctgaaaaaggaattgtagttggaaacattttcctggaattgacaaatggcaaatcgattagttgttctattggagtgcagataccacacaggcttgaccagatcaaagatgtttgtgttgaaataggttcacgcaacatagagtatattcttgttgtggaaaagcatacaatgttgaattatctactagagatggactatcacaccaataacaactgtataattctgacaggatgtggcatgccaaccctccaaacaagggatttcctcagattcttgaaacaacgcactggactacctgtctttggactttgtgatccagatcctgaaggtataagtattcttgctacgtatgctagagggtcttgcaattcagcatatgacaatttcaatatttccgtgccatctatttgttgggttggattgtcatcctcagacatgataaagttgaatttgtctgagaccaactactcacgtttgtctcgcgaggacaaaactatgttgaagaacctttggcaggacgatttgtccgatgtatggaaacgcagaatcgaagaaatgataagttttgacaagaaggcctcttttgaagctattcatagtttggggtttgattattttgcaaccaatttgcttccggatatgattaacaaagtacgagaaggctatgttcaggttcaagagaaaaaagagcctcaagacactgaagccagtgaggactgatttggaggactctaatgcagctagagattcagatccataagtttctacaagtaaaagttggagcagcagattggaactgcatgttgatttttgtggatgctcaagcttcactcgtatgtttggcttctgataagtctgtaatagcttagcagcacaattattatagttgtcttctaggtgatcgatctcctaaatacttgcaccactattattgtagttgtcttttatgtgatcgatctcctaagtacctttctgtctgtaatagtttagcaacaccattattatagtactagttatcgtctaggtgatcgatctctcctaagtgcttgcactattgttactgaagttgtcttctagcactattggtactgcagttgttttttcgctgatcg

SEQ ID NO: 25922 - DNA, 835 bp, Oryza sativa
  ref <308>: DATABASE ACCESSION NUMBER: AK101364
  ref <309>: DATABASE ENTRY DATE: 2002-08-28
ggcgtggctatgtatacatgcacacagccaccagctcccttgctcatctgcatgcggccgtgttgctactgaccaatgcctagctagcaagctccactacagctttgaccactgagccgttgctgctgctcacctgtctcctgaaatcgttgggagtcatcgatcgtcttcttcgtctcctcctcctcttcgcgatctgattcttttctgtcactgcgttatggaggcgctcgatgactgcaagtggcgccaaatcccggcgttcggcgactggaatatatgggatgatatgcccgtcacccaatacttcgagtcagggactttcttcttcacagcacaagcagagaaagatgaggacctcttcaaggtgccccagttccctgccaacccctacaactacaagaagtgcgttgttcgagtgaaaggggagaaagaaaacgcgaatgcgaatgcgaatgctgtgcgtgtgagaaagggaggaaggaagcagcagtatctgaatgagcagcagaagtggaagccaaagacggcagtggatgaggacctgtacaagatctcaccaaagctaatctgcagggtgaagaagaagaagttgctgaggaatttgctaggagggtgccttggcgtgaactgcatcgcttgaaaaacaactagcctcaataaatttctcccaagggtttgggtgttagaaagagatgtatgtacattgtgtgctgatatggaagtaatggaaactgattactgtttggactcgattgaatgtgatgatgtccgttcaaaaaaaaaatgaatgtgatgatgataataataataataaatacgctttccattatgc

SEQ ID NO: 25923 - DNA, 2560 bp, Oryza sativa
  ref <308>: DATABASE ACCESSION NUMBER: AK101365
  ref <309>: DATABASE ENTRY DATE: 2002-08-28
gtccttgcaagtcgtcttcgtcttcctccttgccatctcgcccaatctcgagattctccgctgctattatccccgatccaaaccctaatcgatcccgccatggaagcggcggtgctcccgcgacccgcggacatctccccggagctccgccgtttcctcgactcccgcttccgctcgcaagcagacctcgccgcggccgccgacgtcgaggccgagatccgcgggcgctacgcggagctcgaggcctcggtatccgacctctccgtccgcctagcggccgccgccgcagcttactcctccagctgcagcgccgccggcaccgctctgagtaatgtccgcggctgcctcgctgccctgaatgcctccacctctgaaccaggggtcacagaagcggtggaggttgggagcgaggagatgttgtttgagcaactttcttctctggccaaagaggtggcgagagtggagttggtcagggattacgccgaaacggcgctaaagcttgacagttttgtcggcgacgtagaagatgctgtttcatcttctgtgaccggaaaacttaaatctcgtgcagaaagttcactgaaaacatatcatgttcctattggatatcttaaaacaatagaagatattttatcttcagtcacaaagaccagaccacaatggactcgccttgtttctgcagtggatcacagagttgaccgatctttggctctactaagaccacaagcaattgtcgatcatcgagctcttttggcatcccttggctggcctccatcactttctggaacaaatttttctagtattaattctgggaaaccatcagagattgtgaaccccttattttcaatgaagggtgacctgaaaagcaagtattctgagagctttctttcgctatgcagtttgcaggaattgcaaaaacgtagaaaagctcgacagctagaagggcacattgtcaacaatcaactacgtcaaccattatgggtaattgaagagttagtaaatccaatagctgctgccgcacaacgccatttctccaaatgggttgaaaagcctgagtttgtttttgctcttgcttataagataactagagactttgtagattccatggatgagatattacagccccttgtggataaagctaaccttgtagggtatagttgcagagaagagtggatttctggaatggtcatcacattgtcgacatacttggtgaaagagatatttcctaagcatattgaacttcttcaggaaattagctcggctgatgctagcagcaaacaatctcaagctagagtctcatggcttaatcttattgacctgatgatatctttcgacaagcaaacccaagctttgatctcaagttcaggactcctactttcggtgaaggatgatgataattggcagaggatctcggttctctccgtcttctgtgatcggccagactggcttgaaatatgggcagagattgagagacaggatactcatgataagctgagattatcaatggagaatgagaaaaactggaatacaaggtttcaaggaacagtgcttgaatatggttcagatgactataagtctccagcaattaccggtgtaatccaaaagggcctgtccttgctaatagatcgtgctcggcccattccaaatatagcacttagagcagaattcattaagatttctacttcacctttattatcagagttccttggctggatgcttcaaaggtgccaagaagcagagggattaacagctctggcagatgataatgctcttctcaaggtatcacagtccattaatgcagctcgataccttgagtccacattgacagaatggtgcaatgatgtattctttcttgagatggaaaatatagatggccgtagcgaatgtatcttccaagtggagataaatcaactgaaagattttagagtacaatggactgaaaagatttctaccgtcattttaagggattttgatgcccggtcaagggattatctgaaaaataaaaggcagtggcaggagaaatcagaagggttaacattatccagggcattcgtagaatgtttagactacatgcaaggacggatagctaagctggaagatggtctaaatgtcctggattttgtgactgtgtggagaactgtggcaagtggagtagaccagctgctcttttctggaattttcagtggcagcacaaagtttagtaatggcggggtggaaagacttcatggtgatctgagtatattgtttgctgctttttctgcgtggtgtatgaggcctgaaggcttctttccaagactgtctgagggattgaagttattggatattgatgagaagcagctaagagatggagcttgtacagataacaatcggctgagggagtatggtataaggcgtttgacggctgctgaggttgagaagataataaaaaacagaatctatgagtcgtaatatatataaggactaaggaataacagatagcagggttgaagttcgaaatgagttgtgaaaaaccatgatcacttcgtacggttttatttcatacaaattttattactgtgct

SEQ ID NO: 25924 - DNA, 916 bp, Oryza sativa
  ref <308>: DATABASE ACCESSION NUMBER: AK101366
  ref <309>: DATABASE ENTRY DATE: 2002-08-28
gacttgcacaagatggagaagacggcggcccctctcctcctcgcggcggccttgttcctcgtcgtcgccggcgacggataggagccgacgccgacgccgacgccatggccggcccagttccacgcgaagctcctgatggagttccacggcaacctgtcgctggcggacctgtggtacgactggccggggggccgcaacctccacgtcatccgctaccagctcgccgccgacgagcccttctacgacaacgagtggaacaacggcacctccttcttctacaccccggcccgccgcgcctgccgctccgccgccgtcggcgtcggcatcctgcccccaaactggctcgtccctggctccgtctacctcggccgccaccccgccgacggcttcgactgccacgtctgggccaaggccgacttcatcacctactacgaggacaccctcaccaaacgccccgtcaaatgggtcttctacaccgggaggactagccatgtgatgagctttgaggagggtgctgtgctggaggacgcagaatggcaggcacctgaatactgcttcggcaagggtgatgagactgaaacatccaacgacaacgccctcatctctgaacctgttgctgggcatgataagggcttcttccccaggagagaattctgagaggctagctgtattctactattatctggtgagacccaagaccttaattagtatggccaccatgctgctaatcgtctgtctgtattgtgctcaagtatcacattcaaaacattcactgtgcgagtttgcgggatgtacagttttgtgcaaacaggtgaaactaatctggaccatatatcatttgtgtaataaatttggatcatgtgtttcttagaaccgtactcataatacggatgaagtgaaataaatatggttcact

SEQ ID NO: 25925 - DNA, 2033 bp, Oryza sativa
  ref <308>: DATABASE ACCESSION NUMBER: AK101367
  ref <309>: DATABASE ENTRY DATE: 2002-08-28
gagcgaatttgcccggcgaaaatggcagcacttggccgcgcgagctcgtcggcgccggtgcttgccgccgccgccgccgtgctcctctcgctctgcctcgccgcgctctcggaagagcaagagcaactggagaacctgcggttcgtgcggcacgcgcaggacgcgccgctggtgtcgagctacaactacatcgtcatcggcggcggcacggcggggtgcccgctggcggcgacgctgtcggagcactcgcgcgtgctgctgctggagcgcggcggcctgccgtacgccaacatgtcgagcgagcagcacttcacggacgcgctggccgacacgtcgccggcgtcgccggcgcagcggttcatctcggaggacggcgtggtgaacgcccgggcgcgggtgctcggcggcgggagctgcctcaacgccgggttctacacgcgggcgagcaacgagtacgtgcgcgcctccgggtgggacgcgcggctggtgaactcgtcgtaccggtgggtggagcgctcgctggtgttccgccccgacgtgccgccgtggcaggcggcgctccgcgacgcgctgctcgaggtcggcgtcacgcccgacaacggcttcaccttcgaccacgtcaccggcaccaagatcggcggcaccatcttcgacaactccggccagcgccacaccgccgccgacttcctccgccacgcccgcccccgcggcctcaccgtcctcctctacgccaccgtctcccgtatcctcttcaaaagccaagacggggtgccgtacccggtggcgtacggggtggtgttctcggacccgctgggggtgcagcaccgggtgtacctccgcgacggcgacaagaacgaggtgatcgtgtcggcggggacgctggggagcccgcagctgctgatgctgagcggcgtcgggccgcaggcgcacctggaggcgcacggcatcgaggtgatcgtggaccaacccatggtcgggcagggcgtcgccgacaacccgatgaactcggtgttcatcccgtcgccggtgccggtggagctctccctggtgcaggtcgtcggcatcacccgctccggcagcttcatcgagggggtgagcgggtcggagttcggcatgccggtgtcggacggcgcgctccggtgggcgcgcagcttcgggatgctgtcgccgcagacggggcagctcggcacgctgccgccgaagcagaggacgccggaggcgctgcagcgggcggcggaggcgatgatgcggctggacaggagggcgttccggggaggcttcatcctggagaagatcctcgggccggtgtcctccggccacgtcgagctgcgaaccaccgacccgagggcgaacccgtcggtgacgttcaactacttccgcgaggcagaggatctggagcggtgcgtccatggcatcgagacgatcgagcgggtgatccagtcgcgggccttctccaacttcacctacgccaacgcctccgtcgagtccatcttcaccgattccgccaacttccccgtcaacctgctgccgcgccatgtcaacgactcgcgctcgccggagcagtactgcatggacaccgtcatgaccatctggcactaccacggcggctgccatgtcggcgccgtcgtcgacgacgattaccgggtgttcggggtgcaggggctcagggtgatcgacagctccaccttcaagtactcccccggcaccaaccctcaggccaccgtcatgatgctcggcaggtatatgggtgtgaagattcagtccgagagatggaagaaatgatgaacaaaagataatttcgtttcaggagcaaaaaaatgcatgtaattcaaggaaaagaaaatgttcaactgtctttagagtttagagtagattttatttgcacccacttaatttttactcttctctagacataggttcagtatctgcttgttgattatgtaaccttgaagaagcattgcaaaaacaaagcggaaacttatgttaccaagggcatgacgaagaaataaatggattagatttcattgacactt

SEQ ID NO: 25926 - DNA, 1092 bp, Oryza sativa
  ref <308>: DATABASE ACCESSION NUMBER: AK101368
  ref <309>: DATABASE ENTRY DATE: 2002-08-28
gagctgagtaggctagtttcttctcgtcggcgaaggcatcgttcggatttcacggcgaggtcgccatgggatgcgcgtcgtcgaagcagttcaagcggccgccggggtacgaggagccggccgtcctcgccgcccaaaccacctttacggtgaacgaggtggaggcgctgcgcgagctgtacaacaagatgagctattccatcatcaaggacggcctcatccacaaggaggagtttcagcttgccttgttcaggaacagcagaaaggcgaatctcttcgcagacagggtgtttgatttgtttgatctgaagagaaatggggtaatcgaatttggggagtttgtacggtcgctcagtgtgttccacccaaaagcgcctaaatcagagaagactgcgtttgcattcaagctctatgatctaagagggacaggatatattgagaaagaagagctcagggagatggtcttggcacttctagatgaatcagacctacatctttccgaatgcgctgtcgaggcaattgtcgataatacattcagtcaagcagactcaaatggagatggcaggatagaccctgaggaatgggaagaatttgttaaggcgaacccggcatcactaaggaacatgtcacttccctatttgcaggacattaccatggcgttcccgagctttgtaatgcattcagaagcccatgactgaaaatacagatcccattggaacgtattacaagcaaccaaaagttctccattgttgctgaagctcgaggcagctcaatttgttggatgcgccggagttcagaagcaggctgcaactgaaatgcgttgaccgtcatcgcatgagtgaatgacgccatgaacaacagaatggcatctgataataagtatcagagtggcttttcttctgcttatgcgagggatacagagggcccagcagcaagattgttcaacgaagcaacacaagcaaaattaagcactctgacctgctgaaatgccttctttttttcccgtcttgtatgtatagttgtgagtcagaagtgacactggtgaccattgacctatagttgaagagatgcaggagtgttcatttttcttct

SEQ ID NO: 25927 - DNA, 2374 bp, Oryza sativa
  ref <308>: DATABASE ACCESSION NUMBER: AK101369
  ref <309>: DATABASE ENTRY DATE: 2002-08-28
gtgcggcgcggcggggcggcgagatgatgccctactcctccggcgatcgcgggctcccccagccggcaccggcgccgccgcacgcggccatgtcctggccctccgccgcgcttcttttcgccgtcgatcgtcaccgcatcgctgaacattaccccaatcccacagccctagaccccctagcccgtggcccgacttccccaccgccccatcgtactactcgtcttcggcgcaacctccggcgagctccatgcaccccgttatcgcggagacggggtatgcaggtactgcaaataccgatggatttctgtttagcgatagtgcactacacaatgtatacccggaggatcaatttagttccatcaagcagctgcatccctggattccctcaacaacaggaagatcaagctggctggaagagaaaattccagtaattcaccaaagaacttcagcagctgcatccagtgagattggatcatcagttctccataagccttctttgtttcccagcattattgattgcttcgacaaagaacctgttcccatacatcaatctgatggccgttattcttatgatagccacctatcacatcttacgtcctgctcaacatctttgaattatggcctatccatgccatctgttgctgcctcacctgtagtatgtggcatgaaaagaatagatccgtcaccaagtgatcctgttttgaagggtcgattcctgcaatatgcaaacccatgtaggtttaatattggtcattttgatagcgtgcaggatgagcagaaagatcatgctggctttcagactgcgtatagacattgcagcgactggaacagatgtactaacgatacgggaatagtgggaaactatttagctaatagttctggcgagacttgtaatgttggtgagaattctataactggaaggttttcacaggaaattctgtgttctgaagtgcctatgagcagagttcaggaacctttatctcatcatcactcacttgttcaggaggacctgaatgcattttgtgagaacatcacctacagatgtaactatcatgcagagttaatcaagtcaatgtacaatttgtcagtagcgcttatatctagttgcaatggtgattatgagttggacgaatcttatcaagaacttattcaatctgccatacaaaatctcagttctctgagtccaaaaagaagcaagaatctatctatagaggaaaataagtctggcaatgataaagatgcacatgtgctggcatataagaatctgtggatcgaagcagaagcttccatgtgtaaactcaagtatgaacttcaacttgcccgtatggaacttgcactgaaatatcacagtcaacaatcaggtgcacctcctactattccattagatgtccaagattctagcttgtccaaatccaagagcttgttatgtgatgaagtgcttgatgatcctagcaaacaacaaaaccatgtgaaagaaaacactatctgtagtgcaaccttgctacctgaggaaggtaatactggcgatggacaatctcctaaagtaaatagaagcattgcaaatgaagttgaggctggtgtctttactcaattgagagttttgagatcccgtggtgatagtatatgttcctttggcgagggaagtgatgaggagcagcaggaaacaagtaataacaaaaaaacaaatggttttgataatactgctgcagttagtatggatactttgaagtctggtgatgatagcatgaactctgtagtggtagaacctatcaaagagcgggtggaatcaagtaaaactgatgttgatactgctgcacctttctattcgtttgttaaacgtttatcgggctcttcaagctcatcggatgtggactttgacaagtttctatctagtattaaaaagcagactgatgttactgttatggctaggcacaaagatttcgtgtgcgataagggtaatataagatcattagatgacccactaatcaatgccaagcagcaagtaatacgaagcagctcgaagatgatgctttaaggtttttccaatccttgaaaattccggaggggataccagaagatcattcagacgatgggtcatcagactcagattattatcaaacagaacattatccattacgggttgaaccaggaagacttctcttcatccataaagtccttggaagtggaaaggaatggtgacataatttgctggatcaaccgtcggggttggtcacttgaactgaacttcaacaactcgtgctacttatgagcttctgtgtaaatgtgatgtgtgccctattgattcttatgattgaaacaattgcacatgtactttttagtagtttcatatttaatctcttttgagctttttagt

SEQ ID NO: 25928 - DNA, 2127 bp, Oryza sativa
  ref <308>: DATABASE ACCESSION NUMBER: AK101370
  ref <309>: DATABASE ENTRY DATE: 2002-08-28
gagtgcgctgcacgacctccgcctccccaatccgtcccgtctcctcgcccgccgccctcgactcccgtctcctcgcctgccgctggcgccgatctccatcctgctagcagaggtggcgccggcgtcctcctgctcccgccgcattcgcatcctaatccatcccatccggcctcggcctcgaatttcgtctcctcgcccgccgcttgcgccgatccccatcctgcgagcagaggtggcgcccggcgtcctccttcttccaccgcatcgtcgctcgccgctagtatattgaaggttgaagctttgtgggtatccagcaagtatttcaatggcgttgctacagtttggaggtaccttggcccccaaacttggggaaaaacctcagctgttgcccaggtcacctgcacttacaagagttatttatgctgatccaagatttctggtgtcgaaaagtggtagtggaggcaggcttaaacaccttgtatcacctactgctagtttacaatcacggacatcttctcgactatttaaccatgcaccatcaccgagatttcgccatcgaaggagttcaaggttcattgtcagagctgatgctgatttctattccacacttggtgtttcaagaaatgctagtaaatctgaaatcaagagtgcctataggaagcttgctaggagctaccatcctgatgtgaacaaagatcctggtgctgaacaaaagttcaaggatattagcaatgcttatgaggttttgtctgatgatgagaagcgatcaatctatgataaatatggagaagctggtttgaagggtgctggaatgggaacaggagattactcaaacccattcgatctctttgaatcattattcgaaggctttggtggaatggggggaatgggaggccgtgctgctcggaacagaccaatgcagggtgatgatgaggcctacaatctggtactcaatttcaaggaagcggtgtttggtgtagagaaagaaattgagatcaccagactggaaggctgtaatacatgtgatggaactggtgccaagcctggaacgaaaccaaccacatgcaaaacatgtggaggacagggacaagtggtctcctcaacaagaacgccacttggaatattccagcaggtctccacctgcaatacttgcggaggcactggtgaattctctaccccgtgcaacacttgtgggggtgatggccgagtgcggaagacaaaaaggatcagtctaaaggttcctgctggtgttgattctggaagcagattgagggtccggtctgaggggaatgctgggcggagaggaggccctcctggagatctttatgtgtttattgatgttctctctgatcctgttcttaagcgagatgggacaaacattctatacacatgcaaagtttcatatattgacgcaattcttgggacaaccgtcaaggttcccactgttgatgggatggttgacctgaagatcccctccggtacccagccaggcacaacgttagtgatgtccaagaaaggtgtcccactcctcgggaagtcaaatgctcgtggagaccagctagtgcgtgtgcaggtcgagattccaaagcgtctgagcagcgacgagaggaagctgattgaagaacttgcaaacctaaacaaggctcaaacagcaaacagcaggagataattccatgaggcttcattggacaaaatgctttggcaatatgcaattttaacgcaaattgcagtgactaagtgagcatgaactggtaaatcacttcacaaactgtacgctcatgctgcgccgtaccatcggtgggaactgtgaattctcatgtctgtaacttcatttttaagccatagaaatctagttccatccaaaacaccaaaacggatggtgttttacagtagcttgtcatatgcttttaggcgagcttattagtctatttttcataatactttttcacaattttgaaaggcctagggagaaatatttaatggtgcaaaagggacgagttttgaaacatttgtttgtcgcagaagcaccagaccattctgattgttattgtaagctgtaacatcaaagttttggcagcaggttttcatgtgctcttaagcgttgggggtttgttccgtttggtttcc

SEQ ID NO: 25929 - DNA, 2568 bp, Oryza sativa
  ref <308>: DATABASE ACCESSION NUMBER: AK101371
  ref <309>: DATABASE ENTRY DATE: 2002-08-28
gggatgtgcccccaaagatcccctcccctctcctctcttcttcactctgccccagagctgacttttgcttcttactcctactactactacttgtctttctctttgcaccctagcctcatgttcttcttcttcctcctctcctcctccttgtagcttccacccccaccccactccctcccacccccgccgcccgcttaaaagtccgattttggggaggttcgtgcgctcagatcggggagggggtccaacaccccatttcgtcttgctgcggcggggagggtggtgaagcgaaagtttggatttttttttttggggggaaggttctgcttggatgagctgcttcctgtgcttcggatcggcccaggagggggaggccaagaagcccggggctgactccaaggacgcgcgcaaggacggctccgcggatcgcggggtgtccagggtcggatcagataaatcgagatcacatggtggattagactctaagaaggacgttgtcatccaaagagatgggaacaaccaaaatattgctgcacagacgttcacttttcgtgagcttgctgccgccaccaagaacttcagacaagattgcctattgggagagggaggttttggccgtgtatataaaggacgcctggagactgggcaggctgttgctgtgaagcaacttgatcgcaatggtcttcaaggaaatagagaattcctggttgaggtcctcatgctcagtcttctacatcacactaacctggtcaatctaattggctattgtgctgatggtgaccagcgccttcttgtctatgagtttatgccattgggatcactggaagaccatttgcatgatttgccacctgataaggaacctcttgactggaacacacggatgaagatagctgcaggtgcagccaagggcttagaatacctacatgacaaggcgagcccgccagttatttatcgtgacttcaaatcatcaaacattcttcttggtgaaggatttcaccccaagctgtctgattttggtcttgcaaaacttggtccagttggtgacaagacccatgtttcaacacgtgtgatgggaacttatggctactgtgccccagaatatgcaatgactgggcagctcacagtgaaatccgatgtctatagctttggtgttgttttcctcgaactgattacagggcgcaaagcaattgacaacacaaagccacagggggagcaaaacctagtggcatgggctcgtccactattcaaggaccgcaggaagttccctaaaatggctgatccaatgctccaaggtcgcttccctatgaggggtctgtatcaggctttagctgttgctgccatgtgtttacaagagcaagctaccactcgccctcatataggagatgttgtcactgcactctcatatctagcttctcagacatatgatccaaatgcccctgttcaacatagcaggagcaattcgtcaactcctagggccagaaatctagctgggtggaatgaagatcgacgcagtgtgcgctcgccaaatcatcattctccagatctgaggagggaagctgccaggtcatcaagagcagaggttagcaggactagttctaccggtgattctggccggagatcaggattggatgatttagacatgacagggtcgcagatgggtagtccagctcaaacaggaagaaaaagagagactccaaggactgctgatagacagcgtgctattgcagaggccaaaacgtggggggagaattctcgagaacggaagcatccgaatggtcatggcagctttgatagtacaaatgagtaaatcggagggtttttgtttcagaaatcagtctacggaggatgaatctgctcatctacacgaaacggatccaatcaagtaacattgcattggttccacacggttctttatctgtgaataagacccttgttcttccccggccatcagtgccactccatggtcactatgtcattgctatttgacatgtcttagatctcccggcgtccattccttgtgaatgtgattgtgtcatgtgtctttagagttcggctccgttcgggagccgataaaattcagctggaaaggtaggcaacagaagagaggaacctgatgaatgccttttcttggttacctgatcgccatgctcatgctcagcaccacctgtgttacgaatgttacagcatttcaggtttggctacctgaggacgtgaagttacttccgatgagaattcaggtttggagataggacacattacctgtgtttcgtacagttttttcttttcttttcttttcttttgagttgcctgagcacttatttatttgtattagcttactgtacctctcatgtatcttagcgtgaacgttgttcgacatgcagcaagaggtttttatctgtatcaagctatttcagagccaatgtgttgtacatgtaatattttgcagtagtagtcaatcatgtgttcatcttgcaaagccaaatgagctgtatcaaaccaaatctgattggtgtggcagtgctcttcgcattgttgctatctgcagaagctatctgatgcttagctgct

SEQ ID NO: 25930 - DNA, 1488 bp, Oryza sativa
  ref <308>: DATABASE ACCESSION NUMBER: AK101372
  ref <309>: DATABASE ENTRY DATE: 2002-08-28
aaaaaaccccgtctcgtctcgcctcgcctcgcctcgccctgcgcgagaggtagaaataggaagggaaacaggagcagcgcgtgccgcctgggcctcctcccgctccccctccccaaccgccgaacccttcacattatcggtgcgcgcgcgcgcgagagggggggcgccctgccgcgggagttcgccgtggtggtgcggacggcgagggggctctgttgggttgtcggcgatggcgatccggggcccggaggcgtcgtctttcttccccctcacgctcgtcttctccgtcggcttcttctgcgcccgcttcttcctcgaccgcctcgtctacaagccactggcagcttactgtttcagtagcaaggcttctaagctgatgaatgatgaggtcaggcaagcaaagattgtcaagttctctgagtcgatttggaagctgacatactatggttctgttcaagcatgggtcctcttgataataaagcaggaaccctggtcgttagatacaatgcaatacttcgagggctggccaaatcaatacatgacgtcctcattgatgcttttctacatgtgccagtgtggattttatatctacagcatttttgctctcgttgcctgggagacccgcagaaaagattttgctgtgatgatgtctcatcatgttgtaacatctattctgatcggatatgcatatctgactggattttttcggattgggacaattattctggctttgcatgatgcgagtgatgtgtttcttgagaccgccaaactgtgcaaatacacagaaaaggagctcggggctagcttgttttttggcctttttgctctctcctggcttctgttacgactgatttacttcccattttggataatcaaaacatcaagctatcagtccatcatatctttgaggaagctggagaaattcccaacaacattgtattacattttcaacacaatgctcctcactttacttgtgttccatatttactggtggaaactcatatgcttaatgataatgaaacaattgaacaataaaggacaggttggagaggatgttcgatcagattctgaggatgaagagtgatggagcgattctttgacaactgtgatgtgtgccatttcattgctgatacttttctgtgcctgcttttggtactaaattgttttggtcttggcaagcttggagcatagataagaaagatttgcctctgtatattgccctgtggtatcagaaatggctagaccaagaacagagcaggttctatacataacgggtatagctagcaacttacttgaagatcccttcataatttttggtccgtctttctttgttattagaaaaaggcatgagaggtcgttttctgtagcttctcccaatgcttacagacccctctgtacaatgtttttgtatactttgactgtgagtaggtttagttctaattcatgggaataaattgattttttctaccaggagtaattctggctagc

SEQ ID NO: 25931 - DNA, 1783 bp, Oryza sativa
  ref <308>: DATABASE ACCESSION NUMBER: AK101373
  ref <309>: DATABASE ENTRY DATE: 2002-08-28
ggaagaggcaaaccaaaccaaacccaacccctcctccgccgcggcccgaaaccccaccggatcggcggcggcggcggcggcaggaggccggcgggcggaggagatgtcgctgacggaggtcaggatcggggaggaggtgtggctcacctgcctctcccacgccctcaccaccgagacggaggaggtcatgggcctcctcttcggcgacatcaagcattcgagcaggggcggggtgactgctctgatatggggggcgtcgccgcagatgaggtgcgagcggaagaaggacagggtggaggtcaaccccgagctgctcgcggcggcgacggcgcaggccgagagcttgtcggccaccatcggcgagaaaacgagggtgattggatggtaccactcgcacccgcatatcaccgttctgccttcccatgtagatgttcggacccaggcaatgtttcagttgatggagccaggttttgtgggtctgatattctcttgttttagcgaagatgctcaaaaggttggaaaaatccaagtgattgcttttcagtcacttggtggaaatcagcaatctgttgttcctgttaatgatccagtcattaaccttgaatcatcttggagttcgttggatgatacctcacatccggcattgattgaaggcattgaacaagacacgggggattctaaatcttcaagaaatagcaaggtgtgggcaaaatcttctgatgtggatttctatcctcattttgacgccaatcactcagcaaaacatcaatccaaagaaaatgctatagttgcatacgatcccaataatgcacctgagacccctgttgatctagatgaatcagatatgaccccaagcatccaggaggcgttgcacaggtcaaacatggacattagtggtgcagaatatgtaagaaaggaggtgccactttatgtatttccgaccaggcatctgctaaagctggacaccacattaacttcttactgtgatatgcaacatgtcgttttcgaagaggaaaaatcagcatataatcaagccatgcatcaaaatattcgtgatgggaagatccacccacttacatctattcaccatgcatctacatacaactcatctctctgcaaattaatggaatactgtttgagccctgctataactgtacttcaggatcgtctgaaggaaaatgaacttcggttatctatgctaatggaggaggctaaacaacttgaggcagagaaccagagcatgagaaatgattctcctcgtcgcttgatgtatcatgggactagtggcaccagttctctgatggcacaggataagcaaatgagccccagaagtcctagcggcaccggccggagaaaggcttcctgatttcaatcttgttcacttgacatggtgaatatcgtgagctgcggttccaccccttgctatctgcaatccccatttttccggtgtatgaaggtgtgtacagtggctttgtacatacctcaactcctcagcaccagtgctgttgtaaaagttactgcggcctcccttggctttgtactgctgttcctcgcgctgctgcttaatttgcgccaaatccctttcccttccgagggcttattccatgagcttgtagtttgtgctggggtggttgctttctttgagctattgctaattaagatgcaatgcatttcccgtgcaggcaaagacgaagcttgtttttgctttgctgttggaacagatcatgtactattaccaatccaaaagctgaaatgctcaggcacacttgctgccaaagtgtcg

SEQ ID NO: 25932 - DNA, 1009 bp, Oryza sativa
  ref <308>: DATABASE ACCESSION NUMBER: AK101374
  ref <309>: DATABASE ENTRY DATE: 2002-08-28
ggatggcgttggcctaaccggatttgcagtgcatcaggtaagggaaaaaggatggttagatagagagaaggggagttctgtgattggagaggagaggagacagggatgaggcagagcatgggatggggctatcaacagatgtagattattccttgcacaagagatgatgatgagctgtgaatgagttctgagagatggctggtgttgttgttgctccctcccctgcactgcctcttccctggctcccctgcacacctctctctctctctctctctctctgtgtgttagtatattgtttttatgttttagtaattattttccttccataagtgatacggtatttgtagcatgtaggtagaaaaaaaaatgaaactagagtgatgtgacacttcaagggctgttgcaaattaacacattttaaaatggaccaagcgtactatttctcagcatgtggttctagctcaaaacatgcatttcattcggcatgccatgctagttttaagctcagtatagcatttcaataatttatttgacatactaaatctagctcaaaactgcatttcatacggtatgtcatccacgtttctagctaaaaatagcatttcatttggcattgctatgctagtttctagctcaaaatagcattctaatttacatgcattgataattcctagttcaaaatagtaatttaagggatctttttccacttgaacccggagctgttttagtgcaggggaggaggaaactgcgcggtctgatggagattgggcaagattgggacggaaggaagcagaacaaagcgaaaaattcaagatatgctttgcgatttgccaattgcaatagtttgcaatagaatctccgtagtataatttttggcatgtcctgctgtaactgccggaaagaacaaaagaaaagctcaatcttggttttcagaccatgcaatgcaatgatgaaccgtttgttactactccatcatgacatccaaaagttcactcattttctgctgttg

SEQ ID NO: 25933 - DNA, 2605 bp, Oryza sativa
  ref <308>: DATABASE ACCESSION NUMBER: AK101375
  ref <309>: DATABASE ENTRY DATE: 2002-08-28
gggcgagcgttttctggggtgtccggtggccgccgctggcgaatcagatccgccacctcgccctggcgctccggcggccggcgaggtgggctgcgctgcgccgccgcttctggccagattcgcctgaggagtgtattgctgctatcgtccaacaaacaatatataaaaggatgctatgagatcattatgtaataaatccatgtcaaaatgggaataaaggatcattattcatattaaacattgcgctgcctgaaacggatttaagaactggaagtgaaacacaaggcaaagacccaaggaacttcaggtcgtgactcctgatggcaaagagactaagagagtcgatatttcatgacttgttgaagaaaaatatgaaccagatgtacagataccaagtacaccagagccaatgtctttttagagaggattgggtgaatgcagatgcacttttcaagttattcatcgaaggaagatgtagcacaccactcctaaacacgcagatctggaacatgctgcattttccggtgcatttctctatggatccaatctgctttgaagtcttgatgcagattgaggagccagagtttcttcagggagaaaagattttcaatgcccacagggactctctccaggccctggcagtgaatcgttgtataaaccttcaatgactggaagtgcatcatctgcgatcttcagccggttgacatttggcatgaggcttcaagacaattgtcttcaacttgggaaaggatcctgcagtaatgatcaacctgtttgcactaatcatgctgttaagtctcaggtatgtgaggtttggaacatgtagcccgagcactcgaagtggatcctctccaagttgacaccaacttagagctaggtacctgagatttttcccatgttcctgaaatatcggcaattccaatgtcccagtggcccactgccctctgacaattagcctatggaacttcttggatattggattgagattttggaatcagagtacctccttctcatcacatgcagagagaagcaggcttgaaagaagtggcatcttggacagagcagtaaaaatctttgcacaattagtagcactgatattatcaatccacaagttttgcagtttcgtcagcttctctagctgttctgctaattccttgctggcttgaacagtttcaagagtctggagttcttccaaacctgataaccctttaggagcttccactccaatgaagtatcggaactctgtccgtttctcatcagcatatctgtcagctataagatgccgcaacttcttgaccttaacaattcctcgtggtaatttcactattttggtttgcttgatatctaaagtttgcagattagagagattctcaatacattctgggagcttacatacgttggtgcgtcttaagccaatgtaccgcagattaaacagattacctatggatgtcggcacttcactgatttcagagtcttgcagctcgagaacactaaggtagtttgatcgagaaaaaattgagttcagcatgctggtggaggatgaaacagcttgaagggacaatagagttcggaggtgcggaaatgacacccttggtgcgctatcatctttccatccacatgttgagaagcgacgaacttctgtatccagctgcgtcattgtgccattatcacttgctgagccaaacatctcctctttagcaacatcaagagccaggttgcgcacaatgtcatgcatcttacaggcatattctgtttgtttccttgaggacaacaggcttcccatagatacaatcgctagcggtagaccttgacacctcttaactatagaagtagccacctccataaggtctttggggcagcctgttctaccatggaaagcccttctacagaagagattgaatgagtcagtgttgcctaaaggttggagatcaaggcgatattttgaggatgcaagagctgccacttcttccttccttgtcgtgatgacaatccgactttcctggagattctggaatgcattgcgcatcatagtctggtgattgctctcggtatgcaaccttcataagtagagtgcatagcaattcttccacatcgtaggtctttgatacaacaatccaagcatgagcagggaagtttcccttttcccggtcgtacacattttttaccaatgtagtttttcccagtccacccatgccggacactgttatcactgtaccatgcggctcattggaatacagccatccagtcaattttctcctattttcttcaacccccacaaggtcttcatctttaataaattctggcaggcagcctccagatatttgtctctcaatatcagaaggtgtttttggactcatgagctctgccgaaagagaccatttcattagatctttaacattccttggcagatttttcaagtttgttactttttcagacagtttcgctagaacagccttggtggcttcttctcctaaagtggtaccgatctttgagatggcaaggattactgcctccgccatcagtgctgaagaacagaaacatggagtcagtcttttatgtgatatgctaacaattaagaatatcaggcaagaacatcatctgattg

SEQ ID NO: 25934 - DNA, 2352 bp, Oryza sativa
  ref <308>: DATABASE ACCESSION NUMBER: AK101376
  ref <309>: DATABASE ENTRY DATE: 2002-08-28
gcgtgagcctttcggccggagaatctcttccacctttcactctcctcctgtcctccaccaaaccccactccacacttccacagtccacacccacacggcggcagcagcagtgagcgtcgtcgttccagatctggagctcgcgtgctcgagatggctggtgcggcggtgagcgcttcctccggggcgatgaactccgtcatagccaagctggcttccttgctcaccgacgagtacacccatctcaagggcgtcaagagcggcatccgctggctcagagacgagctgggaagcatgaacgccgtgctgcagaggctgggagacatggacgacgaccagatcgatgtgcagaccaaggagtggaggaacaaggtgcgtgagctatcctacgacatcgaggattgcatcgaccgcttcttgcaaaaccacagcagtggtgatgccaatgctaatctcctgcaaaagggcgtgcgcaagatgaagaagctgtgggagaaccatcagattggagatgagatcaaacaactcaaggaacgtgttatcgaagagaaagagaggcatgaacggtataagatcgcggatcggctcatggttgcaccccaacatgtgcgcttggatcctcgagtaccagccttgtatgagcaagccaaaaaccttgtgggcattgataagcctcgggaacagataattggctggataaagagcgaagagaagcaactgaaggtggtgtccatctttggaacgggagggttgggcaagactactctagctatggaggtgtatcacaagattgatgaatcatttgattgtcgggctatggtctctgtatctcggactcctgatatcaagaagcttcttagagacatactctttcagattaacgagcgcgagtatgaaaagtcaaacgactgggagatggaacaacttataccgaagttgaggaagaacttagaagacaagaggtactttttcatcattgatgatatctggagcacagatgcatggaaacaattgaagtcagccttgcctgccaatgacaacaagagtagaataattactacaacacgcataagagatgtggcaaagtcatgttgttgcgactttgtggggcatatgtacgaagccatgcctcaaagtgaagagaactcctgcaaattattttttagaagagtcttttctagcgaagattgccccaaacatttgacggaagcagctagtgtaattttgaagaaatgtggtggcttgccattagccattatcagtatagctgggttattgtccaataagaatccgacagtggaagtgtggaccaaaataaagaactctatctcttctatggttgagaaagattctcctgttgacaaaatgaagaggatattgtttctcagttattttgatcttcctcaatatctgaagacgtgcttgttatatttaagtgtctttccagaggattctaatattgatcctagacgtttgatacggctttgggtagctgaaggattaattcttggacagagcagagcatgtacggagcagtcgggagaaagctacttgcatgagcttataaacagaagcatgatacaaccgtcaaagattggggcagatggtagagtgaaaatctgcagaatacacgatgtcatactcgactttattgtgtcacaagctgaggaggagaattttgttaccatactgaataatagtgaccccagtgactatacttcaaataagtttcgcaggttatccctgcaaagtggcttttctgaaggctcgaagatgcctaaagcatcaaaggacctatcccatctccgatcattgcatatgtttaagcatgaaagtttgccagtagtcccttcagaatttgcaaaatgtcaagtcctgcgtgtgctggctataaaacttcgtctgggggacaactatattaaacatgttggacatttttgtgaacttaagtacttgagaatcaaaggaggtatccacaagctcccagaagagattggtaagctgcagcatctacaaacacttgatctggcatatactcgtattgaaaaactacctgcaagcattgtccagctacagaaactggtgcaccttctcatcccttttggagtgccgctgcctgacgaaataggaaatctgcaagctctggaggtgttgtcgggtattgatctagatagagcatcagtaaaatctatctatgggctaggtgagctgagcaaactgagagatgttcgaatctggtggtcagattccaacgaagataacagcaaggagggccacaggacagcatgcatctcctctctctccaagcttgtcaagtgcagcctccaatcattgcgtcttgcgcggggattaagc

SEQ ID NO: 25935 - DNA, 2134 bp, Oryza sativa
  ref <308>: DATABASE ACCESSION NUMBER: AK101377
  ref <309>: DATABASE ENTRY DATE: 2002-08-28
gagtttccaccttttccctctcttcctccgcttattaaaaggcggcgtccctccccgtggtgctcgccgccgtattcaagcggaggaagagagagagagagagagaatcaaggcagtagtcgtcttcctctcctctcgccgccgcatccgaccggagaaagatcccttctttccctcctccaagcccgcctcggtatccagagatggagacctcggcggcggcggcgcccaatggcggcgcggcggcggcggagcagcagcagcggcgtcggctgccggacttccagcagtcggtgaggctcaagtacgtgaagctggggtaccactacctcatctcccacggcatgtacctgctgctgtcgccgctgatggcgctggtggccgtgcagctctccaccgtgtccccgggcgacatcgccgacctgtgggagcagctccgcttcaacctcctctccgtcgtcgcctgctccaccctcctcgtcttcctctccaccctctacttcctcacccgcccccgccccgtctacctcctcgacttcgcctgctacaagcccgacccccagcgcaagtgcacccgcgagaccttcatgcgctgctccagcctcaccggctccttcaccgacgccaacctcgacttccagcgcaagatcctcgagcgctccggcctcggcgaggacacctacctccctcccgccgtgctgcgcgtcccgcccaacccgtgcatggacgaggcccgcaaggaggcccgcaccgtcatgttcggcgccattgaccagcttcttgagaagacgggtgtgaagcccaaggacattggtgtggttgtcgtcaattgcagcttgttcaacccgacgccgtcgctgtccgccatggttgtgaaccactacaagctgagggggaatgtcatcagctacaacctcggcgggatggggtgcagtgccggcttgctgtccgtcgatctcgccaaggacttgctgcaggtgcacccaaactcgtacgcgctggtggtcagcatggagaacatcacgctcaattggtactttggcaacaaccggtcgatgctcgtgtcgaattgcctgttccggatgggcggcgccgccatcctgctgtcgaacaggcggtccgaccgccggaggtccaagtatgagcttgtgcacaccgtgcgcacgcacaagggcgccaacgacaagtgctttggctgtgtcacccaggaggaagacgagatcggcaagatcggcgtgtcgctctccaaggacctgatggcggtggccggagacgcgctgaagacgaacatcaccaccctcgggccgctcgtgctcccgttgtcggagcagctgctcttcatggccacattggttgccaagaaggtcctcaagatgaagatcaagccatacattcccgatttcaagctggcatttgagcatttctgcatccatgccggtggccgtgccgtgctggatgagctggagaagaacttggagttgactgactggcacatggagccatctaggatgacactgtaccggtttggcaaaacatcgagcagctcactctggtatgagctggcgtacaccgaggcgaaggggaggatcaggaagcgggacaggatctggcagattgcatttggatctggtttcaagtgcaacagcgcagtctggaaggcgctgcaaacagtgaatccagcgaaggagaagaacccctggatggatgagattgacaacttcccggttgaagttccaaagatatcaaaggttggaaatgcatgacatgaaatgccttgtttgtctcaagagtagtaaaaagtatggtgggttgagtggcattgtgcattggcattggtagggcaggaagttcatcttcagggttctaaatccatttgcaattgttcaagagttctttggttttcagttgtagcatctgtgaggggaactttaaaaagaaaactgtagctgattcaattaggtagaaaaagggtgtgttttcttcacttagggctgtctgataatgctgtatttattcagattggagaaaacaattggagtcttcatgtgacgtttattcatcgttacctgattgtgattgcccttgtagcactgtcacattctcattaaatttatctcattaaattgattggttt

SEQ ID NO: 25936 - DNA, 1195 bp, Oryza sativa
  ref <308>: DATABASE ACCESSION NUMBER: AK101378
  ref <309>: DATABASE ENTRY DATE: 2002-08-28
gtctctcctcgaacgcgcgacgccgccgccagagtctccggctcgccgcacttcccgcctcgccgtcgccgtcgccgtcgccgtcgcccctcccgccggtaggagaaggtagctcggcgcctcggtgacttggcgtcgcgctctgcgcccctgccgctctcggtcggtaggctctcgtctcacgcggccccttccaccgcttcacgccgccggcagtgagcagtcagctgcgaggacccgctccaccgagagagctaacgccgccgccgcccgcggtgcgcgtagtgctcgagactgctgctggtgttgatagtgttatctgggatttttagtctgaggatggggagggcgaagagcaagggccctaagttcgccgccgtcaagaagatcatcaccaagaagaccatccagaagtacaaggaggatgtgttgaaccccaagaagaaggataacgagaaggagaagctcgggcggaatgtgcctcaggtctcttcggcgctgttcttcagctacaacacagcgctcgggccgccataccgggttattgtggatacaaacttcatcaatttctccatccagaacaagttggatttggagaaaggaatgatggactgcctttatgcaaaatgcacaccatgtatcacggattgtgttatggcggagcttgaaaagctgggacaaaagtatcgtgtagcattgagaattgcaaaggaccctaggttccagagattagcatgcacacacaagggaacttatgctgatgactgtatcgtagagagggttactcagcacaagtgctacatcgtcgcaacatgtgatagagatttgaaaaggaggataagaaaggttcctggtgttccaatcatgtatatcactcggcacaggtactcgatagaacgactccctgaagctacaatcggaggagcaccaagaatctgatcggcacggacataaaaaatggggaatgtttcactgttcaacttgctggccaagaatactgctgtagtagccttttgaaacaaatgctgtagtgagctgtgctaattgtaaccacttcaaagttttgtaccaacctcatgaggatattactgttatcgagatccaagagatgtgtttgcttccttcttcgtgtgtctatgccatttgaatgaggatattactggaaggaagcaaagttttgaatttacttgttacg

SEQ ID NO: 25937 - DNA, 2772 bp, Oryza sativa
  ref <308>: DATABASE ACCESSION NUMBER: AK101379
  ref <309>: DATABASE ENTRY DATE: 2002-08-28
ggcccgccgcctcgcacatactacaggaaggaaggacacagccagcccacgcaggcccgccgccgccgccgacatggacccttcggcgccgtccggtagctccgccgacgcctcggcgtcctcctcttcttccgccgtagaggacctcgccccgggcatggcggccatgagcctccaagaccggttcgagttgctgcggggcatcggcgaggagtgtatccaggaggacgagctcatgaatctgctgcagaaaaagcccgtccccatctgctacgacggatttgagccctccggccgcatgcacattgcccagggcattgtgaagacaatcaatgttaacaagatggtcagggctggatgcaaagtaaaaatttggatagcagactggtttgctcagctcaacaataagatggggggtgatctaaaaaaaatccagactgttggacggtacatgattgagatttggagagcagctggtatgaatcttgatggtgtggaattcttgtggtcctcagaagaaatcaataatcgtgcaaatgaatattggccacttgtaatggacattgcctgtaaaaataatgtcaaaagaataatgaggtaaccacatttggattgcatatgttcgtctaatggcttcttcacttccaaagcctgaagtgtaactgcaattttataacttgcaagtgagtatatatttttggctcacagatgttgtcagattatgggtcgaaatgattcggatgagttgacagctgcccaaatattctatccttgtatgcagtgtgctgatatatttttcttgaaggcagacatttgccagttgggcatggaccaaaggaaggttaatgtgctagccagggagtactgtaccgacatcaaaaggaaaaacaaaccgattattttgtcacatcgtatcctaatctgcccttgcatgttgattaaacctttatcttctgtaattaaacagcgcgggacacttttcttttggtctgtcaaattaattgggatgctaagccttctttctgaaaaaaaaaaaacattgtcaaaaattgtattactcccttaacgtgaattgcagacatgctccctggttttaaggagggccaggaaaagatgtcaaagagtgatccatcctcagccatttttatggaagatgacgaggttttcctgttattcaagtatcaatttctataacttctgaaccttgtgacacccactattgtaatataaaagaacatatttattacgcggtatgcctttcataacacaagtttaggcagcaagggctgtccaatagtagtgtatccttctgttttcagtgttggataactgctgaaagttcactaacttggatgaaagaaagtactaactgataagtgagataggaacaactaaaggtgaccccattgactatgctttgtgaaaaaaaaaaaactgtgcctttactcgggaccatcccaatctttgggcaagctagacccttcctaagaaatagtggaatgttttaagggtatttacctaggagaggtcatcatctaagtgctataattttatgttttttctggtgattttactttggttttagtttcctgatgcgggttgatagacacctatgttgttttgaatggctactatggcaaccttacatgctgatttgcagtttttcttttccttttgcttattctagtggataaataaaattctcatttactccctccttcccaaattgatcatcatatagtggaactcaaaatttctcaaattgatcatcatataaccgcatggacacggatttcatcataatacaattagtgcagcatgggagaatgtgagcatgctaatgtgtaattggcatggtgttttaatcgatgcatgtattgtgggagaatgtgtgcatgatgtcctgattgatgtgatttaaattatccttggtcttggtgtataaacatatatgatgatcaatttaggaagatgggagtatgtttctacaatttgctaattcttttctttttggtcttctatagcagcttctgttatgtacttgtaatcagagcatgtattcatcactacccaaactagttctaaatttattcatggcttaatttattgcaggctcaggtaaatttgaagataaaacaagcattttgccctcccaacgtggttgatgggaacccatgcttggagtacatcaagtatattgttttcccttggtttgaaatgtttgaggtggttcggaaggaagcaaatggcggtaacaagacatttacaaacatggatgaactcatcgatgattataagactggtgctttgcatcctgctgatgttaagccagctctagcaaaagcaataaaccaaatattgcagcctattcgtgaccacttcaataacaacagtgaagcaaagattctgcttaacactgttaagaagtacagagtaaccaactaaggaggaaactagttcaagcatctttgtcctattgatctacctggatattttctatggctactttggaaccatatgaacctaatatttaatggaggaattttgtttgccatttttttgtttttgtttttttatgtactgagttgcagagcaaccattgcatggtactgcacaaactttgtttagattattagttgtcagatacccaatctcgttttatcagtatggtgcaatgaatgttcatgatcaccttaatgttatagatttgacaagacaaaagtcgagtgcaaagtgcaaacatatggtggaaatgcatttgattttattcct

SEQ ID NO: 25938 - DNA, 2846 bp, Oryza sativa
  ref <308>: DATABASE ACCESSION NUMBER: AK101380
  ref <309>: DATABASE ENTRY DATE: 2002-08-28
gagagttacagtgctaacggcctgcagcagagtgcagtgactcccctgaagaaactggtatattaatatcaggtgtgtatatatttcacattttattctagtactactattaatgacatgtctatatatgtcaattttaagtacatacatgtatgggagattaaatttttgatatgttcacaagtttcttgctgatgaaacatgcgtcaaggcaggatgttgtgtaagggtgttaattactgattggtcattagttgccctcatgaatccatgaaaaagttcttcataaagtcatcacaagaagagaccttttgtgctctctttacggcatgcaaaggtcacgaacagtttaacaaaaacacctttgcatactagtctccctcctcgtcatacttcagcaaccacaagatttcttttctgaactttttactaatgaacattcagaaatttctgtgcaatattatctcatgacctgaaccaaacgatgcttgagccacgaaatagtagaggagacaaagatatagtttcgtcaattcgagaagtttgtccggatactacggatgatagcggcagatttggactggttccatgaaagttgtacagtaaggtgcgaatcttgagttgcagagatgcacctggatccggctatctagcttcacgagaatcccatctctactctcctaaattgcccacgaaactgaatttatgtagggatttttagcgaaattcagacatttttcacggggatgggtcggggattgttgactgataaagctggatttgaagaaacaacaaaattttgatatatgataccttgaataaacgaggagtttctgaagtagtggcatggtctgttccagatgtctctctgaacttccgtttcagtttcagtggaccatattgttggtgaactgaaacgaatattatcttctcgtagccacgtgcattctgtagattttcttttgctcagttcgacacatagacatctgaggctaattagctctgttaatcgcgcggtttgtgtaattctcacaaataattagtttctcgttcattgcaaattgcagcgagattttgtcgaaataataaacttggtgttcagttattctctgcaaaaaattgcatattgcagagtagctgagattggcgccatggccggcgagctcaaggtgctgaacgcgctcgactcggcgaagacgcagtggtaccatttcacggcgatcgtgatcgccggcatggggttcttcaccgacgcctacgacctcttctccatctccctcgtcaccaagctgctcggccgcatctactacttcaacccggcgtccaagagccccggctccctcccgcccaacgtctccgccgccgtcaatggcgtcgccttctgcggcaccctcgccggccagctcttcttcggttggctcggcgacaagatggggcgcaagaaggtgtacggcatgacgctcatgctcatggtcatctgctgcctcgcttccggcctctcgttcgggtcgtcggcgaaaggcgtcatggccacgctctgcttcttccgcttctggctcggcttcggcatcggcggcgactacccgctctcggcgaccatcatgtcggagtacgctaataagcgcacccgtggagcgttcatcgccgccgtgttcgccatgcagggcttcggcaacctcaccggcggcatcgtggccatcatcgtgtccgccgcgttcaagtcgcggttcgacgcgccggcgtacagggacgaccggaccggctccaccgtgccgcaggccgactacgcgtggcgcatcgtgctcatgttcggcgccatcccggcgctgctcacctactactggcggatgaagatgccggagacggcgcgctacaccgcgctggtcgccaagaacgcgaagcaggccgccgcggacatgacgcaggtgctcaacgtcgagatcgtggaggagcaggagaaggctgacgaggtcgcgcggcgcgagcagttcgggctcttctcccgccagtttttgagacgccatgggcgccacctgctgggcacgacggtgtgctggttcgtgctggacatcgccttctactcgtcgaacctgttccagaaggacatctacacggcggtgcagtggctgcccaaggcggacaccatgagcgccctggaggagatgttcaagatctcccgggcacagacgctcgtggcgctgtgcggcaccattccgggctactggttcaccgtcttcttcatcgacatcatcggccgcttcgtcatccagctcggcggcttcttcttcatgacggcgttcatgctcggcctcgccgtgccgtaccaccactggacgacgccggggaaccacatcggcttcgtggtcatgtacgccttcaccttcttcttcgccaacttcgggcccaactccacgaccttcatcgtgccggcggagatcttcccggcgaggctgcgttccacctgccacggcatctcggcggcggcggggaaggccggcgccatcgtcgggtcgttcgggttcctgtacgcggcgcagagcacggacgcgagcaagacggacgccggctacccgccgggcatcggcgtgcgcaactcgctcttcttcctcgccggatgcaacgtcatcgggttcttcttcacgttcctggtgccggagtcgaaggggaagtcgctggaggagctctccggcgagaacgaggacgatgacgatgtgccggaagcgcccgcgacggccgatcaccggactgcgccggcgccgccagcttgataccccgcggcaaaacccaaatggtcaatcatcagtgttttgttgtaatatatgtgcaatggatgattattctggttc

SEQ ID NO: 25939 - DNA, 3281 bp, Oryza sativa
  ref <308>: DATABASE ACCESSION NUMBER: AK101381
  ref <309>: DATABASE ENTRY DATE: 2002-08-28
gagagtgacacccatggcgacaccggcggcggcggcggcgaaggaggtggacaagaaggtgcagctcatgaaagagattagggcgcacgaggtggcgatcggcgagctcaacaacctgcctccctcccgggttagcctcccctttcttcctcttcccaagtacacttcactatgtgcttgtacaattcacatcaactagccacctggtcgcgcaacgcgcgactttggatacccattttaaaccccctatataagaaaactcttatgctggaaatgttataataggttggtttgttttgaattttgatcattaagcgttattgatgcattacctaggagtatagttaaaaattttatgacacaattgatgttgtaatgtataatcccatgttcaacataaactcaaaacaatcctacatcccatttatccattcacatggaaaaacatatttgtgctgcttgtaaccaatatgctacttttaaagtaaatataataatgactacaaaacaacttttactaattcaggaaaataataataggaaaaataatactgtaacacttattctgtgtagattcagaccatcctgtaccagtgctatatcaagttcatattatatatgcatagcaaagagctcatcatcttccgttttgaaggagataaagccgaaagtagttcagatttagaacattaatatgtcgcatataatctgagatgaattagattatacttgacttcttaggactgtccttaagatacccatcaagaaaaaaaagcatttatataatgattaaaacccatattgtgaatgaagcatttaactatacacattccaactatttaggaaggcggcgtatttatgctcagaaattctgaaggttgtcatgcaggtcatgttaatcatcagataaaattcagtgacaggggaaacaaccatttttaatcagcatattgcagccatggtaccatcagagtattgactgatgtttgaagattactgctgatatgaaaccgaatgaacctagctaaaaattaaccgttttaatctgaataacttcaaattttgttgcaaatgcaaggacaaaattgcatgatattttatctgagtttttcttggttatattatgagtatcatgagacatccaataggtgtggttaaacatataaacgatttaagcaagctagctgtgaggaaatgtagaagaaaatgcagagacattgatttggtatcgtagctagtgtttgcctgatttcagaatatatgtatggattgaaaagctactgaatcaattacaattaaaatcctatatctggtcctgtcatatatcataatattaccatattattgcaaagttctactctctgatcaatccctgacaatgcattgtcaagcactgcaatctcattacctaaatagctccaaactgaactcctcaggctccttagccccttatcttgcagaatgaggagatatgctatgatttcttgtttctgcactattgggaggtgaataaaggagtaatctactaatacctttctgctcttgaagaacaaaagttttgtttcaaccagcaagtttacattcttttaatggactatccatgtatcatggtgaaggaaaaaagtagatgctgatttttaatttgagctatggcgttgaggtactgtttctgtcaagtggtctatagttgataattttacaaattagggacatgctaattttattgacaaactggatttgtggttcttactcaatccacccctagattcaagcagtattgtgttgtgcaattaattttcggaagaggatctttggcagctctcgccattaatggagacaaagaatcgacgaagttgcgtacatcagcctctgctatagtgaaacgttgttgggtggaattcacgcagcttcttggcaatcagcaagaacatctctagtttgctatatgccctagagcttaccggcgaggcggtgcagtatacggtgcgtctcctcggagatacggtagaagctggcgccctgtttcatcgtggcgagcggggcagcctcctgccgcggcgggattcggtggctagatcgatccgtgggtggagggcagggacgaggtagtggagacagaggcagcattggtagagggaagaacccttagtgatttggcctccactcttgttccttgcttcctgttcctcatcttgtgtcgctactgagagctgatgttcgcggtccgccgacccatcaggcgtgacagaagaggaggaagtggtggcgtcggggccttgggggctgagggcggagggccgcgactaggaggtggggaggcggcggcggcagtagggactagtcgccggtgtctcggcctatcgcgattctacactctggagcgtaggcgtcgacggagcaaactttttttttttttcatacctttcagggacatggaaggattttttagcgaaaagaagtttcctgaagggtggagaagaaatttcgccaatcaaaggatcctacggcttgcatcatccggaaccgatatcgggcggcccatatttattggatgatgtggcacagtattttgcaagaaagcttgttgctttcactattttagatctttggtcaccaatggcagcaaatgtcacgatatctgcaccaaattaggtcaagatttactggtaatagttcaaaattagctatccttgctggatcaaactgataatagattcatgtttggcatttgtcctgctctgaaatccagcattagctgctcttgctacatcaaaactgacaaaagatttatgttggcatgtctcctgctctgaaactcttcttggatggatgatgcaggcggtgtaccagaagacctgcaacctcttcttccgcaagagcgtcaaatctgcggtcacgtctgagcagaagcaactggacatggcgaaatctcgattgcagaagcttgatcaagcctgaagcatcaccgcaaccattgaactcctgaacatgaactgctctgctgaatcatatttacatgcagatttgcttattgttcctatgctaagaccttgttgtaatgtgattccggtcagctttatttgggatgacatcacatgggcatgtttggttctgctaagctagagattaaatcccctcaaaaaaaaaaaaggctagactgctagggctaaggtagggttatttttagtagctttccttgtaaacacatcactgcttcatcgctagcttgtcagcacaaagtgaatttctctgatgaaaatagaagatgtattgcaaacagg

SEQ ID NO: 25940 - DNA, 1800 bp, Oryza sativa
  ref <308>: DATABASE ACCESSION NUMBER: AK101382
  ref <309>: DATABASE ENTRY DATE: 2002-08-28
gacatttcacacttcacatggcaacagaagcagcagcaacagcaagatgtcttcttcttcctcttctttctcctctccaatctccacacaagcagcagcaactcatctttgctgctcttctccttctcttcttcttctcttcactccagagtttgcactgctatgctgctgctggttacaatgagcagcaggaagctgatagggtggccttcctccccgggcagccaagcagcccgaaggtctctcagttctcaggctacatcactgtgaacaggcagaatggcagggcactcttctactggttctttgaggcccaggcactgccctctcagaagcctctcctgctctggctcaatggagggccaggttgctcatcagttggatatggagctgcctctgaactagggcccctcagagttagcagaaatggagctgggcttgagttcaacaaatttgcatggaacaaagagaccaatttgctgttcttggagtccccagttggggttggcttctcctacaccaacacatcctctgacctcaccaaactgaatgatggttttgtagccgaggacgcatataatttcctggtaaattggttggacagatttccacagtacaaagaccatgaattctatatttcaggagagagctatgcaggtcactatgtgccacagcttgcagaccttgtctatgagaggaacaaagacaagaaggccaacagatatatcaaactgaaagggttcattgttggtaatccacttactgatgatcagtacgactcaaaaggtcttgttgaatatgcttggagccacgcagttgtgtcagatggaatttatgagcgcgtcaagaaggtgtgcaacttcaagatctcaaactggacgaatgattgcaatgaagccatgagtagtattttcagacaataccaagagattgacatctacaatatctatgcacccaagtgcaatcttgctcaaacatcaagagtagctgctttcgatcacgcactcgaagcaagcgatcaggaacaattcagtaggaggattaggatgttctcaggatatgacgcgtgctactcatcatatgctgagaagtacttcaacaagccagacgtgcagaaagcattccatgcaaatgcaaatgggatgctccctggaaaatggaaggtttgcagtgactccattctaaggtcatacaacttttcggtgctttctgtcttgccaatctattcgaagctcatcaaagcaggactcagaatttggctctacagtggagatgccgacggtagggtcccagtgatcgggtcaaggtactgcgtggaagcgcttgggctgcatatcaagagggactggcaaccttggtacctgaacagacaggttgcaggaagatttgtggagtacgatggcatgaccatggtgacgattagaggtgctggacatttggtaccccttaataaacctgaagaagggctcactctgattgacacatttcttcttggtaaacagctcttaacacaccgatgaaaggtaaatttaggttaaaaggaagttgggactatttgtcctaaaagttgctcaatgagtgtcaaccattattgtttgagaaagaagtgtcaaccattattccaggagccatggcatagctgaaattattccttttaagggacagtttgaatttcagtctgatccttttgaatgctgctgttgcattctttcacttctttctatccagcctgaagctcttggtaacttttgttggtaaagcatctcaagtctcaagcaattacattgataagattgtgct

SEQ ID NO: 25941 - DNA, 3867 bp, Oryza sativa
  ref <308>: DATABASE ACCESSION NUMBER: AK101383
  ref <309>: DATABASE ENTRY DATE: 2002-08-28
gtccttggattgaagcggacgacactccctctccctcggcggcggcggcggcggcggcgagaggcgggcggggagatggtgaaggcgcggatgacgacggcggacgtggcggcggaggtcaagtgcctccgccgcctcatcggcatgcgcctctccaacgtctacggcatcacccccaagacatatcttttcaagctgatgaacagcagtggaatcactgagtcaggggaaagcgagaaggttttgttgctgatggaaagtggtgttaggctgcataccacccaatatgtccgtgacaagagcaccacaccatctggtttcactctcaagctacgaaaacacattcgaagcaagagacttgaagatgtccgtatgcttggatacgataggattatcctgtttcagtttggacttggcagtaacgcgcattttgtcattttagaactatacgcacaaggaaatatacttcttacagattccgaatacacagtgctgacactactccgttcacacagagatgataacaagggattggctatcatgtcgcgtcaccgctacccagtagaagcatgccgtgtttttgaaaggactgactttacaaagttaaaagacacgctgatgatgaatgcagttgatgataaagaatcttctcaagttacacccggttcaattgatgctcaagaaccttctgtaacccccagtgttggagtgccggttactgataaatctgaagaaccatctacaacaacaggaaagaagtcagcttcaaaaaacaagcagtcaagttcaaatgcaaaagctagtaataatgctccatcaaataaatcaactctaaagacacttcttggggaagcattggcttatgggcctgcattagctgagcatatcatattggatgctggattgcttccaagtacaaaggttgggaaagacccagagagcagtttgatgatcacactattcagtccctagtagaatccatttcaaagtttgaggattggcttgtagatgtcatgtctggtcaaaggatccctgaggggtacatcctcatgcagaataaggcggctgcaaagaagaacctcacacctttggaggggtctagtgctagtcagaagatatatgatgaatattgccctgtcctgttgaatcaatttaagtcaagggaattcaatgaatttgagacatttgatgctgctctagatgagttctacagcaaaatagagagtcaaagggtgaatcaacagcaaaaatcaaaagaggactcagcggcacaaaggcttaataaaattaaattggatcaggaaaatcgtgtacatacattgagaaaggaggttgaccattccatcaaaatggcagaattaattgagtataatttagaggatgtggatgctgcaattgtagctgtccgcgtttcccttgcaaatggaatgagttgggatgcccttgctcgcatgattaaagaagagaaaaaggctggaaacccagtagcaggtctaatcgataagcttagttttgaaagaaattgcatcactctacttctaagcaataatcttgatgacatggatgaggaggagaaaactgcacctgttgaaaaggtagaggttgacctatcactttctgcgcatgcaaatgccaggcggtggtatgaactaaagaaaaaacaggaaagcaaacaagagaagactgtcacagcacatgagaaagcattcaaagcagcagagaagaagacacgtcttcagcttgctcaggaaaaaactgtcgctgcaatcactcatatgcgcaaagttcactggtttgagaagttcaattggttcatcagcagtgaaaattacctgattattagtggccgcgatgctcaacaaaatgagttgattgtcaagcggtacatgtcgaaaggagatctctacgtgcatgctgagttacatggagcttccagtacaatcatcaagaatcacaaacctgataatcccattccaccattgacattaaaccaagcaggatctttcactgtttgccacagcaaagcatgggattcaaaaattgttaccagtgcttggtgggtgtatccttatcaagttagcaaaacagctcccactggcgagtacctaacagtgggtagttttatgatccgtggcaagaaaaattttctcccacctcacccccttgttatgggatttggtattctattccgtttggatgagagctccttggcatctcatctaaatgaaaggagggtcaggggtgaagacgaggaggcccttcctgatgttgagtctcagaagctggaaagtaatgctgaattggatggtgaacttgacagtgatagtgagactggcaaggagaaacatgatgatgaatcaagcttggataatatcaatgttaaaaaaattgacaatcccatcccttctaatgcaccttatgttaaggataatgctgattcatctgagcagctttctgaaatccgaactgtggtaaacagcactacttccacttccaagggacaaacaagtgatcgcactgtttcatcacaacttgaggatctgcttgataagaatcttggtcttgggccaactaaggtgttaggcagaagctctttgctcagcagtaattctgcaagcgtggcagatgacattgatgatcttgatacgaagaaaacatcagtaagagataaaccatacatatctaaagcagatagaagaaaactgaagaaaggtcagaatgttggtgattctaccagtgactctccaaatggtgaagctgccaaaaagcctgttaactcacagcaagaaaaaggaaagacaatcgaaaagcctgctaatcctaaagtaagtcgtggacagaagggcaagcttaagaagattaaagagaagtatggagagcaggatgaagaagaaagagaaatccggatggctttacttgcgtcctctggaagggcctcacaaaaggataaaccttcagaagatgtagatggagccactgcagctcaatcaaaaccatcgactggtgaagatgacagatcaaaaatttgttataaatgcaaaaaatctggacatctttctcgtgattgccctgaaagtacatctgaggtggatcctgctgatgtcaatgttggtagagccaaagatggtatggatagaagcagcgcccctgctggtagcagcgtcaccatggatgaagatgacatccatgagctcggtgatgaagagaaagagaagttaattgatttggactacctaactggaaatccactgccaagtgatattttgctatatgctgtaccagtttgtgccccttacaacgcattgcaggcatacaaatatcgtgtgaagattaccccgggaactgcaaagaaaggaaaagctgccaaaactgcaatgagtttgttcctgcacactgctgacgccacaaaccgtgagaaggagctaatgaaggcatgcacggaccctgaattggttgctgccattgtagggaatgccaagatcaccgcacctggcctcactcaactgaagcagaagcagaaacagaaggggaaaaaatctgcaaaagaaaactagttcaaagctatcagagaccaccccgttttgtcaagaaaagtatttttctctgcagaaacaatgcaaatgttttggtatgttgtcaggcgcatttggatggaggtgtcacatggattggccctcattcttgtaaagtttaaacatctctttggcattcatagccataggacaggatataatgtaaacagatacggcagaacattggaaccgattgacaagcttcatacgcttacaaagggacgctgagtccccttttggtgtgtcttgtgatgtatgaaagctacaaaaaaaaaatcatagatttcactttagc

SEQ ID NO: 25942 - DNA, 1747 bp, Oryza sativa
  ref <308>: DATABASE ACCESSION NUMBER: AK101384
  ref <309>: DATABASE ENTRY DATE: 2002-08-28
ggccgcatcagcaatctctctttctactagggtctcttctaccagcgattcttcccctcccaccgtcaaagcagggccggcgagatgtcctcccccgacgaggacccgccgacggagcacgagcggtggagggatctggacatgctcctctcccgccccggcaacctcgtccacgccgacttcaaccccagccccgggctgcgggactcgctggggagcctcgtggaggtgctggtggtgggcgcgggcgggctggggtgcgagctcctcaagggcctggcgctctccggattcaagaacatccacgtcatcgacatggacaccatcgacgtctccaacctcaaccgccagttcctcttcagggttcaagatgttgggaagtccaaggctgaagttgctgcaaagagggttatggagcgagttagtggagtgaacattgttccacatttctgtaggattgaagataaagagatagagttctacagtcaattctcgataattgttcttggtctagattcaattgaagctcgaagctatatcaattccgtggcgtgtggtttcttagagtatgactcagatgacaagccaatccctgggacgcttaaacctatggtcgatggtgggactgaaggtttcaaaggtcatgctagagtcatcatacctgggacaacaccttgttttgaatgcaacatatggcttttccctccccaggtcaaatttcccttatgtacacttgctgagactccgagaactgcagctcattgcattgaatatgctcatttgatcaaatggaatgaggttcatcctgggaaaccttttgatgctgatgatgcagaacatatgcagtggatttactcagaggctttaaagagagcagaactttttggtatttctggagttacatattcgtttacccagggtgttgtcaagaatatcatcccagccattgcttcaacaaatgcaattgtttctgctgcatgtgcgttggaagctcttaagcttatctctgggtgcagcaaaactgtgtcgaattatctcacgtataacggccttgatggaacacacattaatgtaagcgaatttgcaagagagaaagactgccttgtatgtggacctggtacccttattgaacttgggacatcgactaccctctcagagttcatcaagatgcttgaagagcaccccaagctgctaatgtcgagggctagcgtaacacacgaaggcgataacctctacatgcaggcacctgaagtcctagagcagatgacgcgaccaaacctgggtgtcccaatgtttgagctactcaaaggagctgcacgcacgactgtgcatgtaactggaatggcagaaaacaacgggaagaaagtatcctctctgaggaagctgcgtgttactttcaagggcgtcgaggaatcttcgaaaatggatgagagttcttgatactagtttatagctatggctttcaagaactgagaattaaccaattgtaccggggggaccgaagtgcttagagataaaatgcacaccacattcaaaactgtttatttgtttaaatgaaattggctaaaaaaagagaaaatgacatgtatacattctcacaagcaattcacaagtccggacgcgactcccagttgggtgcccgggagggggtcaaatcggtgctgacgtcagcatgatgtcagcgtcacgcatatgtgtaaaaccactttaaactattttttttctcttaaattacttatccaaatcg

SEQ ID NO: 25943 - DNA, 923 bp, Oryza sativa
  ref <308>: DATABASE ACCESSION NUMBER: AK101385
  ref <309>: DATABASE ENTRY DATE: 2002-08-28
gtccagcttaaaaaaaaaatcctccaacagcctctccaatcgaatggctaagccattcaattggtcaaaaccctctcttcactggccaaatttggcccactaaaaggcactagcctactgtgggccccacacaaattcctcctcacatctcctctttggctcatcgcatcggctcgcttgctatgtcctgatgtcgacgacagcacagaggagagaggcgtcggagctgcgaccgtccctgtcctctgtgccatcgcccgccgccgccaccaacgagaagcagaaatgcaacataaaggaggggagcgtggagcggacgaggctaacgaggagtgaatccggcaccaacacagaggagcgccatcaccactgtcgtcgtcaaggtcgccgtcgccatccaccgctactgccgaggtctttgtcgccagccgtcgttgccgtcgtttgtgccgtcgccattcgctgccatcatcaccgaggtcgccgtgtctaaaggcctctagccaagcacggcgtccgcccccgccgtattcgtccgactccgccccccgctggattcggggtgtgggggcgcgacctctgccgcctccgtgcggcctccggccccgcgcggcctacgcctcggctccataggacgtcgttgccaaggtcgccgtcaccatcctctgtgcggtcgccgtcacgcacttgcacgggaagaaggccaagagaagaggaagagggagagaaagaggaggaagaaggggtagtagaggctgacgtgtgggtcccagtgtcataggcttataatggagagtgttgatggagaggctgttggagtgaggaataagtttggcttgccaaattaattggagagctggctatataagtgtttggagagtccgatttgaagagactgttggagatactctcactcacactcc

SEQ ID NO: 25944 - DNA, 1107 bp, Oryza sativa
  ref <308>: DATABASE ACCESSION NUMBER: AK101386
  ref <309>: DATABASE ENTRY DATE: 2002-08-28
ggggagagatcacaagctgagagctctgagctcacctcacccaagctccaaatccttcctctcctctcgccgacacgcacgcccacccagcttcatcggatccggcacgcggcgacaatggcggcgacgacgacgatccccgcgcggccgctgctggccgccgtgctggcggcgctcctcctctccgccgcctcggccgccgacagcaaaaataaccctgccgaccagcttgtggcattgatcaacagcaaccgcactgccagcaaggcatctactcttgatgataaccaaggcctaggatgcattgctctgcagtacattaaagcatacgagggtcagtgcaaccaagtcggtgaaagcaagaagcctccggagaccagcttcgctgaaacatttgccccaaattgtggcgtccaagctgcaacactcaccaagatcaccgggaggcttctggcttgccagtctaactatgcgaccccagaccaggcgttcaacttcctggttaatgatgcgaagagcattcaggtactgcacagcaagaaccacacggaggtgggagcagctgtcagtggcacttctggcggcgggccgtacttctggtgtgtcttgttcagcagcgggaagccaaccaccagcttcaaggtagatggtggagtgcccaagtctgtccgtccaggatgcttcagtggcaacaacgacgattgcatgggtgccaatgctgcagtttcgatcggtgcaggtacatggagactggtggctgcactacttttctccgcggcttgtgttttcgctttgtgagtttgagtagaaatgtgttgttgcaccattcttttgctcgtcttggacctggtttggaattttgcttctgaaaaccagtagaacactcttgttgctgccgcactgttcttttcctttcttagcagctgaactctgtcaggattaaagagcattgttttctgcacttatagatgatgaattacctgtgcaggctgttcatctgttgtatttatagtatttatctattcaaatgtactctttggaaaataattgtgattgtaagatccttttgatcactcgtctattcccatcggatgcgctttctgcagc

SEQ ID NO: 25945 - DNA, 1383 bp, Oryza sativa
  ref <308>: DATABASE ACCESSION NUMBER: AK101387
  ref <309>: DATABASE ENTRY DATE: 2002-08-28
gctctctccatgcccaggcgagggagtccgccgcctcgcctcctcacgcgagccactgctgtcgccgcaccatcgtactgtcgtcgccatcctcctctcgctccggtcgatgcatccgccaacgaggaggccgggaccgtcggatccggtgaccccggcctcctcgtcggcggaggggagaccgactgtcaccctctctactcttctccttctacgtccggcaccgctacaacgacggccgcgcggatcgcgtgaggcaacgggtggctgctccctactcttctccctctccctctccattctcttcctttgcagatcggcggaggcttgcaacaacaacaacggctgcgtgggtgagcaatcgaggaggccaggaatcaccagatccggaaggacggcggcccggttcggagagggagcatcccgatctgtggcattgaggcccattgtaagtgtcgatggcggtcgttccttcacagtgatccagggccgctgggtctattgagctcggtatcgacggcagcagcagctcgggcaagatggaagaaatgtgtcagacactgcctcctccgagagcatacaccagcgacgaggccaaagtcgatcttccgcaaccccgtctggcattataacttaatcacttcagcttcagcttgcttggagcacgccggcgcagggtttcctcgacgggtcttggctctgccgtgccctcctcgcgccgccctttcatactgacagttgttcgaggttgcctcccccgctcatggcgacctccacctcagttggagttgggaagctcctttcccgacgtccccacaacacggtgaccttggcctcaacccggtgctgctacgctcagctcaacgattgctcaaactacaatgggcaataacaatattgcatttgagggcctcatttttggttgccctcacctgagcatatgtaggatacagcctgtgatgatgccgttagtacagagttgttccctctctcagcctcccaccatcttctcctgtctctctctgagcatcacctccattgctgtcaaggtgatgtttgagctcaatcggtcaaagaaggttgaatatgtaaataatttgccaacatgattttctcatattgggtggtttagtaagttaacacttaataccaatcacttcatttcagcttctcactaacaagcagccaaggtctcttcacggattattgtccatggatggccaagcttttcagcaaaatgaaaaggtgaaatataatgaaatattattcccttgctccataaagcttcagatgtggagtgagcttgctgctctgcaagctgacattccatttttaaatgtagagtgtgcttgaattaatcaaagaagcagatttatatacatc

SEQ ID NO: 25946 - DNA, 2403 bp, Oryza sativa
  ref <308>: DATABASE ACCESSION NUMBER: AK101388
  ref <309>: DATABASE ENTRY DATE: 2002-08-28
gggggtacccataatctccacatcctcctcctcccacctctactccggccaccggccgcctcctcccacgctccccccgccgccgccgccgccgccgccgccgccatcgccacccgcctcctccttctagcagtagtaataaaggaaggaagaaaatccaccgccctacccctatctatccgttgcctcacgtccgtttcccacattttccgcttccttcgtccatcgccatctattaacccgcccccccacgattcctgccgagaaatttctcccccccacagagagggaggcgatccctagcctcgtcctgaatctcgcggcgccgccaattcgatctgcccgcgccgtctcagggcggcgaatcttgggctggagtcggggggagagatccgggatcttccttttcttgggtgttcccgggacgcaaatcttgcggccgccgggcaatgtgactggggttcttgtggggggtgaggcgattcgcgcgcgcattcggtgctgaatcttgcggggatggagcatgtgatcggggggaagtttaagctggggaggaagattgggagcggatcttttggggagctataccttggtgtgaatatacagagcagcgaggaggtagccatcaagttggaatctgtaaaatcaaggcatcctcagcttcattatgagtcaaaactatacatgcttctgcaggggggaactggaattcctcatctgaagtggtttggagtggagggggagtacaatgtcatggttatcgatcttcttggtccaagtttagaggacttattcaactactgcaacagaaagttttctcttaaaacagtacttatgcttgctgatcagatgatcaacagggtagagtacatgcacactagggggtttctacatcgtgatatcaagccagacaacttccttatgggtttaggccgcaaagcaagccaggtttatgtcatcgactatggtcttgcaaagaaataccgggacctccaaactcataagcatataccttacagggagaacaaaaatctcacaggaacagcacgctatgctagtgtaaacacccatcttggagtagaacaaagcaggagagatgatttagagtctctgggctatgtgcttatgtatttcttaagaggaagccttccttggcaaggtctaaaagctggcacaaaaaaacagaaatatgacaaaattagtgaaaagaaaatgcttactccagttgaggttctctgtaaatcttatcccacagagttcatttcatacttccattactgtcgatctttgcgatttgaagataaaccagactacagctatttgaagagacttttccgagatctattcatccgtgaagggtaccagcttgattatatatttgattggacgaagcaaggttcagaaagtaacagattgcgatcaagtggaaggacaagtgggttggtgggaccatctgcagaacggactgaacgagctgcagcaagacaggatgttcctgacagattctctggtacagtcgatccatttgctagaagaactggctctggttctggccattacggagagcacacaaagcacagaaatatattggattcattacttgcacccaagacggctgttgatttagataaaagaaggcccacatcatcatctcgtaatgggagcacatcaaggaaggctctcttgtcaagcagcagaccaagttctggagatcccattgatccgaaccgcagtaacctaattccaaccagcagtggcagcagtcgcccatcaactatgcagaggcttcaccagtcaacaggacttgagaccaggtcctcgcttaccaaaactgcaagaaatgtccatgatgatcccactttgaggacctttgaacgcctttcaatcagtgctgacagaaggaaataatgcttcgaagagcaaaagatgtgagttgctgctccagtgaggacactggggattccttcacacgatgattactgatcaacaagtaaaaaccattctgtgctacagatgatgctgagatatgcttaagagtgaagtttgcttactgaatcttggcgcaaaagaaatggttaaagaaatcattttacacgccattcagaagaacccggaccagcaactgtgctggtccaattaatgctgatgttgatcaaatatttgtagaaatgttattgaaataaagcagttcattactagcaaaatatgtactatcacgtagtatttcctttgtgcactgcaactagaacttctgccactctgccactatactcttaagataatcaatatccttttttgccttagtgccctttagatactccgtcacattatttccttaaaaacttggagatcatgtaatcgttattaatatatcatacgatcagatatcgttattcaactagc

SEQ ID NO: 25947 - DNA, 1744 bp, Oryza sativa
  ref <308>: DATABASE ACCESSION NUMBER: AK101389
  ref <309>: DATABASE ENTRY DATE: 2002-08-28
gatttctagctagttagtatctcatctcctttttgctgaggctgagggagaggcagaggctgcctcacgcatccctgtcgatctcggtcaagaatggggttgctgatgaggcccgtcgccttgctcatctactgcaccaccgcctccctcttcttcctcacctcctcctcctccgccgccatcgccggtggcacgccggacggctcggaggagtggggctatgtccaagtacgcccgaaggcgcacatgttctggtggttgtaccggagcccgcagcgcgtgaacaacaagggcagcacgccatggccgaccgtgctctggctccagggaggcccgggcgcttcgggcgtgggttatggcaacttcatggagatcgggccgctggacaccaaccttaaaccccgcccatccacctggctctccaaggccgacctcctcttcgtcgacaacccagtgggcaccgggttcagctacgtggagggcggcgacaggacattgctggcgcgcacggacgccgaggcagccaccgacctcaccactctgctctcccaactctaccgcagcaacaacacgcggctgcaggggagcccactttacatcgtcgcagagtcctacggcggcaagttcgccgtcaccaccgccttggccgcgctcaaggccatccacgccggccgcctcgccgccagcctcgccggagttgcgcttggtaatagctggatttcacccgaggactcggtgctttcgtgggggccattgctgtaccaagtgtcccgccttgacgagaacggcctctacctctccgacagcctggcgcagcagatcaaggcgcaggtgaaggcagcacagttcctggaggccgagaacacatggcaaagtctggagtccatcattctcgagcaagccaacttcatcgacttctacaatttcctcaaggatgactcgtcgtcggatgctaatttggagcagcagcagcggcagaggctactggcgtcgctggggcagtcgaggaggcgctactccagctacctgagctccaaggtcacaacggaaggcggcttcgagggcatcatgaacaccgtcatcagggataagctccggatcatacccaaaaacgtcacctggagcgagcagtcagacgatgtgttcgaagctcttgcaggagacttcatgaaacccagaatccttgaggtcgacgagcttctcaaccttggcctcaacgtcacaatctatagcggacagcttgatctgatctgtgcgaccaagggaacattggattggattcagaaactcaagtgggatggtctgaagaacttcacaaactcacgcagagtgccgctctactgcagtggtggtgaagcagctggcacccaagccttcctcaaatcttacaagaatctcaaattctactggatactgggagctggccacatggtaccaatagacaacccttgccctgcattgaagatgcttggtgacattacacaatctcctgctcagtagaaaagaggaggatgacactacatgctgacaccaactgaagattctttttctccttaatttctactttcacctttttacacagaaaagaaaaaggatatcatagcattgatgagataagaaaagatagcagagtgatataaatagagagagagagatctgtttcactttatattatagtactggtgcagctggtttttcggtggcagggtacaatataaaatcaaatttattgcatgcagcttgc

SEQ ID NO: 25948 - DNA, 1332 bp, Oryza sativa
  ref <308>: DATABASE ACCESSION NUMBER: AK101390
  ref <309>: DATABASE ENTRY DATE: 2002-08-28
gagttgtggtgagtgtttgacgaattttttttttttttttttggcggctcgattgcaacccgcggcccgcaacaaatccgacgccaaatcggacacggccggcgactccggcgacccaccaccacacaccaatcctcctcctcctcatcgccgcctgcgacggcgaggcggcgagcgatggattccctgggcgtgctgctggtggcgccgatgaacgcctacctggagcaggagctggaccggcggtgccgcctcttccgcctctgggagtcccccgccgaccgccgcgacgactacctccgcgcccacgcctcctccatccgcgccgtcgtcccctacgccctccagggcgtcgacgccgccatgatcgacgccctcccctccctcgagatcgtctcctccttctccgtcggcatcgaccgcgtcgacctcgacgcgtgcctccgccgcggggtccgcgtcaccaacacccccgacgtcctcaccgacgacgtcgccgacctcgccgtggggctcgccatcgccgcgctccgcaagatcccccaggccgaccgctacgtccgcgccggcaagtggaagtccaagggcgacttcacgctcaccactcggttcagtggtaaaagagttggtattctggggcttggcaggataggcttagccgtagcaaaaagagctgaggcatttgattgcccaatcagctatcattcaagatcagagaaaccatttccaaagtacaaattttatccaaatgttgttgacctggcagccaactgtgatgtgctagtcgtagcatgctcacttaatccagagacccgtcacattgtaaaccgtaaggtcattgatgcactaggaccagagggagtgctcataaacattgctcgtggagcacatgtggatgaacctgagcttatatccgcgcttcttgagaaacgcttgggaggagcaggccttgatgtgtttgaggatgaaccctttgctccagagcagctttttgagttagataatgttgtcttagtgcctcatgtggggagtgacacagaagaaacatgctgggcaatggctgatctagttctacaaaatttagaggcacatgcattgaatcagcctttactcactccagtcatctgattgtttctgttagaagtctgggatgattgtgccaccactactacattctgtaatcccaattagttttctatcttctgtttattagttcttcattttacccatcattagggacatatgccactcttttgtaagacatcattttatcggccttatggctgtcattcaatcaaccatgacaaataagatgatcagttccagaagtcg

SEQ ID NO: 25949 - DNA, 1645 bp, Oryza sativa
  ref <308>: DATABASE ACCESSION NUMBER: AK101391
  ref <309>: DATABASE ENTRY DATE: 2002-08-28
gactccagtcccgtcccgtttccttgctgcccggccgcctgcccctcaacctcatcgcgcaatctccatcaccgtccggcgtccgcgagcagcggtgcagagggcgtccttactcgttccgcgcgccccgcccaggtcaatctccccgtaccctcagcctcgactctctgagtctccacgcgatcgacttcgcccgcagcctgcgccgaccctctcgatctccatccatcccacgaggggagcaccggtgggtgccgtcgtcctccggtgagcaccacgacgcacatcctttttctttatggttcatccctatcgttctaccctatcttctcttctagatctgaaagcttttctctttgtcttaaccttagtactaacaacaacagttcttcccccaaaaagaatttagggggttcatgtccctgttggtacacgatgaaccctgcaagccgaagacattatgattctctcgtcgcgcgatatggtgaccaagatgcactcgccgaccgtttcggcggccaaaacgacggccctgacgcctggtggtccaacctgcgtgtgcggatgtctcaggatcatctactgaggcacgaggcgcggaggcgagccgccaccttggaggttttcgaggatagagaaaactcgcatgatggtgcctttggttgcggtgaccgggcctctgctaaggccatggtaactctgcatcagcccaatttgggcgagaccagggagcaggattgcgccgtgtgccttgagcctttcgaggaaggcaatacgcttagaatgatgccatgtttccattccttccatcagcgctgcatcttcagttggctccgcattagccgcatctgcccggtgtgccgtttcacgctgccctcccaggctgattttgagtcggagaaggctgagaaagaacgagttagtgcttcacctgaagatggcaataactgattgatgaagatcaatctgcttagtgagttactttgcttgtgtcctgtctcacaattgagttgatcttatttatgcttcatggttgatatatttatcatctaaagatggcagcaattgtcctgctccacttaaatattcttggtagatatatttattagagtaaatttcagaacattctgtgttttgtggtcttaattgcataatgctccggatattatggcatgtagcatataaccctagtcattatggtatcaaggtttcgcaaaacccagcattcactcaaatcataaaaaaaacaacttgttgacacatattcacttcatttttcatgccataaaccactatgtattgttcaaatgttggttacttgatcaggatgaccagtttaatcagtcaacgttttgaacattattatgtcaaggatggtaaaattagctgaaatttgaactaggatggattttatgatacttctaggttatagagcatagggttatgtgcctcgagtcataatatccggaggtttatgcaactttgaccgcaaaatgtggttttttgtgaaatttactctgattagagtagatttcagaacaccatgtaagtttatttatgggattgtcaatcataaactttgttgtttgatccaatatacttcaaggaagaatatttatctcccgtctaatgaaaaattagaagc

SEQ ID NO: 25950 - DNA, 2443 bp, Oryza sativa
  ref <308>: DATABASE ACCESSION NUMBER: AK101392
  ref <309>: DATABASE ENTRY DATE: 2002-08-28
gagctcatctccttccttctcatccccatctccactcactccccaaacccaatttcctccccgtcacgagcaaggcgcgagcccggccgcgagcgtcgagcaagcagcgctccaccatcgtctcccctccgcccgccgttgtctcgatcccctctgctcgtcgcatgccgctgtacaaaacaaaccaccatctgtcaccgtctcttctcctccccgcttcaccaatcaatccaaaccctagagcaataccccttgctggaatcgctcgcaccctagagctccagttcccaccccagccacggcggatcaggggcagtctggtctgctgccgcagcgatatcgtgcgccccggatttgagagttccaatgccgatttcgtacgtggtcgtggtccctgggtggattatcggacagtgagattcttctctactgactttgatttgttttctttgattttgcttcccggatgatgttggatgtggttcgtgttcaggaacctttgcgccaaggcttcggttttgcgtggttcttggatccggttagagtaggttgtggtttgtgtcggccgtcacgccatccgtcctcatggtcgcgcaaaccagcagcagttgttgtcatttttccgctgagtgtgatgcctcttctcacggccaaaccagtcacgaatgctatacagatagaaccaagggcaaatcggtctttctccgtacgaactcacggctaaacacttgatctgagcagcagcagtgacggaagtgctaccgatcgaagaaaaacaagtggccaatgcttctagtcgaaagcgggaagtttccatgctattttttggttaccgacttgttttctatgctatagatcgaattttctcaaaaagaaacctctcgttgtctcctccgctccttgcctccttgcgccgccgccaagacgagtggcggctgaacaagggagggccgggcggcgatctccatcgcagcggaggggaggggatcctggtgcgtcttctttctgattcatctctctctctctctcccaccccaccgggactggaatttgcgggattgcgttcgtaaaccctactagcttctcttctagatcttctcctcctccttaatttgatagccttaaacctctcttaaataaataattcaagtaataacagtttgtttgttcacccaaaagtttgggggttcaactgaacccccatgtcccaagttggatccgcccctgtgtcgaggtcttggtggtggtgggtaccatttcagaatcaaacctcatttcccatgcataaaatagtatgtatagtgtgtttacttaattttaggagagaaatagaatgctccattcacacatactagcactcattttgtcatcagtaatggagatgtcatcactactactccccatgccatgcaaaataaatatccatattaccgtttcattgcccacattatgatctttaattcggaaataataaggcattgcagcgagaaatccatggcatggggaggtctcttcttgagcttcagccgtccctcacaggaccaacagaagtcatgcctttcagctgctggtggtttcaactatgatgcgcctctccatggtgcctcaagaccaaaatcagtagctaaattgactgcgggagatactgaagcaagtgacaaagcgcttgtcgagcgcggcttcttcgtgaaccgttcacgtgttctggttggctctggcactaccaccttcaaccatgccaaatccgcgcttctctcctggaagcatttggcactaggctgggcaaatgtggaacccgacacaccggtgaaggctggaacaaggttctgcatttgttacaaggagctgatcccttgggtcatgttgcccctccagattgcctatgtgaccgatggcaatggaggcaactcctcaggccatggaaaaggctgcgtttttgcttatggtagcggcactctacaaggccatctgctggcaggggaggagaggttctcggtgcagctggacgaagacgatcaggtgtggtacgaggtgatgtccttctcgaagccagcacacatcctgtccagcctctgctacccgtacgtgcagctgaggcagaagcatttcgcgcatcagtcagggcaggcactgctcaggcatgttgccagccgctccagggacacacggtgatcgacttcgtctgcagatttgatcttttcttcaggagtagtcttcgcatgttgtgagtgagcctgcttgtatgttcctgtatctatgtccgaatctgctcctgagagcattattagtttgtagtttgaatttttgagctcagggtaattatttagcatttgtgctttgttgttaagttttagatcaaattgaggtgttatggtgatgtaaattcagatttccatggtttgttactaaatcaaaaggaagaatgaaagataagcacaagagg

SEQ ID NO: 25951 - DNA, 2936 bp, Oryza sativa
  ref <308>: DATABASE ACCESSION NUMBER: AK101393
  ref <309>: DATABASE ENTRY DATE: 2002-08-28
gttgtggtgcccccgtgctgcctctccatctcttttatagcaacaaccagcgtatgcgttctcggtttttctccgcggcgctttcaccgctctctctctctctctctctctctctctctctctcctccgcttcttcctacaaagccgtgggcgctgctcgccgcggcgggtctctctcgcgcgcgcaacaacagcagcctcaaaaccctagctgccctcgcgaccgggtcagggccttcgattggatcggccattcggttcgttcctccaggatattgttggtacttgcattcctccgtctgttattcaagaaagccagtttacactgagagaaccttgctttatttggttcattggccttttgttttgcctgagtgaatgcaattggagccttctgggtagaagctgaagcttagtttggaacttcatcatactgatttcatactcagaaagtggcgagaaatggatcgtgatgatatagctggtttcgtaagtggaggttgcaaggccttctgagttttctgacgaagcagatgataatagagttatgatatacagaagtcaggcaactggttcttttcatttactatttggttgacgtttgaagtttgttaactggaatggacaaagcatcatgtggccttgggtttggtgatagtatcaactccttagacacgtcccgtcattggagcactgttcagcatacttctgggcttaaagctactacaattgactattcaacgtattccagtttttctattgcaagctcaaaaacactaaaaaggaagcgaagtgctatggcaggaccagaaggtactggaaacccattacttactttgggtttagggcactcaccaagttcatctgacaatagcaaagttagttctgccacagcttatgcaatgtctccatcttcattgaaagaggctgatgaggagtcatcagctgatcttggcctgaattttgagctttgccttggcaatgatatggtacattgtcaaaagaaatcccctgttggtgctgagaattcaccattgacaaactctcataaattggatcttcagctgagtttgtctactggatcacctgaatcagctgtcaccaacacaaatatggtgtcaccgattattcacggtggcttggagatacctgttaccaactgttcaccagctattataggggaaggatctgtaccctgtacttgggttttcgagaagtcagtgatttcatcttcgtatgcctctgaagcaacatataccttcccattttcgaaggtacccaaaacaggggatgctgctatgtcttctccagtcatatcgtcaaccttggtaacaagtatgaaaagcccagttgcccgtacttctgggtcaattaatccccaacaacgcaacagtatcactaaaactgtcagtttccaggatgtgttaaaggagccagaggggcatcggggcattgcatagcccatggcggtggtaggagatgccaaaaacctggttgtcagaagggtgctgaaggaaggaccatatattgcaaggcccatggtggaggaaggagatgccaatttcttggatgcacaaagagtgccgaagggcgcacagaccactgtatagctcatggtggtggtcgccgctgcagtcatgatggttgttcccgggctgcacgtggcaaatctggcttgtgcatcaggcatggaggtggcaaaagatgtcagaaggagaactgtatcaggagcgccgaaggtcattcaggcttctgcatctctcatgggggtgggaggcgttgccaatttccagaatgcacgaagggtgcacagggaagcacaaagttctgcaaggcgcatggtggaggaaagcgatgcacattctcgggttgcaacaaaggagctgaaggcagcactctcttttgcaagggccacggtggaggcaagcgatgcttatttcagggtggtggtgtgtgcccgaagagcgtgcatggcggaactcaatactgtgttgctcatggtggtgggaagaggtgtgctatttctggttgcaccaagagtgctagagggcgtacagagtactgcgtgcgccatggaggtggcaagaggtgcaagtttgagggctgcgcgaagagtgcgcaggggagcaccgatttctgcaaggctcatggtggaggtaagcgctgctcatggggccaggttgacttgaacttcggtgtcggcgcaccacagtgtgataagtttgctcggagcaagactggtctctgttcagctcactgtgctttagtccaggaccattgtgtccgtggtggtacattaggcgctgcaaccttccagttcgcaactgatgccaaattcgacgagatggaagtcaccccagtgaagggagatcctcacgcgcaggcaagcagcgacgaccagtctcatctcggtggtgctcatcctcctgctgtaccggcgatcacctcggatcgattttctgaaggaagagtgcatggtggtgggctactggccttactttcacggggtggaaaccatgcgaatgcaggtaactcaaagaatggcgcccttctaccatgatgacatgggagtgagattctcttcaagaaattggtggctcgcagttttgatctgtttccaagagtttgtgctgtgacggacgggaaaaactagtgttttcacatttcaccagatgttcttgtgatgcttggatttgttgttatggccctctcccgtgtgctatatataaataaggagctcgtagagcgtggagtaccgggctttctgtcttccgtgctattgtagttgatgtcgttgaactgcccttctgtcagaattcatgtaatcttggtacttcgtgtttatttgtattgtcagtgatttgccttgctgctttgctgttggaaaattgtcgtgtatttttgttgatagattatatatattgccttttcgttgc

SEQ ID NO: 25952 - DNA, 2574 bp, Oryza sativa
  ref <308>: DATABASE ACCESSION NUMBER: AK101394
  ref <309>: DATABASE ENTRY DATE: 2002-08-28
ggcttctcctctcccatctctcgcttcgctccgcttgcctagggtttcgcctcccgccggcagccgcgcccccgccgccctcgcctcagatcccgccgccggcgacccccccacgatcctcctcccccgccgcccgccgatcccgtcgagctccggttcggtgtttgctcccctactccgccgccgcgacgcctcgggcttgcagagtctgggcgggcgccgcggggggagtgcagatctagggtttgggggctctggctggtgcatgagaagggcactggagtacggacggcatggaggtggaggcggcgaggagggacgcggccacgctggacccggagctgctgcagctgccggagctctcgcctggcgcgctccgggagaaccccgcccttgctgaggcgctctactcgcagtggctcgcgctccccgagacatccaagctggtgaactctttgattgaagatgcaaaagctggtgctacattgaatgttactgggagctctgctagcacaaatgctgcttcaagtggttctttgccatcaatgtttccggctggtagtgctcctcccctttctcctagaagcacttctggctccccccgtgttatgaggcgaggatctggagctggaccatcatccttgggatctccactaaaagtagttagtgaaccagtgagggaggttataccccagttttacttcaaatatgggcgccctgctccaaaagatttgaaggagcaatgcttatctagaatagatcacctcttttttgcaggggagggactccagattcaagaatttagatcagtcacaaaagatatatgcaaacttccatcgttcttctccagtgttcttttcaagaagatcgatgctgcaggctctggaactgtcacaagggatgcgtttgttgattactggatcaatgataacaagattacaatggacacagctagccaaatctttgaaatattaagaaagccggattacaattatctcactcaggaggactttaagcctgtcttaaaagaacttctggcaactcaccctggattagagttcttgcaaggcacccctgagtttcaggagagatatgctgagactgtaatatacagaatcttttattccataaatagagctggaaatggccatcttaccctcagagagctaaaacgtgggaatttaattgctgcgatgcagcagctggatgaggaagaggatatcaataaagtgttgagatacttctcatacgagcacttttatgtgatatactgcaaattttgggagttggacacagatcatgattttttgattgataaagagaaccttatcagatatggaaatcattcattaacctaccgaatcgttgatagaatcttctcacaggtcccaagaaaattcacaagcatgacagaaggaaagatgggttatgaagattttgtttactttattttgtctgaggaagacaaatcatccgagcctagccttgaatactggtttaagtgtattgaccttgatggaaatggcattttaaccaccactgaaatgcaatttttctatgaggagcaattgcaccggatggagtgcatggcacaagaacctgtgctttttgaggacatattatgccagatgattgatatgattggaccagagaacgagtgctactttacactacgggacttaaaacggtgtaaactctcagggaatatattcaacatcctattcaatctcaacaaatttatggcatttgaaactcgtgatccattcctcattcgccaggaacgtgaaaatccaactttaaccgagtgggatcggttcgcacatagagagtatattagattgtccatggaagaagatggtgaagatgcttcaaatggaagtggtgatgtgtgggatgaatcgcttgaagctccattttgaaatatctcttgctggctgaatcttgtgggacatggatggaattggtttggaggtcaaagaaatgtaaagttgttcgctagcctgtggagaccattgcaggcttgaggaagtttcagtaacaccaaagacttcttacaggatttactgtgcaggtctgattcgatagtatcggttgtccagttgtgcaaaacatttttgcttggcaggagaaacgaggaagttgatgtgggcgtcctgccttgtcaaggcaacaacctcaacagtctcaagtgatgctatagtgggggacctttcatggtcaacatgtttctgtgttcttattggtgctttagggggggatgtcggtttattcaattgctgtgctcaaattttggagctgaactgttattgtttggctgccattttctttgttattttgtggaagtgcgagcaagcaattccatcattaactttgatcatggtatgtagctttctggttctgctttctgttcagtatggtgttttgtagctgttgccgtcactgggtacattttgggaggtaaggtaaaaagacctcaggatatggatatctgttgtcattacccatttgtaacattaacaagaaacggtggatgggtgcataagaaatttaaatgaggatgtaggttccatcatc

SEQ ID NO: 25953 - DNA, 1091 bp, Oryza sativa
  ref <308>: DATABASE ACCESSION NUMBER: AK101395
  ref <309>: DATABASE ENTRY DATE: 2002-08-28
gacttgccactgaagagtggctgcttgcaggcttggcttgcagctggggagagagcatgagcagcggcggcgtcggcggcgggagcttgggcgccggcttgctgtaccacaagttcgtcagcttcgcgctggaggagacccgactccggaccaccctcacccctcacccctcccaggaaaagttcaagtctataaaacccaatgatgataatacagttttcaatgctctctcattcagtgcaccgaaaattagattgcttcgcagcttgacaatcgagaagaaaaactcatatcaggttcttgactttgccgctttctctgaacctgaatacgatcttcctatattttgcgccaacgtttttacaactcatgcacaaagtattgttgtattggacctcaatcctctatatgatactacagtgcacaaggattacaaagataagtactataggagtataatgcctcttgtacacaagtataacgagcttcttccttggggtggcaagattacgagtgagtcattgaagttcttctctccaattgtgatctggacaatatttgagtcaactgaacacaaccaccatgttctacattcagctttcgtggattattataaggtctggcttgaattaatggaccaagcaattaaagaaaataacaaagcaacaattgctcgtaaccaagaagaacaacataaatatctcacatggagggctgagaaggatcctggctatccccttttgaagaagttaattggtgaaagtcgtgccgaggatctggtgatggagtttctgtttgaaggagtaaatactcttggaacaaaatcatttctggattatttccctgaatacgcccgtgatgatgggtcagtgaacaagaaaaggagtatgatcggcaagtcttttgaaactaggccttgggacgccaatggagaattcattggcgatgccgaagcacagtaaaatgttcgctacgcctttcggcctgatcaatctctcttatgcttgtagtactgttttctttttttttagaaaacttacatttttcatgctcatatccctgaacttggattgaataagaagagattggtg

SEQ ID NO: 25954 - DNA, 1464 bp, Oryza sativa
  ref <308>: DATABASE ACCESSION NUMBER: AK101396
  ref <309>: DATABASE ENTRY DATE: 2002-08-28
gtgtgccaaaaccgcccacctcctctcgccccttctcgccgcctccgccgccgccgccgccgacgaggaggaggccgatgggctccgaggaggagccgtcgcagatgcggagggcgctggtggacgcgctcgcgggggccatctccggcggcatctcccgcaccgtcacctcccccctcgacgtcatcaaaatccgcttccaggttcaattggagcccacaacctcgtggggtgtacttcgaagggatgtctatggaccttccaagtactctgggcttttgcaagcaagtaaagatattctccgagaggaaggtttgccgggattttggagaggaaatgttccagccctattaatgtatatgccatatacagctatacaattcactgttctacacaagctgaaaacatttgcttctggttcatccaaaacagaggatcatttgcacttgagtccttacctatcgtatgtaagtggggctatagcaggatgtgcagcaacagtaggatcatatccatttgaccttctcagaacaattcttgcatcacagggtgaaccgaaggtttaccctgacatgaggtctgcatttcttgatataatgaaaacccgcggtttccgaggactttacgccggtctaactccaactcttgttgaaatcataccatatgctggcttacagtttggttcatatgatactttcaaacggtcgatgatgacatggaataggtaccgatattcacatcttaactcaggaagtgaggatgattcagtatcaagcttccagttatttctttgtggatttgcagccggaacattttcaaaagctgcttgtcacccacttgatgttgtaaagaaaagatttcagattgaaggattaaaacgacatccaagatatggcgcccgaattgagagcagcacatacaagggcatgtaccatgccctaaaagagattgttgcgaaggaggggtttggaggcctttataaaggacttttcccatctttggtgaaatcggctcctgctggtgccgtgacatttgtggcatatgaatacatctcagactggatagggagcaaagctggagtcgagtgagttcttggatgaaggagccattgagagatacaacatacaatgatgagagaacagtgtccactcttaattgttttgtgaccgcaaggtcgaaagttaaaaagtgcatacaatcccttgagagctgatacttggaaagccttgcatagaattagctactcttgtcatttctctgcctttttgccccattgacctgtgttgttgcattcgttgagatgtaacagtgaggatgagtaaaactaaggaaagtgtagagcttgtgacgcttgatgaaggccggggagcggcaggcatttttgttaagatgatattatctcactcctatatgtccctcactcacataatgcagttaatgtgaactgttacatgattcgtagcg

SEQ ID NO: 25955 - DNA, 913 bp, Oryza sativa
  ref <308>: DATABASE ACCESSION NUMBER: AK101397
  ref <309>: DATABASE ENTRY DATE: 2002-08-28
ggtcattgctcatcacaagcatctccatccattcatccagttaattaattagctaagctagccttgccggagactgaagagaatttgttggttaattagagtgaggatttcgttgggatcgatggaggggaggattagcagtgcaacgctggtggtggcagcggtgttggcgatgctggtgctggtgccggcggcggcgcgcgccgagcggttcgttgtcggcgacgcggcgcggtggacgtggggttacaactacaccgactgggtcatcaagaagggccccttcttccaaaacgacagccttgtgttcatgtacgacccgccgaacgcgacgacgcacgcgcacagcgtgtacatgatgcggaacgcggcggactaccagtcgtgcaacctcaaggcggcgaagctggtggccaacgtgatgcagggcgccgggtcgggctacgagttcgtcctccggaagcgcaagccccactacttcgtctgcggcgagcgcggcggcatccactgcaccatgggccagatgaagttcatcgtcaagcccaagagctccgcctgccgcgacgactgacccggcccccgcccacccctctccgccgccggccgccggccgccgccaccgagatgttgggttggtcgccgccggccatggtgcggctgctagcctacgtcgatcttcttcttcttctgcatgccaccttctgggagttctggttcgatatcagaacatcattgtgctttgataatattgtaagttattaattgcaatatatactatatgtctaattgtgttgcgttgcgtgtggtgtatttgtatgggtcattcggttgaaataaacgatcgagggattaattgtactgcgcatgttcgtggcgtgtgttgatttttgtatatatgcagtcgctttgtctc

SEQ ID NO: 25956 - DNA, 2644 bp, Oryza sativa
  ref <308>: DATABASE ACCESSION NUMBER: AK101398
  ref <309>: DATABASE ENTRY DATE: 2002-08-28
gttacatactccacacggaggccagtacttctccccttctcgcgcactagggaagccaccagaaaggcagcaaaacacaccgcctcctccgcccccgcctccgcctccgcctccgcccgcagcgatcgactccccgccctcctcgccccgctccgtagcgagacccctcctccctctcctcctccgctctcgcgcgctaagttgaggacctcccaaccagtaagcatttcgaggctcctgcctatgcttgatgtcaactatcaaagatgttgtttagtgctgtggaggtcaagtagcattggatcataaattcaaccaaaacaagacaggcatggaccgtgcagacacctcaggctttgtcagtggtggttgcttcagtactacactcctgctgatattcttccattttgtctattctgtgatctgtgtttgaaagatcatcagttccctgttcttcagctattcagtgattcagttgtcatttgctctcaccccgttgtcatattgtcaagctgtgatggataacagctttgtggatatcccaaatcaacctccaatgaataacccgtttgtgttaatggaaccctcagctcagagctacatggtgaaccttggcaaaagcacaccccacatggactgcctgggatctgcaatggctaattatggccatggtaatcaaaatatacagtgcattgatagcatcacaactagagatgatggttgcaggttagtccttgggttgggtccaacgccgaatttttactctgcagagtgtcagcccactggagtagacaagcttaaagaagctccttcgttatctggacagggtttgactatcaccgatcctgggacattgaggcttggccttcaaatggatgtttctcaaacaattcaacctttgcaagcaccagatggaacagttcattcttttactgttgttgatgaagcctcagcatctccttctgtaaggagcatcggtggttacatgccatccctactctttgctccacgctccggttcttctgctgtcaatgagacccacgaagcagaaacccaggattcactagacctgacgcacagcgacaatgataacactcagcacgttcaacatcaccttcagctgagccctgagccttctgccatgacagatacttcatttggtgtgagctccgacgttgtcacggcaacaaccacatcagaacaaaggaatcatccccggcatcccaagaagtgcaggttcaagggatgctcgaaaggtgcgagaggcgcatcagggctgtgtattgcccatggaggtgggcagagatgccataagcctgggtgccataaaggtgcagagagcagcactgcctattgcaaggcccatggcggtggtcggcggtgcgaggagcttggttgcaccaagagtgctgaagggaagacagattattgtatcgctcacggtggaggtcgtcgttgtgaacatgatggctgtcctaaagctgcacggggtaagtctgggcggtgcatcaagcacggtggtggtaagagatgcacggtgcaaggttgcatccggagcgctgagggtaaggccgggctctgcatttctcatggtggtggccgccggtgccagttcccggactgcagtaagggggctcaaggcagcacattgtactgcaaagggcatggcggtggcaagcggtgtatctttgacggctgcagcaaaggtgctgaggggagcacgcctctgtgcaaagcacacggtggcgggaagcgatgcatgttcgaaggtggcggcgtctgcccaaagagcgtccatggtggcactgagtactgcgtggcgcacggaggagggaagcgctgttcggtggctggctgcaccaagagtgcccgtggccgcacggactgttgcgtgaagcacggtggtggcaagaggtgcaaggtcgacaactgcagcaagagcgcccaggggagcacggacttctgcaaagcccacggcggcggcaagcggtgcacttggggaacgggctgcgagaagttcgcccgcggcaggagcggcctgtgcgccgcgcatgggaccttggcggccaagcagcaagagcgcgacgcggcgaacaacggcgcgggcatgatcccgccaggccttttcagcggcatagtgaccgtcgctgccacgagcagcatgacgaacgagtactcgtcgtcgggcatcagcaccgcgtcggactgcgacggcacggtgaggagccaggcgatgatgatacctccccaggtgctggtgcctcgctctatgatgccctcatcgtcgtccgaacctaccgtgcatgggggcagagagggaggctgtgccgttccggagggaagggtgcacggtggcggcctcttgtcactcctcggtggcagcttcaggaacgccgacatggataagctctgaatttgcttctccggctgccgaattctgttagtttggttgtgtacataaacaaggcaatttattttgccgatttgaacttctttggctttttttcctttgtctagataaatggtccgtggttgctttagtccagtcatttgtacattcatgtccgtggcaattgtcctgaacaccttctcatgtcagtttagtcagtcggaggaactggcaataaaatttgtgtattggttt

SEQ ID NO: 25957 - DNA, 3441 bp, Oryza sativa
  ref <308>: DATABASE ACCESSION NUMBER: AK101399
  ref <309>: DATABASE ENTRY DATE: 2002-08-28
gacctgctcatacgccgtatcgaccaccaccctcgacggcggccatggcgggcgcctcctcctacttctcgttgcggaggctactcctcctgctgctgccgctggtaccgttgctcggcgccaccaccgccgccgcagcgggcgccaactcgagcgtcacgtatgaccaccgctccctcatcatctccggccgccgccgcctcctcatctccacctccatccactacccccgcagcgtccccgagatgtggccgaagctggtggccgaggccgaggacggcggcgccgactgcgtcgagacctacgtgttctggaacggccacgagcccgcccagggccagtactacttcgaggagcggttcgatttggtgcgattcgcgaagatcgtcaaggacgccgggctgtacatgatcctgcgcattgggccgttcgtcgccgcagaatggaccttcgggggcgtgccggtgtggctgcattacgcgcccgggacggtgttccggacgaacaatgagccgttcaagtctcacatgaagagattcacgacgtacattgtggatatgatgaagaaagaacaattcttcgcttcgcagggtgggcacatcatcctagctcaggttgaaaatgaatacggagatatggaacaagcgtacggagctggtgccaagccatatgcaatgtgggcagctagtatggctctggctcagaatactggtgtcccttggatcatgtgccagcagtatgatgcgcctgatccagtgataaacacttgcaattcattctactgtgatcaattcaagccaaattcaccaaccaagccaaaattttggactgagaattggccaggatggttccagacctttggcgaaagtaatccccacaggccccctgaagatgttgcattttctgttgcacgtttttttgggaaaggtggcagccttcagaattactatgtgtaccatggtggaacaaatttcggtcgcactactggagggccattcattactactagctatgactatgatgcaccgatcgatgaatatggccttaggagacttccgaaatgggctcatctaagggaccttcacaaatctatcaaattgggcgagcataccctgttgtatggtaattcgtcatttgtttctctggggcctcaacaagaggctgatgtttacactgatcaatcaggaggatgtgttgcattcctttctaatgttgattcagaaaaggacaaagttgttactttccagagccggtcgtatgatcttcctgcttggtcggtcagtatcctgcctgactgcaagaatgtggcgttcaacactgcaaaggtgcgatctcaaactctgatgatggatatggtccctgcaaatttggaatcatcaaaagttgatgggtggagcattttcagagagaaatatgggatttggggtaatatcgacttagtccgaaatggatttgtagaccatattaatacaacaaaagactctactgactacctatggtacacaacaagttttgacgtagatggaagtcatctggcaggtggcaaccatgttcttcatattgaatccaaaggccatgctgttcaggctttcctgaacaatgagcttataggtagtgcatatggtaatggctcaaaatcaaatttcagcgtggaaatgcccgtcaatttgagggctgggaagaacaaactttccctattgagtatgactgttggtttgcaaaatggaggacccatgtacgaatgggcaggagccggcattacaagtgtgaagatctcaggaatggaaaacagaataattgacttgtcttccaataaatgggaatacaagattggattggaaggggaatattatagtttgttcaaggcagataaggggaaggacataaggtggatgccacagtctgagccaccaaaaaatcaaccaatgacatggtacaaggtaaacgttgatgttccccaaggagatgatccagttggattagatatgcagtctatggggaaaggcctggcttggttgaatggaaatgccattgggaggtattggcccaggataagtcctgtcagtgacaggtgtacttccagttgtgactatagaggaacgttttctccaaataagtgcaggagaggatgtgggcagccaactcaaagatggtaccatgtcccacggtcatggtttcatccatcaggaaacacccttgtgatttttgaggagaagggaggggatcctacaaagatcacattctcaagaagaactgtggcaagtgtgtgctccttcgtgtcagagcactacccttccattgacttggaatcctgggataggaatacccaaaatgatggtagagacgcagcaaaagtacagttgtcttgccccaagggtaaaagtatctcttctgttaagtttgtgagttttggaaaccccagtggaacctgcagatcttaccaacaaggaagctgccaccatccgaactcaatatctgttgttgagaaggcctgtctgaacatgaatggctgtaccgtctccttgtcagacgagggatttggagaagatttatgccctggggtcaccaaaacacttgcgattgaggcagactgctcttaaggagtttaactcagcaatgagatccatcgctacagattcgctcatcaacttgaagcttatagtgcttggtacccttgacgggtcgccattgtggatgctaaccatccacccgagcaaaggaattaattgcactgcattcccaggtttgcaatggactactgtatgattcagaaacatgaaggcatgaacgagcttctatgagcccaaaaggaatgggatataataatatgatatattgcgatgcccatgaaacatttcataattgtcattttcttcgtgtttagacttgctgatatgtagacaccagatcgcactggagaaagttcttggattgctctcttcatgttgtgtcgcgtcatgatatttctggattaacctgtgaatgaatctatggttgaggcagcaggtggtcaacacagtagttcatctctcgttatgattggggagacaaaaataagttgctcactgtgcgggtactgtgatgttgctaagatcacagtgcggaagaaaccactagcttgtggctccattggccgtagattctggataagattaagtaagatctgcattccattccatggcgtacggaatggatgttattaaatctttgattagccatggattaaggagccggggcctttgactggatgccgcttcatgttttccttgtcatgtgagtattatttaggggccctcgaattaagtcctaatcacccacagcctgttcccttcctcttctcccttcttccgtagtggtttcatgactccattgataggccatggtacttgtacagtatcagggaataaataaatattggaggaatcatctccatcgaaaagg

SEQ ID NO: 25958 - DNA, 1272 bp, Oryza sativa
  ref <308>: DATABASE ACCESSION NUMBER: AK101400
  ref <309>: DATABASE ENTRY DATE: 2002-08-28
gcccttccgtcctccttcctcctcccccctccccggttcgacgcgcacatcgaaccccgacgaccaccaccgcccggccgccgccgccgccgacgcggtcgtcctctccggctaggatctggtgcatctaactattcaagaaatagaaaagcatgagctacttcacttgcaagccgaacagtgggcttattgtggataggcccgtcgctggtcttgggaggacaggcagattactatctcatcctcaatattccctaacgacacattctgttcgatttcccaagcttcaaaagcaggtgtacccgcgacttgttcttgttgctgctagccagaaaaagcttcctcctctatgtgcctcgagtggaaaggtgaacccagaggcagaaaatgatccctttatggaatctttgaagaaggccatggatgatgccaaaaagccacggcctattcaagacttgctgaaagaacagatagctaagctgagagaacaaggatctggtggaggtggaggaaaccgaaatcgtcgtggaggcagtggtgattctggtggcccagaagatgaatcattcaaggaatcattggatgaactagtccaagttatcttagcaaccgttgcattcattcttgtgtacatccatataatcagaggtgaggagctgtatcgcctcgccagggactacaccagatatcttgttactggcaagcgtactgcgcggttgaaacgtgccatgcaaaaatggcgcaatttctcagagagctttatgcaaagtgaaggctcacaagaagaccagtatgaaagagcagccacctccaaaccaacttggtggcaacagcctcaaaagtttgttcatcttatggaggaactctgccgaggaaattggcgcccgcatgcgcaggagtcttagttcaggtgctcccttgttcctttttggccttctgaagcacatggatgtggcgatgagcagtactgttttcatggctggtgcaatgacctggaatctggatagcgttccttgcccggggcagtgatttgttcttctttgttcgttaatgcgtattttctacgttttgttaagcactaaccaagtgagtaacttcctggcaattttgtagttgatgagatcgcatatataagctagccggcgtctcatgtcatatgcggcaaattgtagattatgttgaagttgaaccggtgtagcttggtttcactgcattttggtttggtttccttagcgttggaatgtaatgggtcacccttgacaacgtggcttc

SEQ ID NO: 25959 - DNA, 999 bp, Oryza sativa
  ref <308>: DATABASE ACCESSION NUMBER: AK101401
  ref <309>: DATABASE ENTRY DATE: 2002-08-28
gagtgccttcgtctcgacacgtttgcattgcagcagctcataagtttcttcttcgtttctgctcccagtgctaaggcagcacagtcgttcgtcgccatgccagggctcaccatcggcgacaccgtccccaacctggagctggactccacccacggcaagatccgcatccacgacttcgtcggcgacacctatgtcatcctcttctcccaccccggcgacttcaccccggtctgcaccacggagctggcagccatggccggctacgccaaggagttcgacaagaggggcgtcaagctgctcggcatctcctgcgacgacgtgcagtctcacaaggactggatcaaggacatcgaggcctacaagcctgggaaccgcgtgacgtacccgatcatggccgatccgagccgcgaggccatcaagcagctgaacatggtcgacccggacgagaaggattccaacggcggccacctcccgtcccgcgcgctgcacatcgtcggccccgacaagaaggtgaagctgagcttcctgtacccggcgtgcgtggggcggaacatggatgaggtggtgcgtgcggtcgacgcgctgcagacggcggcgaagcacgcggtggcgacgccggtgaactggaagcccggcgagcgcgtcgtcatccctcccggcgtctccgacgacgaggcgaaggagaagttcccccaggggttcgacaccgccgacctgccgtccggcaagggctacctccgcttcaccaaggtcggttagatcatatcgatatcgacctcgctcttcgtacatcatgtgcgccacgcgtgcgtgatagcgtgtgctggcgtgatgactatgcgagatgcatccctgtgtgtgttggtgtggataatgccgctacgtttggaacagtagtgcatttactctgtgctactgtctgaactttggctgtttggcagactgtttatgtgcccgtatgttcgcccctgtactaatagagtgggtgttgtggttggc

SEQ ID NO: 25960 - DNA, 2902 bp, Oryza sativa
  ref <308>: DATABASE ACCESSION NUMBER: AK101402
  ref <309>: DATABASE ENTRY DATE: 2002-08-28
ggtctctcttccccgtgttcctcctccaccgctgtagctgtacccctcctcctcctcctcctctcctcgatccgcacgcaccgccatctccgatccgcagcagcagcagcagcagcagccgcgaggccccggagccacgcgcatctcgctcgccgccggcgagaaggccccggtaaccggtgggccgcagagggggaaaaggttttggagggagcgacgccgcgtgcgtccccgtctcggctgggaccgaaccggaggtgtgccatttttggaggctatcgatgggtctggacaacaatttcggggagctatctggcatgttctgtggcttgtcctatgatggctacacggatcacggcagccagagcgattacttcaggttcgccgacccgcagccggcgatcgtgccccagatggacgccggacccagctccgccgcttcctccacggcgtcgagggccgccgtcagctcggggaccgacaacccagaggactgggagttcatctcggacgagtcgctcaactatatcagccgcatgctcatggaggaggacattgatgagaaggtcagcatgtaccaggaggagtccgcggcgctccgcgctgctgcgaagccattctatgacattcttgggcacaagttcccgccctcccctgaccgccagctggtagcttggcccctcgacagcccgagtgagagtagcactagcagctatccacactccttggctagttctgttactagcagcaacattagtggtgcggtcgatagcagccaacgccgttatgttggacacagtgagtatcggagcttgtctggtcattcttctcaaccgccggttggcccatcaagtgatgttcgcaacgctatggagacactagaagatcctttgattagtaatggcaggatccctgagtatttgtttgagagctttccaacatgggatttcaggagaggtgttgacgaggcacagaagtttctcccgggtagcgataaggtagtgattgatttagaggctggtggtgttgcaaaacgtcaagaagcagggaaagctatttctctgaatgtcagcaaggcagaggttttgaaggtaaagaaaaacagacagagtgaagaccttgacgtgatggaaggacggaatagtaaacagtctgcattttgttctgatgaacctgattggattgagatgtttgatgttctgcttcgtcaaactgagaagaaggcaactgatcttcgaaaaatgatgcgttttgaggcttccaagaattctcaagttgctcagccaaaaggaccaagtgggacccgatcacggggacggaagccaactaagaaggatgtggtggaccttaggacgctactcatccactgtgctcaggcagtggcagctgatgaccgccggactgctaatgagttgttaaagcaaataaggcagcatgccaagccaaatggagatggctcccagagattggcgtattgctttgcagatggtcttgaggctcgcttggctggaacagggagccaactttaccataaacttgtggcaaaacggacaacagcctctgacatgctcaaggcataccatctttaccttgcagcatgcccattcaagaggctctcacattttctttcaaatcaaacaattttgagtttgacaaaaaatgcatcaaaggtgcatatcattgactttggcatttacttcggcttccaatggccgtgcctgattagacgtctcttcaagagggaaggtgggccaccaaagctgcgtatcacagggattgatgtacctcagccaggtttccgcccaactgagcgcatcgaagagacagggcagaggcttgcagaatatgctgagaagattggtgtcccttttgagtaccaaggcattgcatcaaagtgggaaacaatctgtgttgaggatctcaatattaagaaagatgaagtagtgattgttaattgcttgtatcggttcagaaatcttattgatgaaacagttgccatagacagtcctaggaatagggtgctcaataccataaggcaagtgaacccagcaatttttatccatggcattgtgaatgggtcgtacagcgttcccttcttcatcacacggttccgtgaggcattatttcatttctctgcattatttgacatgctcgagacaactgtgccacgggatgatgcccagcgtgcactaattgagagagatctatttggccgggaagcactcaatgtgattgcatgtgaaggctcagacagggtcgagagaccggagacatacaaacagtggcaagtgaggaatctgagagctggatttgtccagtctccattaaaccaagacattgtgctgaaagccaaggacaaagtgaaagacatctatcacaaagactttgtcattgatgaagacagtgaatggctccttcaagggtggaaaggaaggataatctatgccatatctacatggaagcctaataacaattagggtatggtctgtgagctgtgcctggttgcccgttagcactagcaattaacgaagaaaagtaccttgcattgggctacatgcgtatgtacaggtctgcttattgttttccaaagtactgctgctcagttcagtgattttcacatttgtccactattagttcagttcagtacttctgttcttgatttggcctttgagttgataatttttttcaagtttagaacaagtaggacatatgtcacaatgggttaattaataagcataactatcagcatcaaagtggcatatgtcagaagacaagtgtactttttacatgctatgcattccatgcgttggtgcagaccgcagagcagtttctgccttgcttttaccatatctgtatctatacttatatataacatgaaaagcactagtttcaaacttttacc

SEQ ID NO: 25961 - DNA, 2423 bp, Oryza sativa
  ref <308>: DATABASE ACCESSION NUMBER: AK101403
  ref <309>: DATABASE ENTRY DATE: 2002-08-28
gcttcccccccggctgcgtctcctcctcctccgccgccgccgccgccgcctccttctccgacgatgccttccctccccgtcgccgccgccgagccgatggccgtcgacgagtcggcctccaagaagtcgaagcgcaagctgaaggcggcggaggtggaggtggaggcctcgtcgaggaagaaggagaagaaggagaagaagcggaaggcgaaggagccgtcgccatcgtcctcctcctcatccgaggaggaggagaggagcagcacgagctccgacgagccggcgcccgccgcgaagaaggcgaagaaggagaagacgaaggagaaggtggtggtggaggaggaggaggaggacgacgacgaaggggagctcaccgccagcggcgacgaggatcccgccgaccccaacgcgctcgccaacttcaggatctcggagtcgctcagggagaagctcaagtccaaggggatcaaggcgctgttccccatccaggccaccaccttcgatctcgtcctcgacggccacgacctggtcggccgcgcgcgcactggacagggaaaaacattggcttttgttctaccgatacttgagtcattagttaatgggacacacaaggcatccagaaggactgattatggcaggcctccaactgttttggttctgttgcctaccagagagctagccaagcaggtgcacacagactttgcattttatggtgcaacatttgggctatctgcatgctgcgtatatgggggttctgattatcgttctcaagaaatggcaatcagaaagggggttgacagtgttgttggaactcctggtcgtgtgaaggactttgttgaaaagggaaccctcaattttaggtctttgaaattccgtgtccttgatgaggctgatgagatgcttaatatgggcttcgttgatgatgttgagcttattcttggcaaagttgaagatgttacaaaagtacagacacttctcttcagcgctactataccagagtgggtgaagaagctctccttgagatttctcaaatctggaaagaaaacggttgatcttgttggagatgagaaattgaaagctagtgcatctgttaggcatcttgctcttccttgtaaccgtgctgcaagggctcaagttattccagacatcatccgatgctatagccgtggaggccggaccattatctttaccgagacaaaagaatctgcatcagacctctctggtttgattgctggatcacgtgccttgcatggtgatgttgctcaagctcagcgtgaagttattcttgctgggttcaggagtggcaagtttttagttttggttgctacaaacgtggctgcacgagggctggacattaatgatgtgcagcttatcattcagtgtgaacctccacgtgatgttgaagcctacatacaccggtcaggtcggactgggagagcaggcaatactggtgttgctgtcatgctttttgaacccagatataagttcaatgtgaacagaatagaaagggagtctggggtcaaatttgaacatatctctgcaccacagccaactgatgtggcacaatctgctggtactgaagcagcagaagccatttccagtgtttcagacagtgtcattcctgtttttcgggagcaagctgagcaactattgaactcttccgggatgtctgcagttgatctactagccaaagcacttgcgaaggcagttggctacacggacataaagaagagatccttgctgtcttctatggacaaccacactacattacttcttcaaactggtcgatcggtgtatgcagcaggatttgttctttctactttgaaaaggtttatgccagaagagagacttgcagatgtaaagggtataaccatcactgctgatgggacaggtgctgtatttgatgttccttcagcagaggttgaagactatattcaaggtgcacagaacgctgccatggtgactgtcgaggaagtgaaacaattgccacccttgcaagagagggaacagtctggtggcagccgaggtggaggaaggtttggaaacaggagattttctggtggtggtggtggccggggtggaggcggcagagggttcggtggaggcagaggcaggggaggtggcggcggcaacaggtttaacaagaggtactagctgttgctggagcactctcatttttgacctataggttgagccaaggcacagggaatcgccaaaattttgactgcgccatgtatcggttttttgtttatttgttagtgtttgtgtgttcgagattatgatgatcaattttgccatcgcaatagtgtacaatattgatctgatacttgctacatagtaactgttaagaatgaagctatatacttgtttccccatcggctattaccgaagcttttgaatgaatgcaaaatatgtcgtctgtg

SEQ ID NO: 25962 - DNA, 1309 bp, Oryza sativa
  ref <308>: DATABASE ACCESSION NUMBER: AK101404
  ref <309>: DATABASE ENTRY DATE: 2002-08-28
gatgaacactacaaggaaggagtagatagctaggaattaattaattaagctaaggatgatgaagaggttctactcgtcgatcgggcagggggtggaggcgctgcaccggagtctggcggtcggcgaagtggggttcatgtcggcggcgttcgtgcagcaggctgcggcgctggtgcggtcggtgcacgcgcagctgctggaggtggtggggaggctgcacctgccggcgggggagaggtggctggacgagtacatggacgagacctcccgcctgtgggacgcctgcctcctcgtccgcgccggcgcctccgccctccacgcctactccgccgccgccgcccacgccatccaccacctctacgaccatgacgacgactacatccacgccgcccgcgccatcaacgcccctcgccgccacgccgccggcctcctccaggacaaccgcgccctcctccacgacaacatcctcgacccggcctccctcctcctcctcgaccaccgctccccgagggacctcaacctcaacgccttcaacggcttccgcgccctcctctacgccctccgcaacgccacctccttcctcctcgccatcctcctctctgccaccgtctcctcctgcctccccgaccacctcatctccacctgcactccccttcccctgcccaccgcacccggctacgcctcctccatggctcgcctccgccaccgcgtcgcccaggagatgcgcgccctcgccgcccccgccgccgacggcatcctgatgtacgagttccgccaggccagggccgccatcgacagcctcaaggccgacctcgacagggtcgtcgccaccggcaccggctacgcccaccgggaggacatggccgagagggcccacctcgtcaaaggctgcctcgccatgctcagctccggcgccgaggccgtcatcgccgagctcgacgacttgttcgatgacattgtcgagggcaggaagatgctctccgacctctgcagccatcgctgatccaaagtctaatccagacatccactgtatgattattaattattgccacaaacagattattaacatcatgcatgcatattactaatataattaatgcatggtagatagtcgcattagcacaagatgcatggatgagtttgctactagtaattaacaaatgagaattacttaatgtagtactccagctaggaaggtcgtaggtgtttttgttttcttgtaattcaggcacttctctagcttagctatatcactcatctagtcactgtatctagctatagatcgatcaatatatatgcccatgcatgc

SEQ ID NO: 25963 - DNA, 3104 bp, Oryza sativa
  ref <308>: DATABASE ACCESSION NUMBER: AK101405
  ref <309>: DATABASE ENTRY DATE: 2002-08-28
ggtggatcttgtcgaccatcgttatccaccaccaccaccaccacgccgctcgctgccttcgtccccagccaccgccgctgcctccctctatccccacccgaactgctcactgcttccatccacgccccatagctccggaagggcgcaaggaagacagtgaggtagatgaggtcggcgacgctgctgtccgattcctcctgctttctcagatctagcggcgccgagctcggggacgcctgatccggcagcccgcccgctgtagccgctaaagaagtggaatttgcatccgtagcgtgatcttcaaaggctgccaagatggtgaagttcacggttgaagagctgcgcaggattatggacaagaagaataacattcgtaacatgtctgtcattgctcatgtcgaccatggcaagtccacgcttacagattcccttgtggcagctgctgggattattgcccaggaagttgctggtgatgttcgcatgactgatacccgtgcagatgaagctgagcgtggtattacaatcaagtccactggcatctctcttttctacgagatgagtgatgaatcactcaagttatacaagggcgagagagacggaaatgagtacctgatcaaccttattgattcacctgggcacgttgatttttcttcggaggtcactgctgctcttcgtattactgatggtgctttggtggttgttgactgtattgagggtgtctgtgtgcaaactgaaactgtgctccgccaagctcttggtgagaggattaggcctgtccttactgtgaacaagatggacaggtgcttccttgagcttcaagtcgaaggtgaggaggcgtatcagaccttttcccgtgtcattgagaatgccaatgtcattatggcaacatatgaagacacgctccttggtgatgtccaagtttaccctgagaagggaactgttgctttctctgctggtttgcatggctgggctttcacactctcaagctttgctaagatgtatgcttccaagtttggagttgatgaatctaagatgatggagaggctttggggtgagaacttctttgacccggccacaaagaagtggaccaacaagagcactggctcagctacctgcaaaagaggtttcgttcagttctgttatgagccaatcaagcaaatcatcaacacttgcatgaatgaccagaaggacaagttgtggcctatgctgcagaagcttggtgtggtcatgaaggctgatgagaaggatcttatgggcaaggctctcatgaagcgtgttatgcaaacttggctgccagccagtaatgcacttcttgagatgatgatataccaccttccatctccttcgaaggcccagaagtaccgtgtggagaatctgtacgagggtcctcttgatgatgtctatgcaactgctatcaggaactgtgatccggaaggtcctctcatgctgtatgtttccaagatgattccagcatcagacaaaggtagattctttgcctttggccgtgtcttctctgggagggttgcaactggcatgaaggtgcgtattatgggtcccaactatgtccctggccagaagaaggatctgtatgtgaagagtgtccagcgtactgttatctggatgggaaagaaacaagagtctgttgaggatgttccttgtggtaacactgtcgctatggtcggtctggatcagttcatcacaaagaatgccaccctaacaaatgagaaggaagctgatgcctgcccaatcagagcaatgaagttctcagtgtccccagttgtgcgtgttgctgttcagtgcaaggttgcatctgatcttcccaagcttgttgaaggtttaaagcgtctggcaaagtctgatcctatggtcctctgtaccattgaggagtccggtgagcatatcattgctggagctggagagcttcaccttgaaatctgcttgaaggatctacaggaagacttcatgggtggtgctgagattattgtttcccctcctgttgtctccttccgtgagactgttcttgagaagtcctgccgtacagttatgagcaaatccccaaacaagcacaaccgtctttacatggaagctcgccccttggaggagggactggccgaggccatcgacgatggacgtattggcccacgtgacgatcccaaggtgcggtccaagatcctgtctgaggagtttgggtgggacaaggacctcgccaagaagatttggtgctttggacctgagaccactggccccaacatggtggtcgacatgtgtaagggagttcagtatcttaatgaaatcaaggactctgttgtggctgggttccagtgggcatcaaaagaaggtgcattggctgaggagaacatgcgcggcatctgcttcgaggtatgtgatgtggttctccacgctgatgctattcacaggggcggtggccaggtcattccgacagcgaggagggtcatctatgcttctcagctcaccgcgaagccaaggctgctggagccagtctacctggtggagatccaggcccctgagaatgcccttggcggtatctatggcgttctgaaccagaagagaggccatgtgttcgaggagatgcagaggcccggtaccccgctgtacaacatcaaggcttacctccccgtcatcgagtcgtttgggttctcgagccagctccgtgccgcaacatcgggccaggccttccctcagtgtgtctttgatcactgggacatgatgacttctgatcctctggaggtgagctcgcaggcgaaccagctggtgctggacatccgcaagaggaagggtctcaaggagcagatgacccctctctcggatttcgaggacaagctctaagaaaaaacccttttggtctcgcatatgtttttgccattaatttacctgttctaatagctgttctactattgttaaagagttataagacaagtcagaaatatgatgtgtttgttacacatcaagtatcggtgttggtagtgttgtgctgtggaactatatattttgctgtctggtgatatgcaacagatatggaactttgataatgtatctgttgatagtttttacggttttctgaatcagtttcagtttgatatatc

SEQ ID NO: 25964 - DNA, 1030 bp, Oryza sativa
  ref <308>: DATABASE ACCESSION NUMBER: AK101406
  ref <309>: DATABASE ENTRY DATE: 2002-08-28
gtatctcctctaccttatccctaagaaacccctttgaataccgttgtatatcgcgtgaattcgacgcggtttcgagctccatttttccggcgaaccctaactaatccgtcgccgattcttcctgtatccgagccgatctcctcctcctttggctataaatagcagcccctcggcctcctcttccgtttcctcctttttcccgatttttttccctagccctagagccgccgccacgcttaccttctctctccaccgccgccaccaattccagccgccgtcttccgcttctctggtcgtcgccgacttgcgccgccacttccatcggcttcgcaagggtgagagctaccccggccacccgttcttttgcgccgaaccccgccggaattcgccgtcactgtgaaggccgaaccatcgccatgttttgatctccggcgaagctttgccgcttctcccgtggtagccggacctccccgaggctgtcgtcggcatcgcaacgccaagccgaagcctgtccaccccttcgccaccgctgcaaaccatcggagcttcgtcgtcgctgtcaacccgaggcaatcttccgtcgactcgttttcagccgtgccgctcgtcgccgtccatcgccgccttcgctcgccgtcgctaccctcgggatcgcaggagcgaggtgaagaccgtccgcccctcggttgctgcctcccctcgccgaaacgccacagtcaccgtggacacagccacgccgccgcctcaatctcgtcgccggccatctcccatcgtcgtccgtggtcgtgccgacctcggtgagggcgtctcgtcgtcctctccgcgttggtgttctcggatagcccggccgagcttcctagtgcctgcaaccttgtggtccagtgtgttgccggcgatgatgtcatcgctgacgtcagcggctgttattcctttccaaataaatcgtaattccttttctgtataaggctaaattatattaagtcttgtaaaattcataactaattcatacgaactcggaataaggtcgttc

SEQ ID NO: 25965 - DNA, 1060 bp, Oryza sativa
  ref <308>: DATABASE ACCESSION NUMBER: AK101407
  ref <309>: DATABASE ENTRY DATE: 2002-08-28
ggcccgccgcctccaccgtctccgctcgccgcgcgctcccgccgccgcgcagctcatcttcccctaggcttcttcccttccggcggggccatccagattactgggtcctctctgtccagaaggcctcgcctcgcctcgccggtgacagccatgggggaaccgagcaaggagctcctggacctcccctccgagcccaagccgccatccctcatcgagtcgattctcgtggggaggagagaacagcagcagcacaaggaggggaagcgcaaggcggggcctcccaccgatccactccccaagagccaagttctaggaagagtgaaagatttcttgggagagatggcaaaggcgaacgagaaattgcatctcgatgtaaaaaataagcgtcctgaagagtatgatatcgaagcgcttacagggaacgagaaggaatatattgagatggatttgcttcttggtgtagctgatttgcattcagagaaagctgtagaagtagctgaagcaacaatgaacggcttcccaccttcaggaaggtcattcgcttgcagctcatctgactctgaagatgatagtgatggtagtgacgaagacagcggtgatgaaacaaacatgtctagcaaagatgcggatgaaccggaggctcaagcatcaaaaggaaagaagcccaataaacggcagaagatcgttgttcttaactaggatccttgtcatctttgacaaaccaaggggagggagttgtgctagtatttcagaaaggttgtgctacagaatgggactgagactaccagggcagcttgaagaacagacatcaagatatcagaattacctactgtattttgttgtagaatgctgaggttagctaggattatttgttttcgtcagggccaaatgatggcatgtcaaggccctacttggggaatacactgcgcagcagtattgccagttctgatctatacgactatacgtgtccctttagttccttggagccgagttattgattttgtttcatatacattgaaatcaatgttcacgaatactcatgtattcgtttaattgtctg

SEQ ID NO: 25966 - DNA, 2084 bp, Oryza sativa
  ref <308>: DATABASE ACCESSION NUMBER: AK101408
  ref <309>: DATABASE ENTRY DATE: 2002-08-28
ggtgtccgcaaccgcaaatccccatttggtctcacctaaaaccctagctcgctcacccatggctccgaagaagcgaaaggcggatccggcggagtccccggtagcctcgtcggaggccggcgccggcaccaaccaccaccaggagacgccctcctcggagctcaagccccgggggaccatctacttccccatcaccgacgaccccccggagccgagcgcagagggcggcgccgagggggaggacggcgccggaggggacgacgatgaggaggacatcgcgaagctgctcgagcccctgtcgcgggagcagctggtggcgctgctccgcacggccgcggagactacccccgcgacgatggcggccgtgcggcgcgcggcggaggccgaccccgcgagcaggaagctcttcgtccacggcctcggctggggcgccggagccgacgacctccgctccgcgttctcccgcttcggcgagctcgaggactgccgtgtcatctccgacaagcaatctggcagatctaagggctacggcttcgtcctcttccgctcccgccgctccgcgctccgcgccctccgccgcccccagctccaaatcggcggccgccttgctttctgccatctcgctgcctcgggtcctgcccctccgacctcccagtcccagaaccctagctccaacaccaacgccaactccggtgcggccaataacgctggttctgcgtcgtcttcacaacctgacaacatgcaacgcaaaatctttgttggtaacgtgcatgctgatgtcgatgttgaccgcctgtatgagtacttctcgcaatttggtgagattgaggaggggccattgggatttgacaagaccactggcaagcctaaggggtttgcgctgttcgtctacaagtcagtggagagcgcccgccgtgcgctggaggagccaacaaggaactttgatggcaaaatgctcaatgtgcagaaggctatagatggcaggaccaagaacacacctgggatgaatgcaaattctaaccctagtggtaccgctgcctcggcagcagctgctgctgcagctgcacagatgactgctcctgctactgctgcaattacaccgtatgatgcatcagcttatggtgctactgccgttcctgacttgggttatgcgcagcaagcggctatgttgggattgggtgcacagcagcaggcgtttgcacaacccaatgctgcaatgcttgccatgatggcagcagctatgcaaaacccagctatgctcgcaacgctgaaccctgcttttgctgctgctgcattgggtgctgggggccagcaggtgcacgcggctggtattccaggttttggagctcagggttttgggacacagggctttgcagcaggtgccgccgcttttccaaatgcagcgggtgttcaagctcctcctggttttcagggtccgcctgggttccagacttctgctgggtttcaggttggccaagcagcttcacaagcgggtactgctgcggctgctgccgccggtgctgctggttatcaggctgctgctgctgggcagggccaagtgcccggaacgcaaattgggggtgctggttttcagggtggattttgaaatcactaggtataacaattcacatcctgcttaatcgcttcaagtcctcatttaccactaatgatttgagttagcttatcctccaaatattattcgcaacttggtgatttgggctaaaaatttctgattgtttctctatatcttagtttggcatctgctggtcgtgattcgttcgtgtggttttgcattcggatggattttgaatctatgttggtgccaaagtattgcgaaagggttcctgctgttggcttttacaatcagatggcttttgaatcaggcaactttgtggcagtatttacagaaggcgctttcttgaagaatttatgttgtttttattgcctactatgtagctttgtccttgcaacttcatcatgtacgttatggtttctgtaatggggtttaatgtactgaaatatctgtattttgacttgttgggatgttatccggtcttattgattatgtcaaatggtttctgggc

SEQ ID NO: 25967 - DNA, 707 bp, Oryza sativa
  ref <308>: DATABASE ACCESSION NUMBER: AK101409
  ref <309>: DATABASE ENTRY DATE: 2002-08-28
ggacgggacgaactgcagatcgagtcgcatcgcgggcgagagagagagagagagagagagagagagagagagagagagaagacccggacgcggcggcgcacggcggcagccggagaagagcggggcgtggcggcaggcagcagctcgcgggcgtctcctccagtcttgctaacctcgccgcatggggatcggccacgtgctcggcgtcctcggcggcgccctcctcgcccacgccgcctacgccaccatccagtatcgcgccgtgctgaagatcacggaggaggagttctcgagtccgcctatggatgtgatgatgcaattgctcctggggttggccttatgcatgtgggcaggtcttgctgttccagcgaagttcctttcagtgctccctcactctgaggagaataggattgtttcactcccggctaacctggacttcatgatcttcaaccaccgcggaagggcgctaccttcagacccagacttgaagctgaagacatgattgaacatttacagtttctgttatttaccacagtaggatgatccatccagttattttttttgtgtcactcattgttgagggggagaaacatttccaagaacttaacgtctactatgtgtaactcaagtttttgtgtcacctgaattctatatctgtataccactcaatcttgtgccagtccatgtgaattaccagttattcattc

SEQ ID NO: 25968 - DNA, 3184 bp, Oryza sativa
  misc_feature (421)..(421): "n"=any one base of a, t, c, or g
  misc_feature (431)..(431): "n"=any one base of a, t, c, or g
  ref <308>: DATABASE ACCESSION NUMBER: AK101410
  ref <309>: DATABASE ENTRY DATE: 2002-08-28
gatttttctttgccaaccgatctgcccgtctcccgccgccgccgccgccgtcgccgcctccggcaggaggcccaatccccggatccgcccgcgccggatgctcctccgccgcgccgtcgccgccgtagcggagcgctcctcccgattatcgcactcgcgacccctcctccggcgcgcgggctctgcctgctctagcctcaccaccaccaccacctcccaacatcgtcacggccgccgtcgcgcgccgccggctgagagcaacgccctcacaaccaccgccgcgccacgcccgttcccggactactccccgccccgcccggactcgccggccgacgacgacctcgcgcgccgcctcgccgccgccgtcctctcctcccctaacccgggctctctccctcccctccccttcctccctctcctncgcccacttnacctcctcctcgcgctccccctgctcgcctcgcacccgcacctccccaccatcctcctgccgctcctcctcctcttcccctccgggcctcgcccgcaccctcacctgctccagtccttcgcggtcgctgcccacctcgccgccgttcgcgatcccggcgccgcgcgggccatcctcgttcgcgcccttcgcttcccgtcccctcatcggcatttcgtcgagcagttcatctccacctacaaggccttctcctccgaccctgtctcattcgacctcctcctcctgtgcctcccctccgcgcctctcctcctccgcctccgccagtacggcatctctccctccccggagtcctgtaacgcggtgctctgccgcctcccgcttgatgaagccgttcagttgtttcaggaactcccggagaagaacacctgctcgtacaatatactactcaaggcgctgtgcaccgctggccgcatcaaggatgcgcaccaactgtttgatgaaatggcatcgccgccagatgttgtaacatatggcattatggtgcatgggtattgtactcttagtgagctggagactgcgattaagctgttaagtgaaatggcagcaagggggttggaactcaacccagtagcctatactagtgttattgcattgttgtgcgacgaagggcaggtttcagatgctgtgagggtggtagaggatatggtgatgcatggagtggtgttggatgcagcggtgttcacaacggtaatgagtgggttctgtaggaaaggtgatttggcagctgcaaggaattggtttgatgagatgcagaagagagggttggcagctgatggagtgacgtatactgcgctgatcaatggcctttgtcgggctggagagttgaaagaggcagagagagtgcttcaggagatggaggacaagggattggatgttgatgcggtcacatatacagttctcattgatgggtactgcaaggttgggaagatgacggaggcctttctggtgcataacaaaatggtgcagaaacgagtgacaccaaatgtagtgacatacacggctctgtcagatggactctgcaagcagggggatgtgtgtgctgctaatgaactattgcatgagatgtgcagcaaggggttagagctgaatattttcacatacaactccctgatcaatggcttgtgcaaggctggcaatttggagcaagctatgaggaccatgatagacatggatgaagcaggtcttaaaccagacgtttacacatatacaactattattggtgctctttgccagtccaaagagcttgacagggctcacagccttttgcaagagatgttagataaaggaattaagcctactattgtgacttataatgttctaatgaatggcttttgcatgtcaggtagggtagaaggaggtaagaggctgcttgaatggatgctggagaagaacatccacccaaataccacaacatacaattctcttatgaagcagtattgcattgaaaagaacatgaaatcaaccaccgagatctacaagggaatgctttcacaggaggtggtaccaaatgaaaacacatataatattttgatcaagggacattgtaaggcaagaaatatgaaagaggctctgtatttccatagtgaaatgatagaaaagggattcaggcttactgcaagctcatacaatgctcttataagattgttgaataaaaaaaagaaatttactgaagcgagaagattatttgagaagatgaggaaggaacgtcttacagcagaaccagatgtatacaacttttatattgatctcagttttaatgaagataatttggagtcaacccttgcactttgcgatgaactggtggaagtcactcttgtgaaatctatagctgacacggatgatgactttgcagaagagcatatatgtaagtaacatgctttggcaaatgatatcatcctaatctattcaggattggcaatgtgtaaagtgaaccaagaacacacaacagacaaagcactgccctttttgccatgctgaaataacagttgagcgatcatgagattccttgaagagatgtgggaggttcttggatattacagatacgtatgggattgctcatcatggttattatgcaatttgcaagatagaccatcctgttgctgtggagcatgtaaagaaataaagtgatgattcttacaagcacttaaggccatgagaaatgaatactgttcacttctacagtgccttttgtatgatccatatctgatagtgtgatggaggaaaattttccatggtattgttggcaatttcttatcacactgaaagtattacaatgatgatggtctagcccagagttggatgtttggactttggagcacagaaggtaataacattagtttgcgagattgccctttttggccttttcagatgatgatgatatacaaggagataattggattactgttgcatagcttcagcttccacataaaatgtgtttggtgagagtgagtgagtgacaaacttttacctagtgttgatagggagttgacatcatggagctatgctatcgacatcttttcactacataatagggcagtgttacccttctaaccatgtctcagtgtgaagcaatatagctgtactatttttacaacagcagggacattagctgcttaagtcaagcaccaactagcgatttttgtcctaactgacacttttttcgttaagatgcatttgttcagttttacaaggccc

SEQ ID NO: 25969 - DNA, 1385 bp, Oryza sativa
  ref <308>: DATABASE ACCESSION NUMBER: AK101411
  ref <309>: DATABASE ENTRY DATE: 2002-08-28
gaatcgatctctccccgtccatcccctcgatcgccctcgaccaccctcgcccgccgcctccgccgatccccatccgtcgagcaccgccgccgccgccgccgccgccgccggcgtcccgccacatccccgccttgctgcccgattatatcattattacaccttgctgcggcttttattgattcgtgaatcgtgatggcgtgccggggcttcttcgaatgcctactgaagctgctcaactttgtcctcacggtcgccggcctcgccatggtcggatatgggatttacctgctcgtcgagtggatgaggatttccggcggcggcggcggggcaccaccgtcgccagcgccgcctgctgagttgcttatgtttggccgcccgatgctcacggctgttgccctaggtgacggtggcagtttcttcgacaagctccctaaagcatggttcatctatttgttcattggtgttggtgcaattatctttgtgatctctctgtttggttgcattggagctgcaacaaggaacacctgctgcttgtgttgttacgctttcttggtcatattgttgatccttgttgaggctggagctgctgcattcatattcttcgacgaaagctggaaagacgtaattccggtggacaagactgagaattttgatgtaatgtatgactttctcaaggaaaactgggagattgcaagatgggttgctcttggtagtgtcattttcgaggtattgcttttccttttagcactggttgtcagggcaatgaacaaacctgctgaatatgacagcgatgatgagatcatcgcaacttctagaagcactagcatccggcagccactaattcattcacaaaatgttcctgctactggtgttcctgttgcaacccttgagcaacgcgctagcagaaacgatgcatggagccagaggatgcgtgagaagtatggtctggacacaagccagttcacctataatccgtcagacccaagcagatatcagcaaaatggtgcccctccagctgaagaaaggaaccgctgtgttatactgtgaaaaattactccatgacgtactccggtatggtgtttttttcatgggcaggcttgtgcagttggttgcaccgagtaattaattattcagagtgtcgtgtgtaaagagggctattgcattgtcgttttgacatattgatgtgttctctgaatgttctatgcaccggtaaatcttctcatgtggagaagctgctattagatacgccattttatttgcctgtttttgggtgtatcttttcgtatttttctctcgactagctttcatcctcaattcctcattgtacagccgttgtattcagtttggcgttataatcatgtttgtggtggttggtttgtgctatg

SEQ ID NO: 25970 - DNA, 2721 bp, Oryza sativa
  ref <308>: DATABASE ACCESSION NUMBER: AK101412
  ref <309>: DATABASE ENTRY DATE: 2002-08-28
gtgccgccaaaaccctcgcctccttccccccacgccgcgctccgacctctcgccgccggcgagcccccgcgtgatctccatcctccaacgcagcgccgccgcccgcccgcgctcccgaccaccgcggccctaacgcgctgcgccgggggagcttcccgtctccgcggcgctgcttcgcgtacgcctcctcctcctcctcccgccgccgcaattccgacctcctgatgtgctccgagaaaggcatcggggaggagccggctgttgccctcgccgtcaatctctgatttccacccaaggaggagggatcgaagcaggaggcctgagcccaagaatccagctggattaggttaccattttcatcaatctgagtgagtgttacaccggctttgacacaattaattgcaatactactgtttctgctgacctgctttggtctagtgggagatcaagtgttaatgtttccgatttgtggtatctccaggacagtgactgaaggtacacaaagagctgaacaaaagagctattgggtttatttcccttaacagtttgttgggaacatttgccaaataggtggttcagaattgcctccaaacccatgtgtttcacacacatctgatcacacccaatatacacattccgtacaatcttctctcgtttgcaatgggtcctcgcccacctggtggttcttcagataaaaaaagttgtcaaaatgtcacaccagataaagacagctctatgaatttctgccaccaacaatatccgcagcacctattttcacaaccaccatatgcaatgaatttcccattcccaccatttcctcactaccctccatacacacaaaatttgcaatatgctgttccaccacaatatgctccatacacattaccacctcctgctggagctatgccatcaacatttttacctgctccagttattccatccaaggcaccgtctgaccaaggcaccccgcgttcaataactggtccaggagaacaaggcactgacaatgctgaacctgagaaggctactaagcgactatattggacagaaaaggaggacataagattgataagcgcctggttgatttattacaagactgacaggtactgggaaaaggttgtagcagaatacaacagtacaatccctgcaactcgaagaagggaacttcaacatgtgaagggccactggcacaagatattcagaaaggtggcacacttccatgattgttggtgccgggttaaggcaaaatatcctagtggccactctgagggcatgcaactgatggacaaaacttggctgatgtataatgaggaagcacgtgtgatgtatcttgaagaagcagagcataatttcgccttcgaccattgctggaaagcagtttggaaccaacccaagtggaaagcatacatgtcttgtttatttacgaaaagaacaatgcagtctgattcttgggagtacatgtcgtcttctgaggactctgaagaaatgcctggaaaagaaataggtgaagaagtttgcatgacatctaaggaagctaaagttaagaggtcaacttcgtcttcagagatgcaagaagacatgcttatcaagaaccctgaggagctgacagaagtagagccttctatctccaatgaaaagcatctgttggccagtttgaaacaacaagatgcttgcaccaaggacacaggaatttccaagaagcaatcagaattattgacagctgatacttcctggcccactggatttcgtcttgttgacacttcagaattgaatgaacatcaacaggggttggcagtaagggatgatatgcttgaaaaagaatcacgtccacaaggtttcgatgcacaagacaacgagagggcgacaagggaaaacattcctagaaaagaaacacagccacgaatttgcaaggcaccaaagttcagtcggaaacgtaaaggcaaggcatcgtcttcctcatgcgaggtgcaagaagacatcaaacatgcgatgcatcttcagaccatgcttaacaatgatcgtgtgaagatgtcagaggtacagctccgcctctcgaaagagcagcttgaattggccagaataaagcaggaagaagcaagggagaagaaggaaactacactttacaagaagtacacggagctgttgctggcagacacttcaaggttcgatgagtttcagaaggcagagtatgagaaagcactgaggcatataggaggaatgctattcagcaaggatggcaattagtgcccttgcttcaatttgtcttaaagcgttactgtgcaaatgtcatctcaagcactagctagtcatagatccttctattctacctgttgaatgaagggactagtcatagatcacttgcaagtttagcctagacttactgacatccagtttgtggaacttgactaattgaatcctgtaagtgatggatcaatatgtagtcagctttagttggctcgtctaagttcttaggaatgttcattcagctggcagaaatgtccattttgctaacctgatctacactagcaagaatgcttgaacagtggtgtctatgcaacatcgacggcaagaatgcttgaacagctatagtgtagataaggcaacctctttgttggttgtcgtgagaacattctggggtgtcagctgtgatctcacattgcatcccatgccaaaaacaaaatgttcctattcggacaagagaaaactaattatgttgcatcc

SEQ ID NO: 25971 - DNA, 2474 bp, Oryza sativa
  ref <308>: DATABASE ACCESSION NUMBER: AK101413
  ref <309>: DATABASE ENTRY DATE: 2002-08-28
gatcacctccgtccgtccgacccacccaatcgcccaccacccacccaccgccaccgtcccgatctccggccaccgtcatgccgtccgccggtgccggcgccgccttcctactccgtccaatctccgctaccacccaccctctcatcagcttatcctgtaccggcgccggcgacagcgcgaaccacaagtctcacctcctcttccgcctccaccattcgtgccgccgcctgcccgtgccccgcctctccctcaccccggcccccaccggcagcaataattctccgccctcgcctccgccggcgtccccggagcccccgccccctcccttctccaggtggtccccgccgcgcgcgatctggcgggggctctcggcgctgcttctcgcggggcaggtcttccaccgcgtcctcaccggccgcgtccaccgccgcaacctcctcgcgcagctccgccgcgtgggccccgggagcgcgggggtctcgctcctcaccgcggcattcgtcggcatggccttcaccatccagttcgtgcgcgagttcactcgcctcggcctccaccgctccgtcggcggcgtcctcgccctcgcgctctcccgcgagctctccccggtcgtcaccgccgtcgtcgccgcgggccgggtcggctccgcgtttgctgcagagctggggaccatgcaggtgtcggagcagaccgacaccctccgcgtccttggtgcgcagcccgtcgattacctcgtggtccctcgcgtcgtcgcttgtgtgcttgcgctgcccgtgctaaccctcatgagcttcgcgctcggtctggcgtcctcggcattcttagctgattcgatcttcggtgtcagtaccagcatcattctggagtcagcgcgaagggcgctgcggccatgggacttgatcagttccttgctaaaatctcaggtgtttggcgccattattgctgttgtgagctgtgcttggggtgtcaccacccatggtggagccaagggcgttggagagtccaccacatctgcagtggtcgtttctttagttgggattttcgttgcggatttcgctctatcatgcctgttcttccaaggagctggtgattctctcaaatatgcaatgggttgaagcaggaacgcagcagagaaaccttttggcttcatcgcagcatagtgtagtggtgtacattgacatgtatggtgtagtggactcgaagtggtcggcgtttcaacatcagccactctcaggtgaaatgaatcaatgttcttgtggcatccattggaagtcgatgctatgctttttgtgtgttgtgctaaattattgctcaactttttgcttctatttcgtgtataactttactattacttcagaaaaggaaataacactacatatgtctattttggctttctaatgaattgttaaattctgatactccatcagtccaatttaagaccagcttaagcagcgggtgtaagatacatattgcttgccatggtgtttagagaaaaatcacccaaaaaaaaaatcaggagagcacacaagtttcataagctcggtcttattaagaaagcgaagcagtgaatgtaggagagcacacaagtttcataagctcagtcttattaagaaagcgaagcagtgaatgcaatcttgctatctgagctttttagttattcttggatgagaagaactgcagtactttttgtcaacaaatctatgagtgtaaaacaaaagtgtttgttgaggcgaacagcggttcctctgactttctgtatgagctggcaagtgaaacaaaagtgctagatacatgaagatggtaagcaagatcattaactgttcatagaccatgaatctgggcaccgtagataatgatatttcactattatatgatgacatatgcagggaccctgtcagcacgcaggattggcaagccatctgagcatgtgaggccagggtagcagtgactgacacgaagaatgacggtgcctatctgcatcatggtgaatattggtgctgttggattgatcattggtggcaaaactggctctcagcgtcacatacctatatataagtgactggttgaaatcataaagaccaggttcttcaacataccttgtagattttcaatctaatgtttgtgtaggtagattttcaatctaatgcttgtggaacatgcacttctcaaatttattaaccagtgacttgaataatcatttggcattaaaaactgtttctgttctccaattgagtctgacttctgaatttggtatttgaactggcaagggtcgaagcacctatgacatgtgtagaccatgttcagtttcagaaaagcacagccgccgccaaaattcaagcacacaggaactgtcttactacttactagctgtgtttctttatattttagctattgtcattacctggcagaagtttgttgtggtattatattgatgtgatctttttgaatgaaaacgactggtattgccatgtggt

SEQ ID NO: 25972 - DNA, 1836 bp, Oryza sativa
  ref <308>: DATABASE ACCESSION NUMBER: AK101414
  ref <309>: DATABASE ENTRY DATE: 2002-08-28
ggtttgcctttcaggcatttcgccgaacactcttggagcaagcgagcggcggaaggacggcggctcgccgccgagggcgacggcgtggcgggacagtgagggagccttatatcaactcggaaagcacgtggaaggctgcgcaaatggggatcggcggcggcggcggggatggagctgctccaagccggaggggctgaacagcgaccaccaggttttggctcgtcagggtctccgtgccgccgccgccaccggcggcgctggtgttcttgggccgcgcgtaggatgggcggaggccggcggcctcaggaatctcctgctgctccggttgctgtagctgcaggctcacagcccttggataaggtgatgtaatggtggattttgatctactctgttgtgtatagtacatgctgattatatcagcctgcatgaatttgggtagttagagtggccctgaggaatcattgatgcagtcatcatctgccgttgtgactacacaccatgcagggaagattaatgggaaggattgtgattatacaagagtaaaactattgttggttttcttgcctgcagctgaccttgactctggttgcaagcaagggcttgaacttcgtaattaaagactgtgttaaccgcctattaaagaagaatgggggtggctgaactagtcatttactgtgactacctggaggacatcaccaacattgacgaaaatggccgatgggtccgatggcacctgaacccacatctccttgccctcgtggtccggcacaaacacctgtagcccttccacatcgtttgctcggagcaagctaaggatctgcgggtcagagtgctcgccgaacccaatgcgcccacctgccatcagattcccaccattgctagccttggtgctaacaaggctcttgatattgcattggtcatcatggtcaagtttgtgaatgttgcatgatggagggtagtggttgatcctcaggaggcagtcactgtcagcgtttgtggtaagcttgctgaagtatctggggtccttgagacctagcccctctcctaacaggtccaggatctcacatgcgagcttcttcatggcttcaatgtactcattcacaatagcactgcaacagagtgagggaggatatcagcaagtgagcacaatcaacttgaaattgattttatcaaaagaatgctgttatcacagaatcaggttggatgtgccatgacaagtaaaaagaagctggagaaagaggagcaaggtctttgactgattgatggctgcagcaaatcaaaagctgcacccaccctccctcggcatgcctgcctgatgagttagaaaagatgatacactgatgggtatatgtgtatgcctctgtgcttgtgcaccaccatctacaagacgtgatatattcgtttcttgtgaatcttgtgatgcatggataggccacagaatcagcagtacatcatgcagccgaggggtgacaaattttccaatgggcaaaaatgtgttgttgacaggattggccatacttttttccactgctccatggaaagacccatcagtgcgtggatcacaagtatcactgcccctgccactacacaacctctgggacatttcattttatcttaccataaagaggactccttgcatgtgtgcctcctttcttttgtttggctttatatggatagcatagatatgctctttaggggcctggatcattttattctcatcagacatgtgtgtacttccatgtgggcccctgtctgttgcatttgacaaaaagaggttgttcttccttcttgtcttgcacttttcatatagcaaaatggttactgtgaagatttcct

SEQ ID NO: 25973 - DNA, 3304 bp, Oryza sativa
  ref <308>: DATABASE ACCESSION NUMBER: AK101415
  ref <309>: DATABASE ENTRY DATE: 2002-08-28
gattattggtgtgtctatgggtttaccaggttcccattgatagtgtgcaaaccacggcgcacactctggccggtcgtcagttcaaccacccgccaactgttcgatcaaatgcctccagggcgtctactttgccattgcaattcccatctgcgagaaaagcttcggcgagcaaacacaggtcttgcatttgaaaatatctgaactgagagatcgagcactgaatggcagagtctgtggtgtttggaatcctatgcaaaattggatcaatattggggtcacatctgacgcaggcattagtttcacatctggggaaggaggtatcagttttaattgaggttgaaagcattgtaaagcaaattagaagtgagtttaggttgatgcaatctttcctgcaagatggccaagaaaaagaaagctccagcaggcaggctgaaacctttctgcaggaagttcagcagatagcatttgaagttgaagacatcctggatgaatttgtctattattttggcagaaaagaaaccccatctgtggaattgttgaagaacttcttcagaaaatctgaaagtgtgatgccattgcgcagaatagcagcagaactcaaagaagtgcagaatcgtctccaaaatattcgaaacttgaaacttcagtacaatattgacttatctgaagaaagtgccagctccatcaggtatgaagatagcaaaggtcacacactccaccacataatgcataataagaaacttgtcggttttgtaaatgagcgacagaagctgcaagagttgctaatggcaaatgaaagatcatgctcaataatttccatatggggtatgggaggttccggtaaaactactcttgtcaaaactgtttccgaaagcaaagctagcaagaaccgttttgattgccagatctgggttaccgtgtctcaaacatatgacattactgaaataatgaggaagattatacagtgtgcattgaaggatacatgctcagctgacttaggaagcatgagtagtgaaggcgtagtgctgatgctccaggagactttgcagggaaggacatacatgatggtcttggatgatgtgtgggatacaaatgtttggttcagcttggaaggctttctagatgaaagcagcatcagaagtaaggtggtaattactactcgcataaatgatgttgcttctttggcagaagacaagcgccgtcttcaactacgaggattagatgaggcagagtcttgggacctcttttgcatgtgggctttccggcacggtgaagatcaaacatgtcctcctgcaatggaccgagtagcaagacagattgttggcaggtgtgaaggtctaccgttggctataacggcagtaggcaacttgctatccttcaaacggctggatttggtggagtgggagaaattctataatcaactgaactgggagttgcacaatcgcttggataaccaaggactcagcatggtgactcgactccttggtttaagctacaagcatctaccggtccacttgaagaactgtttccttttatgcagtatcttcccagaggactatatgatacgcgggaagcggctatgtaaactattagtagtagaaggtcttgttgaaccaagaaaaaacatgacactggaggagattgcaatggagtacatagaaaagctagtagatcgctgcctgcttcaagttgctcggagaaataagcttggaagagtatgggaactccagatgcatgacattatcagggagctggcaatttcaatatccgaaaaggaaggattctgcatgatacataataaagctcagagatcggtggttgagtgcgagcctcgtcggttatcaattcatgagaattcagtcagagtccagctaagtataaatgcttcacgtgttcgttctttctatcaatttgatatcgattgttcctccgtgtcaaaagtgcaatgggtataaggactgctaggtacctgaaggttctggaactaggtagtgttccaatcagaaaactgccgagagacattgggaacttgttcaatttacattatttaggattaagacgaaccaagatcaagcaacttcctgaatcgattgacaggctccaaaatctccgaactttggacatcttccttactgaaatagcaagtcttccacgtggcgtaaccaggctaaggatgctacgccatctgattgctggaaaggctgttgcttcttattttggcctcgaagatgtcttcacaggtgtcaaagtccccaatggattatggcgatcactggatctaaatgtcctcacaggcatttctgcaagcagcaatttggtggaacaattggccagctttacacagctgagatcattgaagttgacagacgtaaaaaatatccactatacaaagctatttgcatccatcagaaagatgcagcttctaaagaaccttcttattggaactgccaatagtgatgagtatgtcagcttagaagccctagatcctgcacctcagaaccttgaaatactctttgtgaaaggtagactccatgatagggttataggctctgacctatttgaggcaaataggctaaccctcatggagttgactcttgaaaatagcaggctgagcatagatccacttccatcactatctaatttctgtaacctgacccttcttggtctgttcaaccattatattggagaaaccttgctctttcaggcagagtggtttcctaagcttcatacacttactttggctgagctgcaaaatgtcagttcaatagtgattgaaaagcatagcatgccaaatctctataactttgctctcatctgcttgacaaatttagaggatttgcctgagggcatggaattccttgggtctgttgaagagctcagtttggtgggcatgcaccaaaaattcatggaacatgtacaaggttcctcaaatgtaaaagtcaaacacattcctgtagttgactactttgatcaaaccaaagggaggtgggatcgactttctccactttatttcgaagacgaaggcactaagaattgaaattaaacacaagcaaagaaaagatggattacctgcactccgagcttatcctattccccactcatttctactagagatctttctactatgttctctctattggcatccaaaaatatttctatgtattttgccactcttacattagtatccttttgccatctccattcggttgatgattgttgacttccattgttgggccccatcgtttcgcttttttttctagtaagccaaaacggcttattaaaaaataaaaatgaatttataggt

SEQ ID NO: 25974 - DNA, 981 bp, Oryza sativa
  ref <308>: DATABASE ACCESSION NUMBER: AK101416
  ref <309>: DATABASE ENTRY DATE: 2002-08-28
gcccgaaacccttctccctcgcgtcgttccgccgccgccgccgtcgtccagggcgaagcttgcgtagagatagcggcgacgatgatggcggaggaggggacgcagcagctgccgtacgtgcgggagacggtgctgaagaagcggaaggtgaacgaggactgggcggtcaagaaccgggagcggaaggcggccaagaggcagcgccgccgcgacgacggcaagggcgccatcaagaggcccgaggacttcgtcagggagttccgcaacaaggagctcgacttcgtccggatgaagacccgcctcaaggtccgcaagctcccccccgccgagaccctcaactccaagctcgtcttcgcgattcgcatccctggcacaatggacttgcatccacacatgaggaggattttgcgcaagctgcggctgacgcaggtcctcaccggcgtgttcctcaaggccactgacgctactatgaagaggcttcttgttgtggagccgtttatcacttatgggttcccaaatttgaagaatgtgaaggatcttatttacaagaagggccgtgggttcctggacaaggaacctttccctcttaccagcaatgatctcattgagaaggctctgggagaatatggcatcatatgtttggaagatcttgtgcatgaaatcgcatcagttggcccacacttcagagaagcttcaaatttcctcatgcccttcaagctcaagtgtccagagaggaggttgcagatgaagaagaaacccttcaaggatggtggtgactcagggaaccgcgaagataaaatcaatgaattaattgagaagttgaattagtgcagaacctatgcccagtcgtaattcatgtgcaagggatggatccgttataccttgtcagttttgtaatagcctagccgattgtacctttatttctgaaagcttaatagagtgttcatgctcagattatgaaatagcagaatctgttttccc

SEQ ID NO: 25975 - DNA, 1739 bp, Oryza sativa
  ref <308>: DATABASE ACCESSION NUMBER: AK101417
  ref <309>: DATABASE ENTRY DATE: 2002-08-28
gaacggcctgaatttcgccgtccccttggcggcgcctcctctccttgcgagttcgcccaccgcctgcctgcgccgatcgatctccataggcgccgtcttcctgcggcttccgcccgggttctaccttggttaactatcaggaaagatgtcaaataggtcaaagttctggagattagcagcgctagtccctgaagtgcagtgtcctgaccagcccatctctccccgtcaaaaatttaaatacacggccattgtacttttcatctttgtgactgccagccaagttctattgtatgggatccaacaccaacctcgaaccattgagcctgatccattacattggctgcatctgattctggcgtcaagccgtagtactctcttgtcgcacgggatcgtcgctattctagtacctgaggttctggtgaagatctgggtgtacctaaagatcataactctcgataccagtgcacctgaaactggtgttcttatgaatagagcacaaaggttgctggggatattggttgccattctgggagctgttaatttctatgtgcgaagcaaacatttcactgtcaatacggttctaataatgcttcagattctttgctctgatatcattgtcatttatcttgatgatgtcctaagaaaaggatatggattgttatctggtatatccttgttcactgccaccaacatctgtgtaaatattctgtggaaggccttcagccccatgtccgtcatgtatcctgaacaaagccctgaatttgagggagctgttattgcctgggttcatcttctgatgactagaacggataaattgtctgcaatgtctaaagccttttaccgtcaaaacctcccgaatattatcaattttctagccacttgcttgtttgttccacttgccatattcttccaaggcttctatattgtactgcctgtcaggacacggcgtaattttcaagcctactgccacatcaagctctcacatttcttgtatgggcctgttgtcttgcaccgtttactgctcccacttccttatgttgcctcaaaggtgctgtacaagaaatacagtggaaacacactagtgaatttgcttggcaagtgggatggattgaaccattttggacagtctatccctgttggagggatagtgtactacctaaggacgccccctatcttggctgatttgcacagggacccgttccatgcatttatatatgtcgcattcgtgcttatttcatgtgtgtttatctcaatgggtcttatggtctgtgcatcttcaaaaggagttttcaacgggtttgttgtgttaaatatgcaggaggaacgaagactgaggcttgcccagcccgactcaatacatgcgaacgaaattcggcgtcatgtcatgagggcagcttgtgttggtggtttctgtgccggtgtactaataattttcgcagatctcattggggtgttttgttctgggactggaattatgcttgctgtgactgcttcatatccttatgttgatggcagagctagtgaggtcgggtcctttggcttctgactgatcgagatatctactcctaaataaagatgagatacagaaagcggctacttgtaacgagagttaaatccatggatatttatttattatgtagtctgcaagaagctaatttttttttctttttacaatgtatatatttgttatttgctgaaaaccggtgtttcagtgaaacacactaatctgttttggtcgc

SEQ ID NO: 25976 - DNA, 1334 bp, Oryza sativa
  ref <308>: DATABASE ACCESSION NUMBER: AK101418
  ref <309>: DATABASE ENTRY DATE: 2002-08-28
ggtcgtgtcgtcttctccaacccatccaaaccaaagccgcggcggcgcgaggaggcagcgagagctagggtttggggcggcggaggggagatgtcgcggacgctggtgcagccggtggggcagaagcggctgacgaacgtggcggtggtgcggctccgtaagcacgggcagcggttcgagatcgcgtgcttcccgaacaaggtgctgtcatggcggacgcgggtggagaaggacatcgacgaggtgctccaatcccacaccgtctactccaacgtctccaagggcgtcctcgccaagtccaaggacctcctcaaggccttctccaccgacgaccacaccgccatctgcctcgagatcctcgacaagggcgagctccaggtctccggcaaggagcgcgaggcccagctctcctcccagttccacgagatcgccaccatcgtcatggacaagaccatcaacccggagacacgccgcccctacaccatcaccatgatcgagcgcctcatgcacgacgtccacttcgccgtcgaccccaacctcacttccaaggagcaggcactgaaagttattaagaagctaacagagcatttccccataaagcgtgcaccattgagggtgcgcttcactgcaccaaagtcaaaatttgcaagccttacagagaagcttgaagagtggaatactaatgttatttcaaaggacgagtctggtagccagccctctgttgtgtgtgagattgagccatctattctacggtcatgtgaggagagattgaaggatgtgcaggggagggtggaagtactctcagtgtcagcgcacgcagaaggtggctcttctgtggatcaatatgaaaacactgaagaatctcaatcagtgcctgcagtggagattgatcctgttgctcggataggtgaggccatgcagaaacagtccatctcaagtgagccagaaaatcctgggcagggacaaggcaagcagcagagaagatgcaaagaatgtgacgtgcttgtggaggacaagttgtatagggagcattgcaaatctgggtggcacaagcacaactacacacgccacaagaacggccttcctccactcagccaggaggagtgcttggtggaaatggaattagccgactccaagagggacctaaaagactatgatttctgaggctgatatggtaaacattccgtgtggtacatggagatgcagtgtttttgtctgaggagaaaggttgtctgtttgatgctgtatagggaagcagggaagggaatatttgtgtaaccgcaatgtacgctacttgcaatctactgaaatggagtggtctatccacattgtct

SEQ ID NO: 25977 - DNA, 2289 bp, Oryza sativa
  ref <308>: DATABASE ACCESSION NUMBER: AK101419
  ref <309>: DATABASE ENTRY DATE: 2002-08-28
gagaaaaatagagggagggagagggagagaagcagagtgttgagcacaagctagtgaaagggttagatagaaacttggtagaatagacagataggcagagagagagagagagcttagcaagctaaggcttagctgctgcaaggctccatccatgcttcttgttgtgagatgagattgagataagatgagcagggggtggtggtgcctggtgtgaggctataggtaagatggtgggaggagagcttgtgctggctgctctggtgatcctgcttgctttgctgctgaccctggtgctgagccacttcctgcctttgctcctgaatcccaaggctcccaagggaagctttgggtggcctctccttggtgagacgctgaggttcctcagtcctcatgctagcaacaccctgggcagcttcctggaggatcactgctccaggtatgggagggtgtttaagtcccatctgttctgcacccccaccatagtgtcctgtgaccaggagctgaaccacttcatccttcagaatgaggagaggctgtttcagtgcagctaccccaggccaattcatggcattctgggcaagtcctccatgttagtggtcctaggggaggaccacaagaggctcaggaaccttgctctagcactggtcacctccacaaagctcaagcccagctaccttggcgacattgagaagattgcactgcatatagttgggtcatggcatggcaagagcaaggacaaggggatggtcaatgtcatcgccttctgcgaggaggcaagaaagtttgcattcagtgtaatagtgaagcaggtgctggggctatcaccagaggagccggtcactgccatgatacttgaagatttcctcgccttcatgaagggtctcatctctttccctctctacatcccagggacgccctatgccaaagctgtgcaggccagagcgaggatatcaagcactgtgaagggtattattgaggagaggaggaatgctggctccagcaacaagggtgatttccttgatgtgctgctttcaagcaataagctctctgatgaggagaaagtgagctttgtgctggattccttactgggaggatatgagaccacctcactcttgatctccatggttgtgtatttccttgggcagtcagctcaagatctggaactagtgaagagggagcatgaaggcataagatcgaagaaagagaaggacgagttcttgagctctgaagactataagaagatggaatatacccaacatgtaagatgatcgttcaatacatgctttaggattagttagtaagccaggggtacctttttttcctattatcagcaactacacaaatatgtgaccctccgaatatgaggtttactcatattcagaacgattctcctatgcctacccatatatgcaatttttgaattaagcaaaaaaaagaaaaagaaacagagagagaaagaatctcattacaatagagtgaaaagggcggaagggacatgttcttcaataatggaaactgtatgatgatgcatatgctatgcccttacaggttatcaatgaggcactgagatgtggcaacattgtcaagtttgtccacaggaaggctctcagagatgtcagatacaaagagtatctgattccttctggttggaaggtcctacctgttttcagtgctgttcatttgaaccccttacttcatggaaatgcccaacaatttcagccctgcagatgggagggtgcaagccaagggacaagcaagaagtttacgccgttcggcggtggcccccggctctgccctggatcagagcttgcaaaagtagaggctgctttcttcctccatcaccttgtgctcaattatagatggagaatcgatggcgatgacattccgatggcatacccgtacgtggagttccagagaggtctgcccatagaaatcgagccactttgctctgaatcctgacaggtttgcagttgcagccacggtgagcgagttcatcaaatcatccccgcaagcgagggggagatgcgggcgagaacgacggactgagaggattagtcagtgaaacaaaaaaaaggagagaaaatatttcaagaactgaagaatgcactgagcattagctagtagtacctatcaatgagccaagctgagattgtaatttgctgtacatggtgtagatatattttgtccatgccgattgcttgcggtggtggtggtgcggtgcttcaccctgtaacatcctccactgtttcaactttcatctgctattctatagaagaaaaaaaaaaaaag

SEQ ID NO: 25978 - DNA, 2126 bp, Oryza sativa
  ref <308>: DATABASE ACCESSION NUMBER: AK101420
  ref <309>: DATABASE ENTRY DATE: 2002-08-28
gagcagccatggcggccggggcacgagctctcgtgccctcgcccttcatcgtcgtcgtcttcctcctgctcgccgccgcggcgagagacgcttccgcgctcacccggcatgacttccccgagggcttcgtcttcggcgcaggcacctccgctttccaggtggaaggggcagctgcagaggatgggaggaagcctagcatctgggatactttcacccatcaagggtactcgcctggcggtgccattgcagatgtctcagcagatcaatatcaccattacaaggaggatgtaaagcttatgtatgacatgggcctggatgcgtacagattctccattgcttggcctcgtcttattccagatggaagaggagagatcaaccccaagggcttggaatactacaacaatctgatagacgaattgataatgcacggaatacaacctcatgtcaccatctaccactttgatctccctcaggcccttcaggatgagtacggtggaatactcagccccagattcatagaagattacacggcttatgccgaggtttgcttcaagaacttcggtgacagggtgaagcactgggtgacagtgaatgagccgaacatagagcccatcggcggctacgacgccggcgttcagccgccgcggcggtgctcctaccccttcggcaccaactgcaccggcggcgactcctcgacggagccgtacatcgtggctcaccacctgctgcttgctcatgcctcggcagtgtccatctacagacagaagtatcagttggcaacaggcaattcaaggaggtcagatagggatcactctgctgggctggtggtatgagccctacaccgacgcggtggcagatgcagctgctgcaatcaggatgaatgaattccatattggatggtttatgaatcctctggtgcatggagactaccctccggtaatgaggagccgcgtaggcgctcggttgccatccataacggcgtccgattcggagaaaatacggggatcgttcgacttcatcggcatcaaccattacttcgttatctttgtgcaatccagcgacgcaaatcatgaccagaaactaagggactactacgttgatgcaggtgttcaagagaatggtggaggaggattcgacaaggagcactatcagcttcatccctgggctcttggcaagatgctacatcacctgaagctcaagtatggcaaccccccagtcatgatccacgagaatggcgacgcagattcaccggagaccccgggcaagatcgactacgacgacgactttagatcggatttcttgcagagctacctggaagttctgcacctgtccatacggaacggatcgaacacgcggggatacttcgtgtggtcactgctcgacgggttcgagttcctctccggctacggcaaccgctttggcctgtgctgcgtcgacttcaccgcgccggcgaggacgaggtacgtcaggagctcggcacggtggtactccgacttcctcaacggcggcgagctccggccggtgaaacccttcgtcgcattatgaatcgggaagatattaatccggagacgtagactagaagatgagcaacttactactctctccgtcccaaaaaagccaatcctctcccagtacaacgattctgaattatactaggaggggtcacatttttaggttgggttttttttttaaaaaaagtatgcagttaatattttttttctttttactatatacgaaagtggaaggttccaaccctccacgcaatagccaaaaataataaaagcgacatcgtcttctagaaggaggccagagaatgtgtatggatgtaaatggaaaaatcggacagaatcacgaacagaggagatcagaaacacctggaattcagaaaaaatggtgagagttggcgaccaatttgagttgctgtactcctttgtgccacctgcattaccctgtcgctgtcgttatctttccatcaaaatgttcatgtacggacgtgtacagggcacgtaggtgtctgtctactgcatgcctgcatttgatgacccggggccccactcgtgtcgccccacgtcgacttgttaggcgcaggtttaactttgttttgtgggataattagtttgactgtg

SEQ ID NO: 25979 - DNA, 1452 bp, Oryza sativa
  ref <308>: DATABASE ACCESSION NUMBER: AK101421
  ref <309>: DATABASE ENTRY DATE: 2002-08-28
gtcggaaacctaccccctcttcttcctccgcttctctctctctctctctctctctctctttctctctcctcaaccgtgcggctgcctcctcctcgtcgctgggcatggatgtgcacccgccgaatgcggccgcctcctcgctggaggagttgttcccgcaccagcccgccacggaaagtgatagaagtggcatagagtggctctctgtctatgtagaggactgcttgtcaacctctgcatcctgcacaaaccctgtctctgcagaactaccgcctattacaatggcaagtcaaggtgctgcaaaaccaaagttaccaccacgctcatctaccaatgcaagaaaaaagaaaaggagcctggcatctgtcataagcgacactgatgaccaacattgtatcacgctgtttgtcgagccaccgctactcctgctcgatcataaggactggctagcagagagtgagcttatcctccccaagaaggacaaagatgaagaacttgtccaagagcaagaacaagaggaggaagagaattacaaaatgagtgcaggaatgcaattccagcaggagcaactggtgatcacttgtagctattgtttgtccagccaatcaccacagtggtgggatggtccatcagggcctacctgcgatgcttgtcgtctgaggattgaggcgaggaatgggcacaccaccagttccaagaagcgctatggccaagagattgacaaagaacaggacataggaaagcggcgagataagaagaagatcaagaaggctgtttatgtgaatgatgagctgctatcggaggagccaatgaagaggtgcacccattgcttgtcctacaagacgccacagtggaggaccggtcccttggggcctaagacgctatgcaatgcttgcggtgtgaggttcaagtctggcaggctgctgccggaatacaggcctgctaatagtccaacttttgtgagtgacatacactccaattctcataagaaggtcatgcagctgaggaattctgttccacacccaaggaagtgaactggtggtcgggaacgtctcgatctgttgcgtttagttttaggaactcttcagttgtagaagtaagctgatagtgaagaacatcttaatctgtctcattgaattttaggcgggctccttggtcgtagaagtgagctgataatcacatctcaatctgctgcattgagcttttaggggctctcagccttagatgctgagaaaacgaaagcagaatctagttaggcgtcatgaactctttgttagctctagccgttttttaacttgagaaattaatctgctagttgttggagatcatcagtttaataccaatgggtggttgctacccttgttatcccaccattgtcttgcagcatgcttgttctgtgatactcgctgaatatgtttgcaagatggaaatcagaattcagagcagcctctt

SEQ ID NO: 25980 - DNA, 1488 bp, Oryza sativa
  ref <308>: DATABASE ACCESSION NUMBER: AK101422
  ref <309>: DATABASE ENTRY DATE: 2002-08-28
aaaaagagcccgaatctggtcctgaagctatccctgcttcgcttccatcgccaactcctccaaaagacctgatagccagggatggctggagttcagagttcccatcacaagtgaggacccaaaacttgcagcacgcccatttgccaaacagagcaaatgcacctcctgttgcaagcagcgtgcagcaaagtttctcaaatgttgtcagttcgttgccttcacaaccttatgcttcagcttctgctttgccggcacagactcgaactaatatgacatctctcccccagtcgatgatctccgtaaatccgtcaactcaacatgttgctcctatgaataatcttctgagcagagccacggtacaccagcacacccaatcatatgctttaacgtctgatcctgttgcagtggcggtccatcatcagccagcggtgaacaaactagcccatgaggttcagagcatctcacaccctgctgtatcacattcttcggtggctgaatcacatgcctcttacacatcatacacctggcaatctagtgttgctaccattgccgccactgggcgaaatgctacacctgatcgatgggctgcacctgcacgcactactaattcctttaacgctgccccatcaaattcaaaccatgtgacgtatcctaaccagaatgcttacagtaaccacagcacacaagctactacatacaattcttatggttcagctccagtctcgtcccactccctccacccagggcagggactggaccgaaatggctacactcacgcagcggagtaccagacgacaatggcgcgagacgccctatggcggaactcgcggtctcctgagcttggtgctggtgctgtgtatggtagtagctcacaaggctatgttcccgaaccctcaaggcagtggaactacgggcagcagagctacaatcctgagccttattctaggcagtggagttctgggcaacaaagctacaacactgtcactgctgagccttccaggcagtggagctccgggcagcagagctacagcaacccagctgagccttcaaggcagtggagttcatcagcacatgcacaaccaagctacaaccctgagccttcaagaccctggaattcaggtcatcagagtcaaaaccctgaggcatcgaggcaatggagtcatcatcatggaaagcaagaacgttataatccgacagatggtagaaattcttatgatcaacattggaggagatgatgagggtcaccattgtatattagctgattcttgaggtggttctccgggcttttttttccctttttttttttttttctttttgatgggaagctttgtgattcgtttactttgggccttgtgattggcacagaggccattgagaaagctatacatcatgtaccaaatgtagtaggagtgggggaaacaaaaaacgagaaaactaaaaaaaaaaaaagagaggatgcatagctgaattgctgaatccattgatggt

SEQ ID NO: 25981 - DNA, 3636 bp, Oryza sativa
  ref <308>: DATABASE ACCESSION NUMBER: AK101423
  ref <309>: DATABASE ENTRY DATE: 2002-08-28
gggtgggtatgcatctgagtactctcataacggcccagcgcgaagagaagcgaacaatgcagttccgaaaacccggatggcagctgcagagaattacagccgcactgcacctttaaactcaagaacatatcaacaggataagtattctgcccatgtccctgctcaagacaatgtgaaatcttctcaaatggatggactatctgatgtacccagtgcaccgccaatacatgcttatgatcaggaaataagccaagtttctcaaaatgttgatgcaaacgtatgcgatggttcgactgtcaaaaaagaggaatataatgatgatggcttggaacctaacttgcctgagaaaagtgaaaggagcactttaaatcctgggcacagcagcaaaccatctagttcaattcctcttcgagtccccacgtttcatgccagtttgcaagggccctggtattctgttcttgcttatgatgcttgtgttcgcttgtgccttcatgcatgggctagaggttgcatggaagctcctgtttttctggaaaatgaatgcacacttctgcgaaatacattttgcctgcaaaatgtgcttctacaatcagaagaagagctcatggcaaaacggacatctgagcttgttagcgatggagttgcatccaaacccaagaaaacaattggcaagatgaaggttcaagtgcggaaagtccggatgtctgtagatgtaccatctggttgcaatttctcatcattgccgatggtgaaactaaattcagttcggtaccgtttgtcaaatgtacaatccacactctcctctggatgggagtcggttcgaaggatccaaactttaccacagctacctgctaacagttccttttcaaaacatagcttagcgtacatgcaagcaagtgctcagtacatcaagcaggtatctggtgtgctaaaagttggcgtgactaccctgcgcaacagctcatcctatgaaacaccgcaagagacttactcttgccaattgaggcttaaaagtacacctgaagatgatgttgtaccgatgcagccaggatctggtgaaacacatgtcttcttcccggatagccttggagatgatttgatcattgatgtttctgattcaaaaggaaagccctgtggacgtgttgttgctcaagttgctacaatggcagaggaatctactgacaagcttcgttggtggtcaatataccgggaacctgagcatgaactcgtaggccgcatacagctatacatacactacacaactgctgcagatgagaacaacacgaagtatggctctgttgcagaaactgtggcttatgatattgttttggaagttgcaatgaaagcacagcacattcaacaacggaatctcatcttgcatggttcctggaaatggttgttgacagaatttgcattgtactatggcgtttcagatgcctacacaaagctgaggtatctctcttatatcatggatgttgcaacccctactgctgattggctcaatctggttcatgaccttttgttacccgtactaatgaagacccaaggcactgctgcattgagccatcaagagaaccgcatattaggtgaagttgaggagcaaattgagcaaactttagcgatggtatttgagaattacaagtctctgaatgaatctttgccgtcgggtttagtggaagattttagacctccaactggtttggctgcttgtgctctagaaccagctataaagctttacagtcttctccatgatgtattatctccagaggctcaactcagattatgcggttatttccagggctgctgccaggaaacgatcaagacgatacatgcttgagactgatgaatatgtagcaggaaattccgaaggcataagagtggatctggtgacctttacaacagcttaccagaagatgaaatcattatgctgtaatctacgtaatgaaatctttacagacattgaaattcataaccagcacatacttcccagttttgttgacctccccaatttagttgcgtccatctatagtgtggaactctcaaatagactgcgtgcttttcttgtggcatgccctccaactggcccttcatcacctgttgctgatttggtgattgcaactgctgactttcagaaggaccttgctagctggaatatatgcccaattaaagccggtgttgacgcaaaagagctatttcatttgtacattgtcttatggatcgaagacaagcgcaggacgttgctggaaaattgcaggatggataaggttaaatggtcaggagttaggactcagcatatgaccacaccttttgtggacgagatgtatgatttgctgaagaatacattgacagagtacgaggttatcatttgccgatggccagaatacatatttgttcttgagaatgctattgcggatattgagaaagcagtgatagagtctcttgaaaaacagtacggggatgttttggctccacttaaggattgtattgccccaaagaaatttggtctcaaatatgtgcagaaactcacgaagcgcaattcagttggcccctatactgtacctgaagatctgggcattctcctgaatacaatgaaaagactattagatgttttgcggccaaggattgagagtcatctgaagtcatggagttcttgtatgcctaatggaggaaactctgcagctattggggagagacttagtgaagttacggtaacactgagggccaaattccgaaactacatgcaagctgttgtggagaagctctcagaaaatactcgcatgcaaaatactacaaagctcaagaagatcattcaggattcaaaagaattggtgatggagtcagatattcgaagcaggatgcaagcgttgaaggaccaacttgttgaggcaataaatcatgtacacaaggtcactgaagtccatgtgtttgtagctatatgccgaggtttttgggaccgaatgggacaggatgtcttgagtttcctggagaatcgcaaagaaaacagagcctggtacaaaggcgcacgtgttgcagtatctgtgctggatgatacatttgcatcccagatacagcagctgctgggtaattcgatccaacagaaggagctggaaccacctagatccatcatggaagttcggtcgatcctctgcaaagatgcaccccgacagaagaactctagcttctattactgagcatttttggtgtacataccagtcactggaagaataaggacgtgttgacatgctgcggaagatgcaaagtgaagatgtgggaatctatgtaaaggaaaaatgtgaaaaatataaagatataagtacaacaaaaaaacaaggctacagaagggtcccattgaagacttgaagtgcatgaccggagaagatggcctaccagataagtccatcaaatgatactttgctggttaaacctggttcaagtatgcttctgctgcctgtgggatggtctgcattgaaaaattggactgcactgtaggtagtgtagtttaagtgatgctttaggttagatcatcgatagcatctatctgtgctcacacaattgccaatgttagtgtttcgaggtcgatgactcgttgatagaaattattttcttctaatgtatggacgggacaattgattgttc

SEQ ID NO: 25982 - DNA, 4394 bp, Oryza sativa
  ref <308>: DATABASE ACCESSION NUMBER: AK101424
  ref <309>: DATABASE ENTRY DATE: 2002-08-28
gtccctctctcctcacacagtcgcaatcgcagcacaacagcacacacgcacactctctcttcccagtccagtccagtccagtccacccccacagccgcgcccttgcattgcttgcttctcgccgcggcaacgcaccgcatccacctgcagcagcacggaaaccctagccaacccatccccacacgccgcggagctccgaacgctgctgccgctgctgcttttccggcggcatcaagccggatctgcgcccccacccacactacccgcttgccgagattcggcgcctccgcttgccgggaggcggaatgcggtgaggaggaggaggaggaggcggaatccgtttgcctctctgagctctctcccctccggcgagcgagccgtgggggtggcgcggcgtgtgggacggccacaccccccttgcgtggcccctcctcgcgcaattctcggttccaatcgaattggaggtaattgttctgaatggactatcgtctcctcgatctgatatattggaaaggaggaggatagcaaagttttctcgaagagacttctagtctataaagatgccaccctctccctccctgaggagatctccttcaaaggagatttcccataggaggggccacagttttgggagcacagtgcctgctaaaccaaaggatgacgaactcgcattgttcaatgatatgcggaaaaatgaggaggacaacttcttgttggagtcgcccgataattttgatgaaacgatctcaaaattgagctattttccggatctcaagcttggcgtcaacattgccagacgagaagaaagccgtgattttcttaacactgatggtgacaagaatgattatgattggttgttgactcctccagaaacaccacttttccgttcattggatgatgatgaagacaagctcgctggtccagctcctaggggcagggctcagacaaagccaatattgatttcaaggtcatcaacaatggaaaatgctcaaagatctagtagaagcagtgcaagcccaaatagactaagcttgtcaccacgctcaagtagcagcaatacagctctgacaaggacaagatcaacgaattcatcttctcgttgtagcccaccactttctctgcaatcatccacaccatctcgaagatctccaactcctccgggtaataagacattaacaccaccacggaggtcacctagtcctgcctcaaggaggatgagtgctacttcaagtggaccaacgctgaatggaacaaggggagcttcacctgtgaaaactaatcgtaggtcatcttctccaaaatttcaaggatggcagtcaagtgatcccggtttctcttttgatgcacctccaaaccttcgcacatctatgtcagaccgcccattatcccgttcaaggggtgggtccccttcatctttcagtggattaaacatggtttcaagaggtagaagacaatcaatgtctcctaccccgtcaagaagaactatttcgtcccatagtactgaacgagatcgtttcagttcatacagcaaagcttctgcaacatcttctggtgaagatgatctagactctatgcagtctgtgccaattgactattccagcagtccagctgtaaaaaagagcctggcagtgatgaagaccagaacaattgcatcatcacagaagccatccaagagtttctctcctagttctgccccaaagagatcatttgattctgctgtttggttgatggatcatcgcaaagcacctcaaagtatgttcaggccacttctgtcaagtgtccccactaccacttttgtagccggcaaaggaaatgttgttcatcgccctacgttttcacacatttcctcagtcacaaccagcagcaacgcaagttctgagcatggtgccacttttagcccttgtgtggacattgaccatgaacgacatgatctagttggtcaatgggaaacaaatgacagttccagaatccatgaagagatatttatgtttgataaatctgatgagctgaatgaaggatccaattgtcatcagcacagtttatcaactacttgtagtggtttagagaactcatcaggcagagtcaattgtgtagagagcaccaaagaaggccttgatatgaaaagtagacgaacagctgatcagatttcatgtggttttgcaagtagttctgaggttggagatggtgaaatggccacatgcactagatgtggaaagatttttaatgtgatgtatttgagtggtgataattattgtgaagagtgtgattttggggatgggatattttctgcaggatctaagatacaaactacagaaggactacatcagaaggaccataaatttacgcaatctaaagtttgcattccatcggaagatcgtcgtcctatagcactagattgtgtagaagatagcagtgatgtatctcttgaccatcagttagtgagcaatgaacctccagctgattatttacaaaggtactccactgaatcagtggtgcacacaaatgaggaaaagatgttggggaagcatttgatgaatcttaaagaaaatatcagtccacatgatattggtgactcttcaatgggaaatagcaatgatatttcaccacatacatgtagtgtaagtgactatcaagaagctgaagcagcacatgtgacagagtataagcttttcagactacaaaaaggtaaccaaaatcatgaaatggcccaatgcctgtcagaatcagattgccaacataatggatttatttctggtatggtggccagtggatctcatgaactggggtcaactgggcctccaagccttaaggttgaaaatgctgagggcaacggtatatcggtactcttattggaggagacaagaagcaagaaatggcctattgtggaagggaggactttggttactaccaacattcattgtttggaaccctattatacagcagatagtgtcagtttgatgaagcgtagcattggacgggatagctcttcagctgcttcttccattgatctagggccatcagggcaatcagatgtacgctttgagcgccttagaagtggtaagaagggtgacttcgagaagtctcaaataagttgtcaaagcattgcttcagtgtcggatatgtcaattagcggttcatcagcttcacattaccctcagagttatgtaaatggagatggttgccatccaatctatagtttggaaacaagtgctttgacagctgcggtttttaccgaagaacatgatggatcttttaaagaagctctctcaagtgctatagagtgctggtctgttgcacaagccattgtaaatgatgattgtgaagtagaagatgaagtaactcagaatcaagataaagaaaggatggctcgtgatgataatttaggtgttgacatgtgttcatcatacactgaagtgccaagtgacatgccccagtctcctgctgctgacgttagcttcatagaaaagacagagaacgatagtcaagaagttccggccatcgctgactactcagttgcaactccagaacatccatgtgatgagaacaattctgacattcctagaattctgtctgaaacggttgcagcttctgatgacgaaagcaagttggatgattgtggtgtatcatctgtccctgaggagggtgcattggtttctgcaagagatgaaaccaaagatgaaggaaggaggaaacaatttcagagatgcttcactttagaagaggctacggatacaattctcttttgtagttccattgttcatgacctagcatacaaggctgcaacagttggactggagcgagagcaggaagctgaattcgctcatgcccctcgaccaacagtgaccatggtagaaaaattcattccaagggaagatggtttgttgagaggtcctcagaggcgaacgacaaggcgtaaggttgaaaggaaaataccagaaggtgatggagaatccatcacagatactgccaggacagaagtaattactaaagagccagcacctgtacgttcttcttctgaaattactacatttgatagcttgaagcctccaaagatggagtcgaagtgcaactgcacaattatgtgaattgtccatgattggaatgtaccaaggagacctgggatctaagttgaagcctatatatatagtagtttcgttttgggcgcaaaccactactgcaagatgaaccctgcaccagttgagcgcaggggtttcttgtgagaaaattttctggccacggtgcatttattttcttttttttttgttgtaatagaggtgcttgggctattcttttgtaaattcttccttccccctttttgctctgtatgtttattctacgttctgcttgccgtgtgattatattttagtttgctaaagaaatgaaatttcagttcc

SEQ ID NO: 25983 - DNA, 1165 bp, Oryza sativa
  misc_feature (972)..(972): "n"=any one base of a, t, c, or g
  misc_feature (975)..(975): "n"=any one base of a, t, c, or g
  ref <308>: DATABASE ACCESSION NUMBER: AK101425
  ref <309>: DATABASE ENTRY DATE: 2002-08-28
gcagttcctggtctgcgagctggtggttttatgggcagtcaggttatattgccacttgcgcacaccttagagcatgaatagttcctggaggtcattaggcttgagggacacagcctctgccatgatgaggtcgttctatcaagagatatgtaccttctgcagctgtgcagcggtgtagatgaaaatgctgcgggtgcatgtgcccagcttgtctttgcacccattgacgaatcttttgctgatgatgcaccactgctaccctcaggcttccgtgtgataccactggatggcaagacggatgcaccatctgcgacacgcacacttgacctggcatctactcttgaggttggatcgggtgggactacacgggcttctagtgacacctcgagcacctgcaacacaagatcggtcctgaccatagctttccaattctcatatgaaaaccaccttcgtgaaagcgtagcggcaatggccaggcagtatgtccggaccgtggtggcatcagtgcagagagtggccatggcaatagctccttcacgtcttggtggacagattgaaacaaagaaccctccaggatctcctgaggcccatacgcttgcaaggtggattgggaggagctaccgattccacactggagcggatctccttcgcacagactcacaaagcacggattcttccttgaaagcaatgtggcaacactctgattcaatcatgtgctgctccctgaaggctgctcctgtgttcaccttcgccaaccaagccggcctcgacatgctggagacgacgctgattgctctccaggacatctcgctcgagaagatccttgatgatgatggccggaaggcactatgtacagagttccccaagatcatgcagcagggtttcgcctacctcccgggcggcgtgtgcgtgtcgagcatggggcggccggtgtcgtacgagcaggcggtggcgtggaaggtcctgagcgangangacacgccgcactgcctcgccttcatgttcgtcaactggtcattcgtctgagaaccaccctagtagaatcgatcccccctcttgtttgtctgtcctaaagaccttatgtagtattgcttttgtgtatcatcaccatgaacatgtcaagaacctccccagtttctatcatcatgaacttccgtttgaatct

SEQ ID NO: 25984 - DNA, 1836 bp, Oryza sativa
  ref <308>: DATABASE ACCESSION NUMBER: AK101426
  ref <309>: DATABASE ENTRY DATE: 2002-08-28
ggccctagctcgcccgcccatgccgctgctcctgcgcggcggctccctcttccgtctatacgggtgtggctgtgggcttccaagcgcaaatttcagtcccagcaaactagcactgataagactaagcttgatgatggcagaaacacgagccacctattcgcgtcgagctgcctctaagaatactgatatcaagaaagatgatgaacatgtccttgaaaaggaggatgttgctgaaagcaaattggagatagagcaacttaggaatgaccccgatcgactccaatccatgacagtgaaggagctcagggaaatcacgaggatgatgggaattcctgtaaaaggcaacaagaaagatttggtatcagccctgatggattctctgggtaaagtgggaacttcatcagttgagaagattggtgtgtctgaagtaccttcaaaaagaaaaggtgcttcagtagtagttgaacaaaacatagatagttctgaggtcatttctgaaactcctagtaagagaagtagagcaaagaacaaaggaaccgctgaggagagttctggggctaatgtcaagcaaagcaagacatcagtccagaagaaaaagctagttgtccaaggtgccagtgtggaccatgaagaaccttggactgtacttgtacacaagaaaccacaacctgcctggattccttataatcctaaggtcatgaggtctccatctcttagcaaggatacgaaggctctaaagattctgtcatggaatgtgaatggattaaaagctttacttaaatcgaggggcttctctattcatcagttagctcagagggaggacttcgatatactatgcctacaagagacaaaaatgcaggagaaggatgtagaagtcattaaggaaggtctacttgaaggctatacccatagtttctggacatgcagtgtatcaaagcttggctattcggggactgcaataatttcaagggtgaaaccactctctatcaagtacgggcttggtgtgccagaccatgatactgaagggagggtcgtcacagtggagttcaatgatttttacctcctgactgcttatgtaccaaattctggtgatggtctaaaaagattgacttacagggtcacagaatgggatccaagccttggtaactacatgaaagacttggaaaaatcgaagcctgttatactaactggtgatcttaactgtgcccatcaagagattgatatacatgatcctgctggaaatcgtagaagtgcaggctttacaattgaagaaagggaatcattcgagactaattttttgtccaaaggttttgttgatacatttcgaaaacagcatcccaatgttgttggatatagttactggggttataggcataatgcccggaagaccaacaaaggttggcgtctggattattttcttgtgtctgaatccattgcagaaagagtccatgattcatacattattccagacatatctgccagtgatcacagcccgctaggcctcgtactgaagctctaggcaggctgcatgcctggaacccaatacggacttctgggtttagttaacaatgttttcctgctgtgagtctgtgggagggtatgtggttttgtatcagtaggttctaatactagcctaacggatgtggatgtgttacaccaatccgatgttggaaaaaaggctggtttcgatatgtagccgaatgagtctgggtgatgtagtgttgttacacttccttaagctgcattgacagatcgtaatgcggggtctgcacttttcacgttttcagtggagtagctcagtattggaattcgatggtaatatcatgattcgtagcc

SEQ ID NO: 25985 - DNA, 1961 bp, Oryza sativa
  ref <308>: DATABASE ACCESSION NUMBER: AK101427
  ref <309>: DATABASE ENTRY DATE: 2002-08-28
ggtccaagagatctactgttctccttgttgagaggaagccatccagccagctagctataagatagatagaagaagatcaagacgacgaccaagtagaggataggcatctctcgaagcttagagacaaataattaactagagatcaagagcctattcgtcgtccatggggagcaccggcgactgcggcaatggaaaggcggccgccggcggcggcgggttggtggtgccggagatcaagttcaccaagctcttcatcaacggcgagttcgtcgacgccgcctcgggcaagacattcaagacaagggacccacgaacaggcgatgtcctggcccacatcgcagaggcagacaaggctgatgtggacctcgccgtcaaggccgcgagagaggccttcgagcacggcaagtggccccgcatgtcaggctatgagaggagcagggtgatgaacaagctggccgacctggtggagcagcacgccgacgagctggcggcgctggacggcgccgacgccgggaagctgctgacgctgggcaagatcatcgacattcccgccgcggcgcagatgatgcggtactacgccggcgcggccgacaagatccacggcgagtcccttcgggtggccggcaagtaccaggggtacaccctcagggagcccatcggcgtcgtcggcgtcatcatcccctggaacttccccaccatgatgttcttcctcaaggtcagccccgccctcgccgccggctgcaccatcgtcgtcaagcccgccgagcagacgcccctctccgctctgtactacgctcacctcgccaagctggctggagttccggatggagtgatcaacgtcgtcccgggattcgggccgacagccggtgcggcactctcctcccacatggacgtcgacagtgttgctttcactggctctgctgaaatcggccgtgccatcatggagtcggcggcgcggagcaacctgaagaatgtgtctcttgagctcggcggcaagtctccgatgatagtcttcgacgacgccgatgtcgacatggctgtcagtctgtcatcccttgcagttttcttcaacaagggagagatttgcgtggccgggtcacgcgtctatgtccaagaagggatctacgatgagtttgtgaggaaggccgtggaggctgccaagaactggaaagttggagacccttttgatgctgccaccaatatgggtcctcaggttgacaaggtccaatttgagagggttctcaagtacattgagatcggcaagaacgagggagcaaccctactcacaggtggcaaacccactggtgacaaaggatactacattgagcctaccatatttgtggatgtcaaggaggaaatgacgattgcgcaagaggagatcttcggcccggtgatgtccctcatgaagttcaagacggtggaggaggcgatagagaaggccaactgcaccaagtacgggctggctgccggcattgtgaccaagaacctcaacattgccaacatggtgtcgaggtcagtgcgggccggcacggtgtgggtgaactgctacttcgccttcgaccccgacgcgccgttcggcgggtacaagatgagcgggttcggccgggaccaagggatggtcgccatggacaagtacctgcaggtcaagaccgtcatcaccgccgtcccggactcgccctggtactgataaatcaaatcaagcagcagctatagctagagtgtaccatgtaccatgaatgctgcagcctgtgtagtgttttcggatgtttttctccttaattctgctgctgcttggtgtggttgtatgtagtttggttgtggggtgagatatggtgcagattaaaaggggttctgatgatcatgatctgatccttgtttggttgaacttgttgagaaatggatgtatagaactcatgtgccatcgtttgaaatcgtacaaaatgtgcctcaaagttcaaagc

SEQ ID NO: 25986 - DNA, 3284 bp, Oryza sativa
  ref <308>: DATABASE ACCESSION NUMBER: AK101428
  ref <309>: DATABASE ENTRY DATE: 2002-08-28
ggttggcacttagcaggcggcggctgctgctgcggcggcgcagggcggcggcggtgcagagcggcggcgcacggctgaggcggcggcgtagtcggcgctctccttccctgcttcttccctcctttttcctcccaaccccgactcccggcgaccgagggctgcagctgagggcggcgcgcggaggcggaggcggcgggcgcacggctgcggaggctgctgaggacgagcgcgacaacggaggctgcgcgcggcggaggctgacggcggtgaaaggcacatgctcatttatctagactgtatcttggttataaccccttcctcaaagcatttatccaggacttccctaagcttatcaagactgatctatctgttcctacagaggaggtccatttgcagctatcatttgtatggataagacaactacttctgatcttgttttggacaacgacaacattgggagtaatgctggttctgcacaggagcctcttactaccaatggtaagactagtggggtcagaaatagatacaaacaaactgttaaaaggggaaggaaaggctcccaaatatcaccaagtaaaacatatcccctgagatcttcacatagtaatgtcagggtgcttcgctctgcctcaaaaaagaagaatgagacacctattgtgcccacaaatgataatactgctgttcaacgagttgcgaagaaaaggaaaagaagcaaacccttgagacctgcacctagcagggtgcttcgctctacctcggaaaagaagaataaggcacataatgagcttctaaatgatggtgctggtgttcaaccagccgaaaagaaaagaaaggtaggcagacccccaaaaggaggaactcccaaggacgattacctcatgatccgaaagcgagttagatatgttttgaatcgaatgaactatgaacaaagtttaattcaagcctatgccagtgaaggttggaaaggtcaaagcttggaaaaaataagacctgagaaggagcttgaacgagccaaggtggaaattctgcgatgcaagtcaagaatacgggaagcttttcggaatttggattccctcctatctgagggaaagctggatgaatctatgtttgattctgctggagaaatatctagtgaagatattttctgtgctgcatgtggttcaaaggatgttacattaaaaaatgacataattctttgtgatggaatctgcgacagagggttccaccagtattgtttaaaccctcctttgcttgctgaagatattccacagggggatgaaggatggctttgccctgcatgtgattgcaaaattgactgcatagatgtattaaatgaactccaaggggtcaaactctctatccatgactcttgggagaaagtttttcctgaggcagcatcctttttgaatggttctaagcaaattgatgcgtccgatcttccatcagatgattcagcagacaatgattatgaccctactttggctcaagggcacaaggtggatgaagaaaaatcttctggagaagatggtggtgaaggattagattctgatgactcatcttctgaggattctgaatcttctgagaaggaaaagtctaaaacttcacagaatggaaggacagttgatgatcttggtttgccttctgaggattcagaggatggtgactttgatccagcaggtccagattccgacaaagaacaaaatgatgaatcaaactcagatcagtcagatgaatcagattttacatctgactctgatgatttttgtgctgagattgctaaatcctgtggtcaggatgaaatctcaggcccttcatcatcacaaatcagaacagtcgatcgcaccgatggaagtggttttgatggtgagcctaatgcagaaaattcgaatcttgcatttatggagacagagctagagcaagacatggtgctaccaatttctagtaaacgacaagttgaacgtttggattacaaaactgtataatgaggcttatggtaaagcatcatctgattcaagtgacgatgaagagtggtatggaaatagtacacccgaaaaaggtaatttagaagacagtgaaacagattcgcttgctgaatcacctcagggtggaaaaggattctctagaagagcaccagttaggtaccataataatgaacatactccacagaatgtaaggcccggtggttcagtaagcgaccagcaaactgaagtactttgctccaatagcaatggtagcacaaccaaaaacagacattttggtcctgcaattaatcagaaactgaaggcacatttcaaggaagatccataccctagtcgtgcaacaaaagaaaatctggcacaagagttaggcctcacatttaatcaggtcactaaatggttttccagtactcgtcattacgcaagagtggcagccacaaaaaaggagaacaacattgaaaatcatacggctgagaataataacaataccaacactgttgatagcatacaactgagaggatccaatgatattgttagtgtagatagaaatgatatggtctccgaggaaaggacaggacaaagtaatctcaatgaaggtactccattaagatcagataccagctgtgggcagagtgtggctgtgactcctatggtacacccagaaaaccagggcaatgattcctcaagtaatgttagaacaccaaatgctaagtctgcggagaaattgatccctggactggaaaattcagatgaggctaggcgaaaggcggtacaacgggaactgagaaagatgaagactggcaggtgaaactccctagtgttcgagttatttgaccagatgtgcagagaagcaagtttttgtatgctgcctagattgcttttaatcagatgtgcagagaagcaaagattttttttccttcttgtttgtggtcgcaaaaaagcctgattgttgtagctgctatgtttgttccctttggctgtccatccagaatttctgataagatgacacttggaagcacatcctgcagcactccagttacaggaatgggttcagttgactgtaacagtttagcatagtccgtagtggacagtagctgtgttgtttgtcgtgccctgtagtcctgtactaccttgaattaggactgctaagtgaaccgatacaagtacttgtgactgaaatctatacctctttttttctttccaccttgggaatttgtagaacaaaaccgatgtctgatgatatgctatctaggaatagcaactgttgtatttttgttcctgtttagggagatttagattctgatgagc

SEQ ID NO: 25987 - DNA, 2486 bp, Oryza sativa
  ref <308>: DATABASE ACCESSION NUMBER: AK101429
  ref <309>: DATABASE ENTRY DATE: 2002-08-28
gtcactggtatataaaaaacaccccatcctgtgtgcctgccgactcgcccacgcaactccgactctttccttccccaattctcccgtccaccggccgcggacctcgccggaaccctagccccgccgcccccctcccctccccgatcgcccgattcggtggtcggggtgatggactccgacgccgagatgcccatgtccagcgacgaagagatgttggatgacgaggactattacgactacagtgatgacatgggtgaggacgatgatgggagcggcggcgggggcgggggagatagcgatggggaggaggaggaggagggggatgaggagctggtgggcggcgactacgagggccgcgaggcggaggggagcgacgaggtggtgtcccgccgcgagcagagatacattgtattaactgaaaaggatataaatgagcgtcaagaggaagatataggcaaggtatctgctgtactatcgattcgaagggaggaggcgtgtgttcttcttcatcactacaaatggaacatcagcaagttaagcgatgaatggtttgcggatgaagaaaaagttcgtgatattgttggattacttttaaatggaattgatcttcctaactctagaaagctaacttgtggaatatgttttgaagggtattcttctgatgtgatgagttctgctgattgtgatcatttttattgccatgaatgctgggaaggttatattagtgctgcaataagtgatggtccaggatgtttgtcattgcgatgccctgatccatcttgtggtgctatggttcttcagaacatgattaataagttagctaaagatgatgataaagtgagatatgcacgatttatcttacgtgcatatgttgaagatagcaagaagactaaatggtgtccagctcctgactgtacatgtgcagtggaatttgtcagcgatgggaactatgatgtctcatgcaattgcaaattcagtttttgttggaactgcacggaggaagctcatcgaccagtgaactgtgagactgtttctaggtggatattaaagaatagcgcagaatctgaaaatatgaactggatactggctaattctaagccgtgcccaaaatgcaaacgaccaatagagaaaaaccagggatgcatgcatatgacttgcactccaccttgcaaatttgagttctgctggttatgtctgggttcatgggctgaacatggggagagaactggtggattttacgcttgtaatcgctatgaatcagcaaagaaggagggagtttatgatgagactgaagcaaggagggaaagagccaaaaattcacttgagagatacatgcattactatgagcgctgggcatctaatcagacgtcgaggcagaaggcacaagcagatctgcaaaaggcagaaaaggaacaacttgcaaaattaacagatgtttttggaataccggggacccaactgaagttcataattgaagcttggtcacagattattgaatgcaggcgggtactcaaatggacatatgcttatggctattatctggacgacaaggtcaagagcgaatttttcgagtacctgcaaggtgaagctgagtctggtctggagcgtcttcaccaatgtgctgagaaagacctgcaatcatttttgactgtgagatctgataatactgaacctgcaccatcaattgctgaattcggtgacttccgggtgaagcttgcggggctgacaagtgtgactcggaattattttgagaaccttgttcaagcactggaggctggcttggaggatgtacactctactgcccagggtaccacatcaagcaatgccaccaacatcccctccaagaaagcagtcactaaaggcaaaacaaagaagcagcttcctagaacatcttcggacaactcagatgaaggctggccttgtgagcgctgcacgtttattaacccttcatcggtggatgcatgcagcgtctgcgataagcatagatactagatgaaaaactggctgaaagccagtgccccccataaatctcgaagctgttgagaaggtgggtgcttactcaaagctcatgagaagattgttgattgtagttctgttcctaaattatgtggcgttgaagaagagcttccaatggcagcaatggcgtacatgtgtgagtgaaggtccctggttgtatctagattgcagcaacaatgcaggaccgactatggagcgaaggtggatggggtacaaacatgtggtagtcttttttttttttactttctagcctatattatgtacatattagttatggtctgtagttgtgttaatgtggtgggcaatgttctgtttttgtttaaatgacatgagatgatgtggtgggtaaagttccaccccctgtactgaccaacctgtgaagctggagaatggtagatgtagctcttatctattgagcggtcatgtaaattaccaaagctcgtcataatctatggttgataaatcatgcg

SEQ ID NO: 25988 - DNA, 2631 bp, Oryza sativa
  ref <308>: DATABASE ACCESSION NUMBER: AK101430
  ref <309>: DATABASE ENTRY DATE: 2002-08-28
gagttagcatctcgccattcctccgatccccacctccaccaatggcgctctccatctccacgccgccgacctcctcctccctcctgccggcctccctccaggtcggcaggtggagctcgtcggcggcgatgtcggccaggcctgtggcctttagcctccggaggccggttcttgcggcccgtgtagccgccggcggcaacgcaccgtcttcctccgtggacgaggtggtcactgagctcgatgccgtggccagcttcagcgagatcgtgccggataccgtcgtgttcgatgacttcgagaagtttgcgccgaccgccgccacggtgagctcgtcgctgctgctcggtatcgctggcctcccggatacaaagttcaagagtgctatagatacagcgttggcagacggtgaatgtaacacaatggagaagcccgaggaccggatgtcctgtttcctaaccaaggccctggcaaatgttggagctgaaatggctcatctagtccctggtcgggtgtcgactgaaatagatgctcggttggcttatgatacccaaggaattatccagagggtgcatgagcttttgaagctatacagtgatcatgatgtcttatctgaacgcctgctgttcaaaattccggctacatggcaaggtatagaggcctcgaggttgcttgaatctgaagggattcaaacacatttaacatttgtgtacaggtatgtacatatgctttgcctaatttgatcatggccctatttcttatagtgggcaatggtatagatgctgggtgtatggcaatacttatcttttttgtggggttagagaactgccttcaatttgtttagtcttaagatacttcagtaagtataagggaactaataaagattgtttcttattatcatgcatcacttattaatgatggctcaattgcattgtaagtatacattttgcttttatgtcagcagaagaagaggttttctattgaatttacctggtgaattgtaattactcaattaggcctgactagttactgttgataacaagcttatctataaaggacttgcactattgcaggtgcataaaagccataaacttactcttgcaatttacataagatggtattgttggagagagcagactgcaggatgtgtagctcacctagtagttagtaactgagaactcgtaatcattttttttgtgtgcctgatcattcttcttcagttttgcccaagcagcagctgcagcacaagccggtgcatctgttgtacagatctttgtgggacgtgttcgggattgggcaaggactcactctggcgacccagagattgatgaagctttgaagaaaggagaagatgctgggcttgctttggcgaagaaagtgtatgcctacattcacaaaaatgggtataaaacaaagttgatggctgctgccatacgcaacaagcaagatgtgtttagcctcctggggtatttttcttattacagatcaagattgatcgcaatggatgttagtttgtacagaactaatatttctgaaatgtaggattgactacatcattgcacctctgaagatattgcagtctttggaagaatctgtcactgatactgacgtgaagtatggttatgtcccaaggctgactcctgctcttggcaaaacgtacaacttcactgaagaggaggtttgctcacttatcctggattttgtgcagagtcttatatcatgcattctgtagctccaccaaactactcgctataagagactcatattaggggtgtgatgttttatctaaaatatataggatcttcacttgtcatgtgctttaacactactagagatgaaataaggaaggaaaataatatttggactgtttagatcacccttaaaaggtcatgtcaaagctcgtagtaggtgtaatcatgattcaccaaacagttactagaacaatacaaacaagtcattgacatcctataagaagaggaaaaataaaacaagagaagataagtgattatattttttatatggcaccttcatgctaactgttcatatttcaaatgataccacgaatgcagcttgtgaagtgggaccaattgagtctagcagctgcaatggggccagctgcggaagaactacttgcttctgggttggaaggatatgtgaaccaagcacgccgagtggaggaactcttcgggaagatctggcctcctccgaatgtttgaacacattctatgatgaggaccagaccatgccacagtcttctattccaaagaataataacaacagccacggacagtgctggccagcatttgctcgttcccttcaaagaatacttctcttagcctgtctgtgtttgtactttgtagttctctagctatctagcaaatctcacgatgacatgtcaagaacatctttgttttcttttcgcaaagattggatacggattttctcgagtatttcattagcccgtgagatgtgtaccatgaaatgtcacccaaatgctctgctggattgttctgaagtctgaactgaatcttcagagttgcagttacttatcactacgtttttttataaaaagatgggtgccatcagctagtactgtgaattcccattttcagtaaaatggaagaaatgctgacg

SEQ ID NO: 25989 - DNA, 1784 bp, Oryza sativa
  ref <308>: DATABASE ACCESSION NUMBER: AK101431
  ref <309>: DATABASE ENTRY DATE: 2002-08-28
gagtacgccaggccgctcgtcttcctcctctccactcccctgccgtcgccaccgccgccgccgccgcctccgctactccgtccacgacttccgttccacagccaagatgtggaggcggcagcatgctctcctccgccgcatctcgctgcccaagcctcccgcggctactgggatcggatgctactacgccaccgagccggaaggcaggaagccaaagacggcgcctttgcagtcaaggggcatggtggataggttccgtttgcgtgccaagggtggtgatggtggcaatggctgcatcagtcttcggcgctccaggtcagatcgccaaggcaaacctgatggtggtaatggaggaagaggtggtgatgtcattcttgagtgttcaaggtctgtctgggatttcagtggtttgcaacatcacatgaaagcaagccgaggagccaatggagtttcaaagaatcagatcgggacaagaggttctgacaagattgcgcaggtaccagtaggcactgttattcatctagttgaaggggagcaaccttctctttctgtaaataagccaaccagagctctagatccctgggatatcccagatgctgttgaacactcaccattcagctccagtcgtattggcagcaagatgatgaaaggtctggatagcagccgatccagtcaacatatttcttccaagaagaacactgctgaaaatgattgtgaaagaggaaacagaaatcatcggggaaaggaaccatattacatgactgagtttgtgcgcaccgaagattatgatggcactagctatccacaccaggtgggggtagatgaaaatgatcaatttgatgatgaggatgatgaattttgggaggacgatgaagaagagttggacatggaggaggtaacggaggaaaaggaggaggaagaagatgttcggtatagtgttgctgaaatgacaaagcctgggcagcggttgatcatagcaagaggaggggaaggtggactagggaatgcttgtatcctcaaggagatgtggctgtccaaagcacataaggaagaggagatggctagcttgagtactggacatcctggaactgagacctatcttatcttggaactgaagagcattgctgatgttgggcttgttggtatgcctaatgctggaaagagcacattgctgagcgctctctctagggctcgcccagagatagctgactatgcattcaccaccctaaggcccaatattggtagcttaacttatgaggactacttctcagtgaaagtggctgatatacccggtctgatcaaaggtgcccacgagaaccgtggccttggccatgctttcttgaggcacatagagcgcacaaaagttctggcttacgtacttgacctggcagccacgctcaatggtcgaaagggtgtcccgccatgggagcaactgcgggatttggtcgtggagctggagcattaccaagaaggcctgacaaagcgcccatcattgattgttgcaaacaaaatagatgaagagggagccgatgaaatgtatgaagaactgaagaagagagtgcagggcgttccaatgtttccaatatgtgccatcttgcaagagggagtaccagatctgagagttggtctgagagaccttatgggtgcctcagatcctcagggtattgagttgagcaaaattgtggtagattaaattaagttgagcaaaattatggtagaatttttccttgagatgctgatgcagtggggaaatgttttggaaaatttccctctcggcagttcgt

SEQ ID NO: 25990 - DNA, 1629 bp, Oryza sativa
  ref <308>: DATABASE ACCESSION NUMBER: AK101432
  ref <309>: DATABASE ENTRY DATE: 2002-08-28
gacatcgagatcaacgatagagccaagcacaaacacgagctagacgacgctatcagcgaagcagaaacacacacacacacacacaaaatctcccggtgttttgtttagcacagtctagtgtttcccatggcgcccgtgcagacaccggagcagagcaacgggtcactgacgttgaacccggtggtgcagcgcgtgctgagccgcggcaagtcgctgctgtcgccgtccacgccgcggtcgccgccgccgtcgtacgggagcatcgtcaccgtgctgagcatcgacggcggcggcgtgcgcggcatcatcccgggcaccatcctcgcgttcctggaggagaaactgcaggagctggacggccccgaggctcggctcgccaactacttcgacgtgatcgccgggacgagcaccggcgggctggtgaccgccatgctcaccgcgcctaacgacaacggcgacccgctgttcgccgccagggacatcaacgacttctacctcgagcactgccccaggatcttccctcccgtcagcaaggggcctctcggtctgttcaagagcatgacggggcccaagtacgacggccggcacctccactccgtcgtgcagcagctgctcggcgacaagcgcgtcgacagcaccatcaccaacatcgtcgtcccgaccttcgacatcaagctcctccagccaacaatcttctcgacctacaacgctcgcaaggacgtgtccaagaacgcgcttctgtcggacgtgtgcatcagcacgtcggcggcgccgacgtacctccccggccaccgcttcgagacgacggacaaggacggcaagccccgggaatttaacctcgtcgacggcggcttcgccgcgaacaatccgacgctgctggcgatgacacacgtaaccaagcagatcctgctgggctgccaggacttcttcccgatcaagccggcggactacggcaagttcatgatcctgtcgctgggcaccggctcggccaagatcgagaagaagttcgacgccgtcgagagcggccggtggggcgtcctcggctggctgttcaacaagggcgcgacgccgctgatcgacagcttcagccaggccagcgccgacctcgtcgacatccacgcatccgtgctcttccaggcgctgcactgcgagaagcgctacctccgcatccaggacgacgagctcaccggcgacgcggcgtccgtcgacgtctccacgccggagaacctccagaggctcgtcggcgtcggcaaggcgctgctcaagaagcaggcgtgcaaggtcgacctcgagaccggcaagaacgagccggacatgaaccggaaaagtaacgaggaggagctggtgcttttcgccgagatgctgtcgcgagaacggaaggccaggcttcagaaaaagcaggggagcatgaagatctagtacatattggcaaattgtagcagatcttcggatcaatactacaggtctacaactactattggtgtcaagtgattggatgtaaaatttatccgttcatattggatgtttgttgtatcttcgtaaattcatgtacatctatgtaaggaaatgattctaaactctcgagaagatatctatgtgagtagtaatgaaaaaaagctttttactatc

SEQ ID NO: 25991 - DNA, 2174 bp, Oryza sativa
  ref <308>: DATABASE ACCESSION NUMBER: AK101433
  ref <309>: DATABASE ENTRY DATE: 2002-08-28
ttctaggagtattaaagccagcagcatttagagcgtcctagaggcacctacagcagcaacctgcatattctcgatctggatctaggcagctgcttgcaaaattcgggtggcagcgtgaaaatttctcctgaggatttttgggttagcaccggccggtgagaagttcacgggatggccagaaaaaatgagttcccggctgcgtcagggaaatcaacgagtggatactgcagatcaaccggccacacgtcaacgatctcgtcaagtggggactgtgggtgaacaaatggcatcgatcatgccattgatagaagcgaacaagacatagatgatcagcaggcctctgatgttgccatggatgatgcagaacaaattgcctctacactgctaaactcaagatgtcgtgctccaaggagggggggggggggggcgaaaagtcaccatcaataccaaacttgttaagaaaagggcaagaagagaaaggctagatatttcttttcctcaaccatttggaaaagtgtgtggaaagcatgcaaaattatttaaaagtgaggttaccgttattgtaagaaatcatgtgcctctgaaagccaaaaaatggaagaccattgaaaagcaacatcctggtacaatggctaatgtttggaagaagttgaaggatgcatttcctgagctacgcaacgaagatgaagattgtgctatgaagcaggttgaagagtagtatagtaatcgacgttatcgtctccactgcttgcaccataacaagaaaccaaggccaacccatgtttcaccagaagattgggcttggctgataaagcatgtgtggaccgatgaggattttcagaaaagaagcaaccagaatgcagctaacagggcaaagcaggagatgggctctaaagtgggaactaaatcaattgctcaaattgcacatgaactgagaaacaaagagacaggtgaatggcctacaacaatgcaagtttggaaagcaacctatcaaaaggctgatggaacatggtctgttcctaatggtgaacgagttctggtatatatctttacttatgacaacttgttttttttagatttcagcctaaactatatgatatgtgtcaatgtaccttctgagtagtactattttaccattggaaacgcttccatctgccctatctgtatgattcttttgcttactgttgttttcacattacaaatgcttctattactctaaaatttcaccttaacaagtccacctcacaagaagtgcatactaaatgggctaggtgaactactgaactgtgttgttgctaaataatcagtaagtgatatcattcattttatattaggccctgtttgatctaatacttgcaaaaaaaaaactagaatagtaagtgattaaaaatcatatttgttgtaccttgaaaccttgtatgaggtgttagtttgtttatgcttatacattttctttttataatctgtgtcaacagtctaaactaaatgaagttgctcaatcacaacaagaaaatatatgttctgcagcagtaccactagtagagcattttgccttggtccttgggaaaaaagcgaaccattcacgtggtataggcttacgtgcaattaatagagtggctgaagaaaggctaaggttacttgcacaagttgaggctgctgaaaagcatgcagctactgcccaggagcgtgttgatgctgcggaacagcgagcagtagctatggaagaccaagtccgcaaattggatgaaacaaatgcccagttgcaagtagagcaacaatctcaacgtgatgagttgaactcccagagaaggacagtagagggacaagctacagatgttgaaggaatggtacaacaaaaacttgatgagcaaatggccatatatttctcacgcttcgcttcttccaatggtgtttcatcctcacgatctccatcagatgaccattagaatgcatgaagttgatctccagaagtctatttaatcaagctgaagacatcctaagtctatttcaccgaataatttagtattagtcccatttaagtttctactggttgctttagttctcatcatgatgtttatgtcagcatttcgtgagaaattttgagcttcttgttgagtgcaacatttgtttggttgtaagacttctgaataaatatttcaatatcattgttcctt

SEQ ID NO: 25992 - DNA, 1663 bp, Oryza sativa
  ref <308>: DATABASE ACCESSION NUMBER: AK101434
  ref <309>: DATABASE ENTRY DATE: 2002-08-28
ggacgctcccactcccaccggagcgcggcgaccggagcaccccatctccgacgcgctatataaacccctcctccccccggctctccgtcccccatcgctgtgattacccaccacaataaaaccaatctaaccccgcctgcagatccgctccatcgattccctccctaaatcctccgccatttttttgtttgatcggagcttagggctagcgctacctccgccgcgcggcgccgtgttaggttttataggcagcagcggccgccgcgcggttggtagggctagggttttgggggtggtggtggtctggagttgcggggtggggatggatcggaagaaggcgggggtgccgctcgtgtgccacggccactcgcggccggtggtggacctcttctacagccccgtcacgcccgacggctgcttcctcatcagcgcgagcaaggactcaaacccaatgattcgcaatggtgatactggagattggattgggacctttgaaggtcacaaaggtgctgtttggagctgttgccttgacaccaatgctctacgtgccgcctctggttctgctgacttctcagctaaagtatgggatgcactaactggtgaagagcttcactccttcgaacacaagcacattgttcgtgcatgtgctttttctgaggacacccacctgttacttactggaggtcttgagaaaattttacgtatatatgatataaatcgcccagatgcagccccaagagagattgacaaatctcctggctctgtcagaactgttgcttggcttcatagtgaccaatctatattaagttgctgcactgatatgggtggcgtaaggttgtgggatgtaaggagtggaaaaattgctcaaactcttgaaaccaaggctactgttactagtgcagaagtaagccaagatggccggtacatcattacagctgatggttccagtgtcaaattttgggatgcaaattacttcggacttgttaagagctataatatgccatgcaatgtggaatcagcttctcttgaaccaaagtatgggaacaaattcattgctggtggagaagacatgtgggtccatgtctttgatttcttcactggtgaagaaataacttgcaacaaaggccaccacggtccagtccattgcgtccggtttgctcctggcggcgagtcgtatgcatcaggatcagaggatggaaccatccgaatctggcagctgggcccagctaccagtgacgagcaagagtcgccgccgaatgcaaatgggaagctgaaggtcaacacggtgagtgacgctgctcgcaagatcgaaggctttcacctccccaaggacggccagactgagggatagatactagtgcggcaccgctttgattcatgcctgggaatgtgatggtttgagatttgtgttgtcaaagctggtgttgcctgtcttgcttcccaatttccctttgatggatggtatccttccgaaccaggtggttttgcagccttgagaaaaatggtgggttttagtaacagcaatggtatttccaaaagaagatagagagagagagaggccccggggggggggggtgaaattttgtatgaggcctcctaactccaatagtcactgccaatatctaatgccaaaaggttgaaaaattataatttcgtttgcatt

SEQ ID NO: 25993 - DNA, 2290 bp, Oryza sativa
  ref <308>: DATABASE ACCESSION NUMBER: AK101435
  ref <309>: DATABASE ENTRY DATE: 2002-08-28
gattctctccccttctattccccgatccccttctcccagcgagcgtgagactgtatggcggcgatgacagagatggcggttcggtgaggtgtagcacgcgtgtgacgatgagcgccgagtagagtggcacatctgtgctagctggagggtgcgcccgtgggcagtgccaaaccatggcgtggcgtctgcggtccagcgaggtggacgcgcaagcggcgccgagcgtcacgtggcccggaccttgtcggcgggggagcgaaggccaaaggcggcgccaagctgatgcttcccatcccggttagtcggcgacggtgggggatctccaaggttgcgtgcgcacagcaaccgcgaggaggagaaggcaagggcacaccgaggagacgcatgggcaagcccgtatggcgccgacggcggcgataccgcttctcgacgagaccaacaccgcagtgaggtttcccggtagaattagggctccaagtccggtaagaatctgaactcaagcttaatttttattttttgggtttcttgattttttggggattttgttacttagggttcttcatccgaatcagggttcttctcaatttggggattttgggaaaattgaaaccgattgatctcattcttcccttcccttaatttcttaattctactgctaagcaattaacaaaagattaaatcttgaatttaaaacatgcaaagaaacagtatatatgaagggctaaaccgagctaattaacttagattgaaaaacaattctcacttattttcatcatgccgaattgattaggatttaattggcataatggcttcattagggatgatggaacatcaaggctaagattaggctctgatacacaatgttggagtttaatccacttaactacttaagttcttagcctaaacatgatcacctctgcttaatgcggaaattgatctaactgacctgagatgaagccattgaaccagatgttaggttttgtttttgttccttcgatccttctttcttcttctctgttaaggaaaagaacacacaagagatgcctcacgaaccatcaaacattcattgtacgtaaaataaattctaatgactaatatgtctcaccatttattattagctttctcactagagtactcattttttgatagcctactgactgactaatgccccaaaaaaggcagcctactagctagtatattaccataaccatcttcctccatggcaaccacaattgactcgctgcttatttgctgtgtagaaaagtgtgtattgagtactagtactaagagggttcaggcgtccagcgctgggtgatatgaccaagcctactatggatacaacagttgttcatatcattgatcaacaagaagatcaagtcgtcttaagtgctgaaatccaattcggccacctgctacattgctgacttcaactggccaccaaatgcgcatacgagctctgttttgggtccatgagtatttgataaaaagctcctagagtcctctctctaatggttctagcctcatctctaaatcccacctcaatcggccgcaataatagaaacaaggtgttgcatcacttataatgggcctatgggtttgtaactccatctgggaccccagcccaagtggggtgcaccccaacctaatggagcatgacagaaccctaggtcgtcctcccatatccataaatagctatgtaccccttcagggcctagggacccctagatcatcctcccaccttcataaaatagctaggtaccccttcaaggtttattgggttttgtttagtaaaaagtttagcaatcactacttttccttgtacttacgtgtgtcggcttgaccgcttaattattcgcctttggaaacccaccttatcttgagctttaattcataattgtaattcataatgcttttatcttgtttttgcttgtttcctcgatttgcttgcaggaataaggttggtctgcatcggcacgatcaacagcccacaaagaggtgtgtcgattcctaaggcacaacacaacaacgccttgtacggttttagtctggtcgtcaatgttttctctcccagatcgtggttatctcaactcaccgaaaggtcgggccaatcagagctttgagcgtgtcaagtcgaactcagagtttatcaagtggtatcagagcaggaattctattcacaccctcccccccggatgtctttgatcctacactatcctagtccttttttgattgggtggtatatttatggcactgattataagccatggaagaagaaaaataatttatggcc

SEQ ID NO: 25994 - DNA, 866 bp, Oryza sativa
  ref <308>: DATABASE ACCESSION NUMBER: AK101436
  ref <309>: DATABASE ENTRY DATE: 2002-08-28
gtttgtacaataatagacgcccagggtagcaacaaaatgggccgatgagcagcaactatatatgtaccaacaaagtgcagggcaaattcagctgcaagaaggaccaatggcgccgatgaaagtgtacgggtgggtggtatcgccatggatggcgcgggtgctggtggccctggaggaggccggcgccgagtacgaggtcgttccgatgagcaggtccggcggcgaccaccgccggccggagcacctcgccagaaacccgttcggtgagattccagtactggaggatggcgacctgacgctctatcaatcgcgagcaatcgctaggtacatctttcgcaagtacaaaccagagttcctgggactcggagaaggtggaagcctggaggagtcggcaatggtggacgtgtggctggacgtggaagcccaccagcacgaggccgccgtgaggcccatcctgtggcactgcatcatcaacaagttcgagggccgcgaccgcgaccagggcgtcgtggacgagagcgtccggaagctggagaaggtgctcggggtgtacgaggcgaggctgtcgggctccaggtacctcgccggcgaccgcatcagcctcgcggacctcagccacttctccaacatgcgctacttcatggcgacggagtacgccggcgtggtcgacgcgtacccgcacgtgaaggcgtggtgggaggcgctgctggccaggccgacggtgcagaaggtgatggccggcatgccaccggatttcggcttcggaagtgggaacataccatagtgtgcttgctgttgtccagctttgcagcttgttattagcatgtctgcatttccaataaatgggatagccagctctgagaacc

SEQ ID NO: 25995 - DNA, 3814 bp, Oryza sativa
  ref <308>: DATABASE ACCESSION NUMBER: AK101437
  ref <309>: DATABASE ENTRY DATE: 2002-08-28
gggtcagtccagtagcggttcgtcagtccagaccagttcctagctccgaacagagtccttctccgaagtgcgaactcgctgcaagccgaatccgccgcgccgccacacggagacgagagggagaggtcgagagggagagggcgagggcgagatggacgcggcggtgcaggaggcgaagctgctgcgccaggtgaacgccctcatcgtggcgcacctccgcgaccacaacctcacgcaggctgccgccgccgtcgccgccgccaccatgacgcccctcgccccgcccgagcccgacggcgacgactccgtccccgccaaccagctcctccgcctcgtcgccaagggcctcgcggtggagcgggaggagacggggaggggaggaggggcgttcgactctgccgccgccgccgctggatacggtggattgttgccgccgctcggcaccaatgccgtggatttcagcacgcaggatgttaagggctcatccaagagcttccccaagcacgaggccaggcacgtatctgatcacaagaatgttgtccgatgtgcaaaatttagtcctgatgggaaatattttgcatccgggagtggtgacacatcaattaagttcttcgaggttgctaaaataaagcagatgatgctaggggattccaaagatggccctgtccgtcctgtgatccgtactttttacgatcacacgcagcccatcaatgatcttgattttcatcctgagagccccatactgatatctgcagcaaaagacaatacaataaggttcttcgacttctcaaaaactgttgcaaggaaagcattcagagttattcaggacactcacaatgttagatccgtatgttttcatccttgtggggattaccttttagcaggtagtactattatcctttcaccatatggattttacctgtaaacttgctctgttgctctggttatgaggttgtggtattaatttggttaatacgaacttttcttagcctttctttttttggaccaaagataaatcagatgatcgatccagctttactgaaaagccaacagagtcttacagcagaagacaaaagatagcaggtggattttccagcttacaagcatgaacactgagccaaaactacccacatctagactgaagaactacataaacacatcaccactcctttcagtttagttgaaactccaccagctagatcagacagctatcaaacatcacatctgctgcacaatcatatgtcttcaggcaaaatgtccctaggcttcaattcattgagttttgccatgatactactgcaccacttgtccacccgctcgtgatcattgtccttttgaagccttttccaacactaaaaaagaaaataagataaacttataaccccacatgcagtggagatttaactcgtatcccttcaaaaacatagttgtttctggtcatccacaaagaccaacaaaccccttcaagcaagacaattctatttatctgtttagcactacatctgtttttgttaaggatatcctctatggtgcgaagcaagacatttagcttacatacatccctcacagcattccaaacataagttctaaaggacaatcaaacagaatgtgattagtagtttctcttttcttacacagtttgcaaaagttttagtcagtttctctgataccagatgttatgtggtaggatgaattggggtgctcgacgggaaggcgaggctgctgcagccttgccgccccggagcctaggtgaggccgaacagagaagagtggagactagagataggtttaacttctttcttgattaattccaaatgactacggtgcctctccttatatagagccagctcctaacaaacatcctaacaaccttatctaatagagcctaacaaccttatcttataatgagaggggctgagttctgcccataacatgtgctcattttcgtccttctgccatgtggtgtcccatgtggacttgtagggtcagcaccttctttccaatttagactatgcaagtgactgaaatgcgtgctttgcatcacccgaaaaaacaaataatgaactgcatagggtcatcttacatcgatagtaataaaaattagggcaatgcagttactttatatagtttgttgcatttgagggccctggatattgtctacccgaaccctggatattacctgcctgagaccatctgtgatgtcataagaggcattaccactaaagcctttcttttgtcaaattttattttgtgctgatgaacccatagtacctacatttgaagttggtttcatatcatacctttttattgtatttgatgtgattgtgaagtatataactggtcaatgtgctttttggtattatctggcaaactcttttaatttattgttgagttttagcttgcgtactcattagtactaagcatgtctagattgctaaaaacttcttatgcagtggtttcttgttttctaatgaaaatgaggaaccagggtctaggtccttcattctaaaaactcttaatttatttgactaaaactttttggagttctagactgaggatttcgattttgttgtggaatcaggcattctttgcttctttcatttgatgtaatccacccccccccccaagtgaagacgctcatatgaatattgctaacaaactgataaagatgataacacaaatatgctatccattagctgttttgatcatgcaattgattaagataatttggacagtgccatcctgacctgacaagcaggctgctgccccttagtgcgcacgagctgctcccgatgcaccttctgtgcacagacttatgattccacctgattccttgcaaaacagagagctcagcagcgtgctattggtggcccagtcagccagtctgaactaccaagcacctgtattatatgcttgatatttgacaaatatcacaagtctagtttctaccgtttcctctgcattcctgctggaagctaatactaacacattaatattcaagcaagtgattctgatataaacttttgtagggactgatcacccagtggctcatctatatgatattaacactttcacatgctacttatcggcaaattcacatgattccaatgctgccattaatcagtcactgatgttgatgctaggtccgatactcttctactgggagcctgtatgtgactgcttccaaggatggttctctgcgcatctgggatgggatatccgctgaatgtgtccggcccataattggagcacatgcatctgcagaggttactagtgcaattttcacaaaagatgagaggtatgtcctatcatgtgggaaggattcttgtataaaattatgggaagttggctctggacgacttgtcaagcaatatgtaggcgctgttcacagacaatttcgatgtcaggctgtcttcaaccaaacggaggaatttgtagtatcaaccgatgaacaaaacagtgaggttgtcgtctgggatgcacttaccgctgaaaatgtagcaaggttgccctctggccacaccggtgccccgaggtggcttggccactcccctgcagaaccagcctttgttacatgcggtaacgatagatccgtcagattctggaaacaaaccgtgtagaaaatgtagatccaccaacgaatcaacccagaagttggtggtagaattaactaatacattgagattaaaaaaccttgttcatgtgctgttccttaattatttgattagttgtacacttgtacatgctactgaagttgtacactgatgatactgtacccaacttggtaggaaaattttggctcttgttggcatcc

SEQ ID NO: 25996 - DNA, 1222 bp, Oryza sativa
  ref <308>: DATABASE ACCESSION NUMBER: AK101438
  ref <309>: DATABASE ENTRY DATE: 2002-08-28
ggtcggtcaacgccgcgctcgatctctcgccgccatggcccgcctcgccgtcgccgccgcactcctcctcgtcgccctctgccgcgtcgtccacggcgaggccgatcaggagaccgcccccgcctacgccaaccgtgaagcctacgtcgagcacaatggtggtgacgccgccggcacgtccgtcgccatcgtcccgccctacctcgacgccgccgccgccgcccgtgacgagcccgcggcggcggcggcgagccccgaggggcctgtgatcccggtcgacgacgacgcggcggaccagcagggcttcctccgcttcccctgccgctaccactgccgctaccgccaccacatgcgccacggcggccatcgccatggggagggattccatggcaaggaggagaagcagcagctggtgttcgagatgccagtcgagccggcgacccgcggcgaggagcgcagggaggaggaggagggggtggttctccccgtcgcggagccagatccggactcgcgccgccagtatgccgccgtagccgccgccgaggaggaagacgaggatgagatggcgaggctccaccacggccgccgctcccaccaccaccatcatcgccaccaccatcatcaccacgacgagaacgaggaggacgagcacgagcaggccgacgaggcttcgcccgccgtggagcggttgatcagcttccaccgccgccgccaccaccaccaccaccacgaagacgaccacgagcagcgcgaggagggtgcgcccatgaagcggttccgccaccaccacgaggaggaggaggagtccgagatgaggaccaagcgcttccaccaccaccaccacaaggacgacgacgagcgcgagctggaggagatggcgaggcggtggatcaggaaggcgctgatgagcagcaggatgcaccaccaccgcggctgccgcttccaccaccaccaccaccacctcagcttccgccaccgcgcggaggacgccgccgccgccggcgaggaggaggagaaaggcggggtgatgagttggctcaaggactttgtgaaccgcttctaggtctctcgatcgatcagcctagcttgccgctgcttcttcttctccatcgtctgcttgtgttgttgtgtcgagttcattcatgattcatatggctgctgtgtattctacttttctacggccgtatatgtatttcgtataccgtatttgtgttgtggtact

SEQ ID NO: 25997 - DNA, 3142 bp, Oryza sativa
  ref <308>: DATABASE ACCESSION NUMBER: AK101439
  ref <309>: DATABASE ENTRY DATE: 2002-08-28
gacagctctgagaggcagacatggagaccctgagctctgtcactaatatcgtcgtggggaagctcttcgcgctactggagaagaagtacgagcagtggaggggcctggaggacagcatcggtttcatcaagcgggagctccgcgtgatccatggcttcctgcacgaccagctcccgcgggatcggaatggggaggatccgccgatcagcgccgtgcaggccacatgcatcgacgagctccgggatctggcgcacgacatcgaggactgcctcgaccgcttcctgccctgcgccgcgtgcgagcgcgattcgtcgttcctccgccgcctcgcggcggactctcggttcgccggcgaggtcgagaggctcaagtcgcggctggaggaggcgcacgagcggagggctaactacggcgtcaacggcgtcgccggctccgccgccgcagctggcggatcaagctcaggctcagcaaatacgacggattacatggcccagagctgtggccttgtgggcatcaacgtgcccaggcaagagcttcttgacctgctcctgctcgaggacgtggagggccggccggagcggatgcgcgtgatctccatcgtgggattcggaggctcggggaagacgacgctcgcgagggcagtgtacgactgccccgacatcgccggccagttcgacggccgcgcctgggtcgtggcgtccaagcacagagatgataccatggggctcctgtcggcgttactcggccaaattcgtcaggaagatgaccaaagattcaatcaaattcctcaggatgatgagcaaagattccagctacagtcccaagtccaagctgatatcaggcaacacctgaatgctaagaggtaccttctcgtgtttgatgatattgaggagaagcagtggaactgtataaaatcaaccttccctacagaaacaagaagcagagtactagtgacaacgactattaaaccagttgcaaatgcctgcagccatggtaccggttctgtgtacaatatgagaactctgaatgtgaaccattccaaggatttgctgcaatctgtcctaaaggaatactctcctgagttggagttggacttgccatcgattctggagaaatgcgacggcctcccgcttgctctggttagtgtgggaaactttctatggcgagaaaggatcactgaatgttaccgaaatcaagtctgctgcaacctaggtcatcacattgagaaggagcacgcctttgcagaactgcgacaagttcttgcgaacaactacaacactctgcctggccatcccctcaagacctgcttactgtacacgactgtgttccccaatggctgttccatcagaaggagcagtctgatcaggcgatggttagctgaaggctatgtacaatgccaatatcctcgcagttcactggaggttgcagatgcaaacttggaggagctaatggaccgaaatatcatcaggtcgatggatgttaccaacaatggaagggcgaagaactgcagggctcacggtatcatgcacgaattcatgctgcacaagtccaggtgtgataatttcattgcatccctccatgacccagatcgaagcaaatgccgccacctcttcttaacccagagccttacaagtggaaatcaatcatacatggattgtggaactaatccaaagggtaagcaacctcgtgccaggtctctgacgatctttggaaatgcaggggaatttgctttagattatgccaagtgtgagctgttgagggtcttggatctagaagaatgtgatgatctcaaggacgatcatgtcaagtacatatacaagctgttgcatctaaaataccttggccttgggagcaccattacatatattccgagaaaaatcaataaagggctgcattgcttacagacactcgacctgaggaagacaaggataaacacattgcctgtggaaatcattataatgccacatctagctcacctgtttggaaagattaagattagggaagcaaggggcctttgggtccttgaaacgaataaaatagagaagatattatcagataaaagtaaattgcaaactctagcaggttttgttgtagacaagaactctttgtttcctcgcctgatggttcatatgaataaactaagaaaggtcaagatatggtgcgagcccgcagctgaacgtaatagcagtatcagcttaatttcagcggctattcagaagtttactcaggctggcatggacactactggtgctcattctctgtcacttcgatccagaaaatttcctaaccgtctactgtgttgtctggagaagtcgtatggttatctcagctccttgaaactgcagggcgagttgagccggtttccacagttcatcacatcactgtgtggtctcacagagctgtgcctttcatcaacaaatctgaataaggaggatctatcaaacgtttgcacattgcaccacttgctttatctgaaactggttgaatctgaccttcagggctttatcataaaaaatggtgacttcccacgtatgcgacacttatgccttgtggtgcaaaatcccaatctccctacagttgaaaaaggagctttgccacatctcctgtcactccaattgctctgcaaggatctagttggtctttctgaaatcaagattgagtaccatgattaccttgaggaagttgctcttgattctatggtcaatatagaaacaatagaaatttgggaaaatgaagctaagaagcacccaaatagacccaaggttctgttccgcaagagggttgatccaaccgatgctcagtccacagcgaagtatgctgcaacagaaagaccagtacctgagacaggatgccctgcggtgataaaaaaaacggaaattccatgctatccaatcatattataacgagtctgttgaaacaaaaaagagtttaagatgctgctctggcgtttaactgaggtgccaaatgctggcaatggtttgtagattcttctttaggtaagaatctaaatccttgaggcagaaactggttggttgatgttgtggagtgagacccatgtagcaaaatgttaaaatgaaaggtcatggaaacttatgatatatagttcctattacatatcaatatcatgtttctttcttattct

SEQ ID NO: 25998 - DNA, 2639 bp, Oryza sativa
  ref <308>: DATABASE ACCESSION NUMBER: AK101440
  ref <309>: DATABASE ENTRY DATE: 2002-08-28
gcaatccctctgctcactaccgtcgcgctcgcttatattgcgggagttggcgacgaaaaccaccgagcacccgtcggcgcagcagcggcggagcgaagggaagggaagggaagccgcgatccagccgccgtcgactcgccgcccacgcagtcgccgccgagccccatctccgccactgctcgttgtgatatgcgccatgggtgtcaagactttacaggtatcagggtttgctctggatgacagtgctgattacgtcaaggatttgttggagcgaattgttggctgtgggaatgtgtatgcagtaaagctcaggcatccaaagaacgtcactgctacctcaagagcatatgctatagttcagtttcagaccgaggaacatgcttcacttgtaaaaaatgcggctcaaagaaagatactccgccgtgggcattattatctgaaagtccatccttcagatcgtgacattgttccaagaccaagagtttcaatgttcaagctagaggatgtaacactgcattttggttgcctgcttaaggaaacaattttatctgctctgtggagtcgaaaaggagtttctgttgagtttggtttcaatctgaaaaagatttacttttacctgcagctacccaacagctcaatcgaatataaacttgaactttcccatgagagcatatgggagatccagcttcaacgcccacccaagtcacaaacgaagtttcttttgatccaggttcaagctgcacctaagatttatgaacagacaccacgccgttctggtgttatgtacgaagatccattattcaactattttagggatcatacagatgatcaatggaccaggacaacggattttacttcatcttctagcattgggcaatcatatattttatgtcttgaggtaccacgtcgatgtgatctcccaaacattcgtgactacttcttttactatcatgagtacaatcatgacttcgagtgccggagtggggggtatccatattcaagtgatactcgctttgttccgattgtgaaatctcgtggttatgtcccctatgagatactcttcaagatcaaccatttggttcagaatgggacacttaacggaccgacagttgatgacagcttctttcgtctggtcagcccagcttttgtacctattgaccatataaagcgtgcacttgaaatgatgtcatatttgaaaaagacctgcttgaatccaacaagttggctatctgaacaatactcaaaattccggagatcacgctacgtccaaccatcacctaacatatctctggatgatggattggtttatgtctacagtgtatttttatggacctgagattaatgtctccaatcgtgtggtgcggaatttttcttctgacatagagaatttccttcgcatttcatttgttgacgaggactgcgagaagctccgtgcaactgatttatccccccgttctgcttcaggacatgatgcaaacagaactgctctgtataagagagttctgtcagtcctttcagatggcatcactattggtggcaagaactttgagtttcttgctttttcttcaagccagctccgagataactctgcatggatgtttgcttctcgccagggattagctgctagcgacattaggacatggatgggggatttccgtaacatcagaaatgtagcaaaatatgctgcaagacttggtcagtcttttagttcctcaaccgaaacattaaaggttcagaagtatgaggtggaagaaatctcagatataaaaaatggtacacagcatgtgttctctgatgggattggaaagatatcatctgcttttgctaatgaagtggccatgaagtgcaacctgaaacgctttgctccttctgcttttcaaataaggtatggtggttataaaggtgttgttgctgttgaccctacatcacgctggaagctttccttaagaaaaagcatgctaaagtttcagtcagacaatatcacagtagatgtccttgcatacagcaagtaccagccaggcttccttaatcggcagctaattactcttctttcgacacttggagttagagatagtgtctttgaacagaagcaagaagaagcagtgaatcagttgaacaaaatggttactgatcctcaagctgctatcgaagcaattgaacttatgcccatgggagaaataacaaatgcagttaaagagctgttgttgtgtggctaccagcctgatgatgaaccatatctttctatgctgctacaaacttttagggcatccaaattactagagctgaaaaccaagtcaaggatattaatcccaaaaggacgagcaatgatgggatgcttggatgaaacacgtacgctgaagtatgggcaagtgttcattcgagctacttcgggtgtaaatgacaatgacaggttcaccgtgacaggaaaagttgtgattgccaaaaacccttgcctccacccaggtgatatacggattctccatgctgttgatgttcctgttttgcaccacatgtttaactgtgtcgtctttccacagcaaggaccaaggccgcatcctaatgagtgttcagggagtgatcttgacggggacatatattttgtttcttgggacccatctctcattccgcctcgtatggtg

SEQ ID NO: 25999 - DNA, 1635 bp, Oryza sativa
  ref <308>: DATABASE ACCESSION NUMBER: AK101441
  ref <309>: DATABASE ENTRY DATE: 2002-08-28
gcttttctcgccttcttcagtccgcggcgttgttccagaagcttctggaaagtcggggaaacccccatggcgtccggcgatccggtggacgcgccggcggcggcggcggagtcgatggaggtggaggcggaccagtgcctcgacctgacgagctgccagctgcacgatctgagcgaggtggagatcccgcccaccctggaggagctcgaactcacggcgaaccgcctcgccgccgtcgacccccgcatcggccgcctcccgggcctccgcaagctctccttccgccagaacctcctcgacgacgccgccgtcgcgcccctctccacctgggccgacatcgctgggctgcaggagttggtctttagagataacaaacttacaacgattcctgatgccagcatcttcaaaggccttctggtctttgatgtatctttcaatgagatatcttccttaaaggggctgtccaaggtttccagcacactgaaggaactctatgtttcaaagaatgaagttgcaaagatggaggaactcgaacactttcatgcattacaaattcttgaacttggtagcaacagattgagggtgatggaaaatctagaaaccttggcaaatctgcaggagctatggctgggaagaaatcgaataaagacaatcaacctatgtagtttgaaagcaataaaaaaattaagcttgcaaagcaacagactgacttcaatgaatgggttacaagaatgtattgcactagaggaactatacctcagtcataatggaatacaaaagatggagggtctctctaccttgcagaaccttcgtgttttagatgtttcatccaacaagctaactgctatcgaagatgttgaaaccttaagcaggttggaggacttgtggttgaatgacaaccaaataccatcactagatgggatagaatctgctttggctagttcacgggagaagctgactaccatatatcttgagcggaatccttgcgcaaaagctccaaactattcatccacgttgaagacaatatttccaaatcttgagcaactcgattcagatatgctagcatgaaactgatgtccttctgtgaagatagggaagacactcctggagtagctctactagcgttgttttttctaacaatcaaagcgtgagaagccttccagttcaagaacaagtaataataaaccatggatgaagcaatgcaacattattgtgctcaatatctaaattgcttcacctttttttcctgctccatgttctgatgctgttactggatggatcatcgtgggcttgtctttgtcaaactatactcccatatacagagatcaaggaaggtgagttagagaggtagagcgtgtgggactgaatgataaaccaataaaacctagcgaactgatgtttttgacagatgatgttgcatttgactattctgtcacaggatgttgcatttgatattacctgtactatgttgacatgtatgctattgcatttgctgtagatgtctgagattgattcaagtttatgaaagcagcacacatttgaatgtttatggcttaacttataagcatgtgcaaccgttccggttattctggttgctgtcatatgcagtaaagttttattcatgatgaatctatc

SEQ ID NO: 26000 - DNA, 2991 bp, Oryza sativa
  ref <308>: DATABASE ACCESSION NUMBER: AK101442
  ref <309>: DATABASE ENTRY DATE: 2002-08-28
tgggtacagagcagaggaggggggagagagagagagagagagagagagagagagtcgtgtgtgcgtgtgtccccggggttctagctttgggatgctgatggcgaccgtctcgccggcgcggagggagccgacgccgcaggcggtgcgggcgtccccgatgccatcggcggcggcggcgttggtgaggagaggcggtggtggtagcggggggacggtgctggggaagtacgagctggggcgcgtcctgggacagggctcgttcgcgaaggtgtaccaggcgaggcacctggagaccgacgagtgcgtggcaatcaaggtgctcgacaaggagaaggccgtgaagggcgggatggtccacctcgtcaagcgcgagatcaacgtgctccgccgggtgcgccacccgaacatcgtgcagctgttcgaggtaatggccagcaagaccaagatctacttcgtcatggagtatgtccgcggcggcgagctcttctcccgcgtctccaagggacgcctcagggaggacaccgcgcggcgctacttccagcagcttgtctccgccgtcgacttctgccacgcccgcggcgtgttccaccgtgacctcaagcccgagaacctcctcgtggatgagaacggggacttgaaggtctcggacttcggcctcgccgccggccccgaccagttcgaccccgacggtctgctccacacgttctgcggcacgccggcctacgtcgcccccgaggtgctcaggcgccgcggatacgacggcgccaaggcggacatatggtcatgcggtgtcatcctctttgcgctcatggccgggtacctccctttccatgaccacaacatcatggttctgtaccggaagatctacaatggggagttcaggtgtccaaggtggttctccaaggattttactagattgataacgcgccttcttgacgcaaaccccaaaactaggatcaccgtgccagagatcattgagagcgattggttcaagaaaggatacaagccagtcaagttttacattgaggatgacaagctctacaacctgtctgatgacgtgctgaacttggagcctgctgatcctgttcccccaccattgggtttggcacctcctgttcctccacctccacaaggggatgatcctgatggttcagggtctgagtcagattcatcagtcgtatcctgcccggccacattgtcaactggggagagccagagagtccgtgggtcactaccacgcccagcaagccttaatgcatttgatatcatatcattctcaaaaggattcaacttgtctgggctgtttgaggagagggggaacgagatcaggtttgtatctggtgagcccatgtctgacattgtaaaaaagctggaggagattgcaaaggtcaagagcttcacagtgcggaggaaggactggcgggtgagcatagagggtacacgcgaaggagttaaggggcctctaaccataggcgcggagatatttgagcttacaccctcccttgtagtagtggaagtaaaaagaaaggcaggtgataatgaagagtatgaggatttctgcaacatggagttgaagccaggaatgcagcaccttgtgcaccagatgctcccagctccaaatggaactcctgtgagtgagaaggttgaaaggtcttcaagcttacaggctcccctcaccctgaagttgataggaacagaaggcagcatgagctagagacaggagcttccatgcagttgacagggagatctcttttaccggaccaaacctgaccggtctggttcccgttgatgagctcgtggttttgataactagcaagagttctctttctctggatggcctaagatcgtttttaggcaatggatcgagacagtggatgtagatactccggttgtggatggtgcccaggtgggcgtttaaagtggatgtagataccctggttgtggtggtgcccaggtgggcgtttaaagtggattgtactggccagttttctctcgacttagcggctgtgtgcatctgcggtttggtttctttggcagcatcgaataattttgtggtaaccatgattctggtcgggggacagttgattgaggtatgggagggatatgcatgagccgggcatgtgccgaccgattggattccgaatcttccattcctgatgccattagcccattattggatgcgaggtgacagatttgggcactgcagtgcggttggttggttggggcctgtggggactgggggtcgagattacttggacctgctgtgctgcagcggctttggctgaggtcaccgagcacgtgagagcatcggtgggtggcatggttggcctaccccggcagtggtggcggccggctcgggccacgagagcgccgcgccgtttgtggtggcgcacggctctgcagtcggcggcgggcccgttgttgcgcatttccgtgataaagatcaccgtggtatgtcgtattctgttatacaatgctctttttgtggattcgaacttcgaatatggagttatggacacgggtggtcatcgatggagacaacagtggcgaaccggcgatttcatatggctcagtgagatgctttaaggtacataacaatttgaggtatgcattcatttaatcatgacatggcatgattaaccttggatttgtgtgaaagctatcactataacgacctgtactcttggtgatattccccaccgtgccaatttcctggtatctacactcctcaacggatatgtcgtggaaatgcagcatttctaacccaacagatacagggatcatatttcatcctacaaagattatgtgaaagagatcagcataataatggaaatacgcttaaaaagtaaaatcatgaaaattccatgtgatagttaggatcgacaatgacaatgattataatcatatcacaatataagatatagcctattgtaatataagaatttgatgctctgttttataatgttactacctctttacttcttgtttttg

SEQ ID NO: 26001 - DNA, 1126 bp, Oryza sativa
  ref <308>: DATABASE ACCESSION NUMBER: AK101443
  ref <309>: DATABASE ENTRY DATE: 2002-08-28
gaccagagaggaagtcgagcagttcacccgtccccactttccccttccccctcccgcgcgcgatggcgtccgccgccgacgagggcaacgcggcggcgcccagggccgccgtctcgcacgtcatcttcgacatggacggcctcctgctcgacacggaggggttctacacggaggtgcaggagaagatcctggcgaggtacggcaaggtgttcgactggtcgctcaaggccaagatgatgggcaagaaggccaccgagtcggcgcgcatcttcgtcgacgagtgcggcctcgacggcctcctcaccccggagcagttcctcgaggagcgcgagagcatgctccaggagctcttcccctcctgcgccgtcttgcctggagtgctacgtttgatccatcatctccatgcaaatggagtaccaatggctgttgcaacaggatcccacaaacgtcattttgccctgaagacgcagaaccacaaggaaatgtttacactgatgcaccatgttgtgatgggggatgatccagatgtgaagactggcaagccatctcctgatatatttcttgccgctatgaggaggtttgagggcaatatagaaccaagtaactgcttggtatttgaagacgcaccttctggtgttgccgcagcaaaaaatgctggaatgtatgcggtgatggtcccagattcgaggttggatgtttcatatcacaaaggagctgaccaagttctcagttccctgctggatttcaaacctggtgaatggggcttgccaccttttacagattagacaaaaaagtttgaagattgggaagttcccatgaacaaataaggatgtcgaatggaaactttagaagaatggattttttggtaaagaaaaaggagaaaaactctggccttcataggcaggcaggcagccctatttcttgatcagcccattcgtaaaatttagagaaatttatcgccctacttatatgaaattttataactatatactatttagcaagaaagattgttaggcttagtgacaagcaaaactatgagcattcttgctgcctactattttgtggcagcgaactacgacatacttcctttcaataaaaagaatctccatagcttggtgtgttcttg

SEQ ID NO: 26002 - DNA, 801 bp, Oryza sativa
  ref <308>: DATABASE ACCESSION NUMBER: AK101444
  ref <309>: DATABASE ENTRY DATE: 2002-08-28
ggggagacccagcgagggaggagaggaggattccgagcgctgcagccagccatggcgaagcaaggggtgaagaagacgagggacgcgaacaagaagcggatggacctcatcctgcgcctaatcctcgcggccaacgttatttacatagtagtgagaatggctgtaatgcattcgtctttcacctggaagcattggattggtcttgctgtgacatctgctgcatattttctgccgtacaagcaacttgccaatatgtcagagccagaatactctgagaatggagagttaattaatgctggttatgacttgaacgctggtggaatgtccgaatatttacaagatgtgatatatatcactctctttgtgcagctgatgtctattttttctgataaattttggtggacatatttggtgattccagcttatggtggatacaagatttccggtctgttgagaggagcatttttcggtggtagttcagagggcgaagaagaggatgagaagacccgaaagaaaagggagaagatggagaagaaggcatctagggggaagattatcaaaaccaggactcgttgatggcacatgtagtgtatcggggctcgttgatggctcatgtgtattattgtttgaagggtaggtttgctttacatggctgtccaactgaaatgtaagctgtcgggcagaattgtttcatgaattattcgatcatttgccccagcagcttagtagtagcacaaatttgaactaatcctcttaacttatcgataccagcattatcaatgagcagctctcttttgggtt

SEQ ID NO: 26003 - DNA, 530 bp, Oryza sativa
  ref <308>: DATABASE ACCESSION NUMBER: AK101445
  ref <309>: DATABASE ENTRY DATE: 2002-08-28
ggatcgacctcatgcctcttccccttccaatcgatctcatctcgacgcctcccgctcccggtaacggcgccggcgagccaacgacagggatcccagcctacggcgtgacgcggagcgcgcactggaggacgacgtggagcgcgaccgcgccgaggccgcagacgaggagggcgagcaggacgatggcattggtgttgaacgacacggtgactggaccgccgccgccatggccgttctcggcggccagcagagcgcgcttatcggtcgtcgccatggccggcagtggtgagcaagctacagtgtaatgtttgttcaatttattttcctgaacgtgtggttgctgatttgtagtgcgaactgtgcattcatggtgttcgatgaaatgaccaagaaagaatatatcttgttctttcttagagttgcatttgatagcacagttaggactattttgttggatagtgtattaattgctctattgctactatactacttctgcagaaatccaggagaaacacacaactagaaattgc

SEQ ID NO: 26004 - DNA, 1523 bp, Oryza sativa
  ref <308>: DATABASE ACCESSION NUMBER: AK101446
  ref <309>: DATABASE ENTRY DATE: 2002-08-28
gggagaaaaaaagaaaataaaaataaaggcgaggaggtctcgcgagctaccaaaccctagggctcgattcggtggcggtggggagggggctggatcggcgggatcgcgcgggcggcggcggcggcggggaggggatgacgataccgagcgccgaggggttcctccacgccgcgagctgcctcccgtgcacggcggaggaggagcgggacctcgtcgtcgcgctcaccagggaggccgaggagaatgtcaaggacggcgatctccgctacctcgtctcccacagctggtggcttaactggcaaagctatgtgggcttaatcaaacctgatgagaatgatgctgacatgcttcctcaagctccaagtagaccaggagagatagataactcaaagctagtttcagaggaaagcagcagtattggtgatgagccagagcttcaaagaaccctgagggaaggagatgactacgctttggtgccccaggaagtatggaggaagctacatgaatggtacaaaggtggaccagaactctcaagaagagtaatttgtagtagtccaacttccagaagttacattgtggatgtctatcccctccgtctgaaattatttgatggaagagacagcttggagagaattatcaaaattagtagaaaggccaaagttagtgagctctatagcttggtttgctcacttttgtccgtcgaacagtctaagatcgacatctgggatttttaccaaagacaaagggaaaaaaactgataaatcttaatgagacggttgaggaagctcaactgatgatggaccaggagattatcatagaggcaaaggcagatgatgcttggtgttcggatcttggtacaagatcaaataatgaactagcattaattccgttggaaccctcaacatcatcgttttcaattgctggaggtcctgcattttcaaatggtttttcatctggatttggttccagtttttccaagataatagctttagtcctttattaagggacgcagaagatggttatagtttctccaatggcacaaaggatgatatccatggactgagtggtttacataacttgggaaatacatgtttcatgaacagtgctatacaatccttggtgcatacacctccattggtggagtactttttacaggattacagtcgggagataaatacagaaaatccacttgggctacagggtgaacttgcaacagcatttggagaattactgagaaaactttggtcagctggtcgaacttctatagctccacgtccattcaagacaaaactttctcgttttgctccacagttcagtggatacaatcaacatgattctcaggttgctccgaatgtttctcctaaacacttcttataaatgtctgttaaatggtgctgacactgagttttgcacctttgttctgttttgtaacttccattaattagtcgtacattataaacgtatttcttactttaagataacatgctgttgtgtcccagaactatgaagttaattttcatttc

SEQ ID NO: 26005 - DNA, 1285 bp, Oryza sativa
  ref <308>: DATABASE ACCESSION NUMBER: AK101447
  ref <309>: DATABASE ENTRY DATE: 2002-08-28
ggctatcgcagcaatccaaaatccccaacccaacccaacccaacccaaccgcactatcacgccactcttcgcccgcccgcccgccgccggaatcgccatcgcccgaccgccgccgcgttcgtgtccccacaggcggcttctctccctgcatcaccatgggttctgacttcaaggcaatccccttgatcgacattagtccccttgtcggaaagattgatgatccgagcatggtcaatgacgaggatttgctgcaagttgtgcaaatgttggacgatgcctgcagggaggctggattcttttatgtgaaaggccatgggattgctgactcgctaatgaagcaagttagggatgtgacacagaagttctttcagcttccttatgaggaaaaactcaagattaaaatgacacctcagagtggatacagagggtaccaaagagttggtgaaaatattaccaagggtaaacctgacatgcatgaagcaattgattgctacacgcctattgaacctggtaaatatggagaccttgctaaaccaatggtaggatctaatttgtggcccaaatatccatcaaattttgatgtactgctggaaaactatatcagccttctaagagatctttcaagaaagatcatgcgaggtatagccttggcgttgggtgcgccagttgatgcttttgaaggtacaaccgcaggagatcctttttgggtttgcaggctgatcggttatcctgtatcaactgatattccagaagagcagcgcactgatactgggtgtggagctcacacagactatggtcttctgacattggttaatcaggatgatgacatatgcgcccttgaggtcagaaaccgatcaggtgaatggatatatgccaaaccaatcccaggaaccttcgtctgcaacatcggtgacatgctgaaggtttggtcaaacggaatatatcagccaacacttcatcgagttgttaacaactcccctcgctaccgtgtatctgttgcattcttctatgagtcaaacttcgatgctgccgtagagcctgttgagttctgccgggagagaacaggtggtgttgccaagtatgaaaaggttgtgtacggagaacacttggttcagaaagtcttgacaaacttcgtcatgtaaaatttgtggaaaagaacatgcattgtactccaatgtctgatcgcaacattcgtcactaaaataaaatcatttgtaaatttgtcatagcacagtagaacagtcatattgaagaatggaatgcatccttaattgaaatcacaagc

SEQ ID NO: 26006 - DNA, 1554 bp, Oryza sativa
  ref <308>: DATABASE ACCESSION NUMBER: AK101448
  ref <309>: DATABASE ENTRY DATE: 2002-08-28
ggaacactccggactcctccgccgccgcgtcccccgtctctctcgacgacgcctcgactgacgagaggaggagacctctccctcccataaaagggggaggacgagggcgaggaagaggaggaggcttgtgctgcttcgtcttttcccgccgccgcgcaccgacgcctgaaccaactgtctcgccgtgaaccctcgccggagttggtagaggaggagatggccaaggacggaggagggcccgactggaacggcctgctcaagtggagcctcgcccatggcgacggcaccgccaagccgcgctcgctcagtggggaggacaagaaatggtttatggaggcaatgcaagctaatacaatggatgttgttaagaggatgaaggagatcacccaagtgatgaaaactccagatgatgtactacagtctcaaggtgtgactccagagaacatcgaagatatgttggatgagttacaggagcatgttgaatccattgacatggcaaatgatctgcactctattggtggattagatcccctacttggttacttgaaaaattcacatgctggcatcagagcaaaggctgcagaggttgtgagcacgattgtgcaaaataaccccaagagccagcaacttgtcatggaatctaatggcctggagccactgttgacaaacttcagttccgatgcaagcacgaattcacgcacaaaagctcttggagcaatatcatctctaattcgtcataaccagccaggagttgctgcattccgcctgggaaatggctactctgcactgagagacgctcttggttctgatgatgctagacttcagaggaaagctctccatctcctacagtacctactgcacgacaacaaggctgataggagtgttgctacagagcttggtcttccaaagctgatgatgcacctggcatcgagtgatgattctggagtccgggaggctgccttaggtggtcttctcgagctggcgcgggacaatacatccggtgctggaaacgtgctacctgaccaagacaagctgaaagatgtccttaagagccgaatcgaaggcatcagcacaatggatgccgacgatctctccgcacatcgtgaggagcgacagcttgtggactccctctggaaggagtgttacaacgagccgtcgtctctcagggagaagggtcttgttgtgcttcctggagaggatgcacctcaacagccaccaccggatgtcgttggcagcatgtttgagccgccgcttcgcgcttgggcagcatcaaggccacctcccaaagaagattcagagtctgagagcgccaagaaggatccaccattgctgctaggccctggaccgtcttcctagacttgttgggattgcttagtttttcgcttatgcaattctctagacttaaccttaaaaagatcctacatatttgcaatctgctgaaattctctgcattttaatcctgtcctgagctcttggatgtattgaggtttttggatatctgtaatctgtgatgctattaaaatacgaagatgaaagatacttatctcttccacg

SEQ ID NO: 26007 - DNA, 1905 bp, Oryza sativa
  ref <308>: DATABASE ACCESSION NUMBER: AK101449
  ref <309>: DATABASE ENTRY DATE: 2002-08-28
gagagctctactactcttcttcttccgcagcggcagccgcctccgcctccggccccgcgctcgctggctagggttagggtttagcctctccccctccccctattcctttcgatggatgcggcgcacaagcgcaagcggccggacgccgacgacgacggcgctgcgggggcggtggacctctcctccctggagggcgccgacgacgtggaggtgctcgacctcagcgccgccaagcgcctcctgctcgccttcgagcgccgcctgcgcgacaacctcgaggcccgcatgaagcaccccgacgaccccgcccgcttcgccgactccgagatcgccctccacgccgagaccgaccgcctccgcctcctcgccggcgccccggacctcttcccggacctcgtccccctcggcctcgcctcctccctctcctccctcctcacccacgacaacgccgacctcgccgccgccgctgcctccctcctcgccgacctcaccgactccgacgaccccgacgacctcgccggcctccactccctcgccgacgccctcgtcgaagccaacgccctcgacctcctcgtccgcaatctctcccgcttctccgaggccgaccccgacgaagccgaggctgtccaccaccctctctgtcgttgaaaacctcctcgagctccgcccccaactcgccgacattgtctgcgaccgcaccaagcttctccgctggctcctcgcccgcctcaaggcccgcgagttcgatgccaacaagcagtacgcctccgagatcctcgccatcctcctacaggacagccccgccaaccagaagcgcctgggcaacatcaatggagtcgacggcctgctgcaggccgttgccatgtacaagtccagggacccaaagacctctgatgaggaggagatgctcgagaacctcttcgattgcctctgctgtgtgctcatgcccatggagaacaaggaaagatttgtcaaggcggagggcgtcgagctcatgatcatcatcatgaagcagaagaagctggcatacagctctgccatccggaccctcgattttgccatgactaggttcccacctgcttgcgagcgctttgttgatgtacttgggctgaagaccgcttttgctgcgttcatgggtaagattcctgtgaacaagaaaaacaaaaaagagagttatcaggaagcactagaagaacgggtcatttcactaattgcttcattgtttggtggtattacaaaaggttcacgaagaatcaggttactaggaaaatttgttgagaatgaatgtgaaaagatagaccgtttgatggagttttacacaaggtattcagaaagagtgaaagctgagactgaaagacttgacagtcttgatttagatgatctagagatggatgaagatgagcgctacaatcgcaagctagaagctggtctttacacacttcagttaattgcacttattctggggcatatatggcactctggcaattcacagatgagaacaagaatagagttgcttctaagacagaacaaactgactaaggatgacgttaaggatatacttgaggagtatcatgacaacattggagatctggatgggcctgaagagaaggaaagagcgcaagggcggacaaaagagatcatagcatctttatctttgtgatgcgtactctattttgcgtcatcaccagtccaccaccctgtaaccaaaaccaatggtgttgtagctcctctcatcttgacaagacggactatcatatgatgacttgtgcgtagcgttggttgcgttgcagggtattctttttgtaaactagtaatataactagctgggtggcccgcgcaattgcgcggctagcattcatacataattatcggtttttttacatataatattacttaaaatttgct

SEQ ID NO: 26008 - DNA, 1896 bp, Oryza sativa
  ref <308>: DATABASE ACCESSION NUMBER: AK101450
  ref <309>: DATABASE ENTRY DATE: 2002-08-28
gactcccctctcctcccgcctcgccgccgcaaccaccgccgcctcgccgcagcatcacccgcagccgccgccgccgccgccatggactccgtcgcgtcgtgggggctgaccccgctcgccgcggccgacccgctcgtccacgacctcctcgagcgggagaagcggcggcagcggagcggcatcgagctcatcgcctcggagaacttcacctccttcgccgtcatggaggccctcggctccgcgctcaccaacaagtactccgaggggatgcccggggcgcgctactacggcgggaacgacgtcatcgacgagatcgagaacctgtgccgcgaccgcgccctcgccgcgttccgcctcgacgccgcgtcgtggggcgtcaacgtgcagccctactccggctcgccggccaacttcgccgcctacacggcgctcctcaacccgcacgaccgcatcatggggctcgacctcccctccggtggccacctcacccatggctactacaccgcgggcgggaagaagatctccgcgacgtcgatctacttcgagagcctcccctacaaggtgagcgccgccacggggtacatcgactacgagaagctggaggagaaggcgctcgacttccgccccaagctcatcatctgcggcggcagcgcgtacccgagggactgggactacgccaagctcagggccgtcgccgacaaggtcggggcgctgctcctctgcgacatggcgcacatcagcggcctcgtcgccgcgcaggaagctgcaaatccttttgagtactgtgatgtggttaccaccaccacgcacaagtccctccgaggaccaagagctggcatgatcttctacaggaagggccctaagcctcccaagaagggccagcctgagggtgctgtctatgactacgaggacaagatcaacttcgcagtgttcccgtcactgcaaggtggtcctcacaaccaccagattgcagcccttgctgttgctctgcagcaaaccatgacacctggattcaaggcctacgcaaagcaggtcaaggccaacgctgtcgccattggcaagtatcttatgagcaagggctacaaaatggtgactgatggaactgagaaccaccttgttctctgggatcttcgccctcttggcttgactggcaacaaggttgagaagatgtgtgacctttgcagcattacacttaacaagaatgctgtctttggtgacagcagtgcattggctcctggcggtgtccgcattggtactcctgcgatgacatccaggggtcttgtcgagaaggactttgagcagatcggcgagttcctccaccaggccgtgaccatctgcctcaacatccagaaggagcacggcaagctcctcaaggacttctccaagggcctggtgaacaacaaggacatcgagaacctcaagctggaggtcgagaagttcgccacctccttcgacatgcccggcttcaccctcgacagcatgaagtacaaggagtaggaaaacaaaaacacacaaaccatggtcctaccgccgctaatcgtcgaccagctgtgctctcgtggaccgccgtcgtcgtcatcttcttcctcggcacaagctggccctgtgttacggattttgtctgcccatcgagatgataggtttcataaaacgctctctcccccaccctgctgctgcctctggtttggttgccaacctcatcccccatcggtttttttcctcctcttgtttctaatttctaggagctgtgccttttggaatcatggaatgtcaagtatttgccaataatcaatccgtttgatttctgcctaccttgtgttttctgtgggattgctaaactatcaaactgtgcgaagctacgaaaaaaagaaatgctggaatttttcagagttgggt

SEQ ID NO: 26009 - DNA, 3421 bp, Oryza sativa
  ref <308>: DATABASE ACCESSION NUMBER: AK101451
  ref <309>: DATABASE ENTRY DATE: 2002-08-28
gccccgtctctcttccccgtgttcctcctccaccgctgtagctgtacccctcctcctcctcctcctctcctcgatccgcacgcaccgccatctccgatccgcagcagcagcagcagcagcagccgcgaggccccggagccacgcgcatctcgctcgccgccggcgagaaggccccggtaaccggtgggccgcagagggggaaaaggttttggagggagcgacgccgcgtgcgtccccgtctcggctgggaccgaaccggaggtgtgccatttttggaggctatcgatgggtctggacaacaatttcggggagctatctggcatgttctgtggcttgtcctatgatggctacacggatcacggcagccagagcgattacttcaggttcgccgacccgcagccggcgatcgtgccccagatggacgccggacccagctccgccgcttcctccacggcgtcgagggccgccgtcagctcggggaccgacaacccagaggactgggagttcatctcggacgagtcgctcaactatatcagccgcatgctcatggaggaggacattgatgagaaggtcagcatgtaccaggaggagtccgcggcgctccgcgctgctgtgaagccattctatgacattcttgggcacaagttcccgccctcccctgaccgccagctggtagcttggcccctcgacagcccgagtgagagtagcactagcagctatccacactccttggctagttctgttactagcagcaacattagtggtgcggtcgatagcagccaacgccgttatgttggacacagtgagtatcggagcttgtctggtcattcttctcaaccgccggttggcccatcaagtgatgttcgcaacgctatggagacactagaagatcctttgattagtaatggcaggatccctgagtatttgtttgagagctttccaacatgggatttcaggagaggtgttgacgaggcacagaagtttctcccgggtagcgataaggtagtgattgatttagaggctggtggtgttgcaaaacgtcaagaagcagggaaagctatttctctgaatgtcagcaaggcagaggttttgaaggtaaagaaaaacagacagagtgaagaccttgacgtgatggaaggacggaatagtaaacagtctgcattttgttctgatgaacctgattggattgagatgtttgatgttctgcttcgtcaaactgagaagaaggcaactgatcttcgaaaaatgatgcgttttgaggcttccaagaattctcaagttgctcagccaaaaggaccaagtgggacccgatcacggggacggaagccaactaagaaggatgtggtggaccttaggacgctactcatccactgtgctcaggcagtggcagctgatgaccgccggactgctaatgagttgttaaagcaaataaggcagcatgccaagccaaatggagatggctcccagagattggcgtattgctttgcagatggtcttgaggctcgcttggctggaacagggagccaactttaccataaacttgtggcaaaacggacaacagcctctgacatgctcaaggcataccatctttaccttgcagcatgcccattcaagaggctctcacattttctttcaaatcaaacaattttgagtttgacaaaaaatgcatcaaaggtgcatatcattgactttggcatttacttcggcttccaatggccgtgcctgattagacgtctcttcaagagggaaggtgggccaccaaagctgcgtatcacagggattgatgtacctcagccaggtttccgcccaactgagcgcatcgaagagacagggcagaggcttgcagaatatgctgagaagattggtgtcccttttgagtaccaaggcattgcatcaaagtgggaaacaatctgtgttgaggatctcaatattaagaaagatgaagtagtgattgttaattgcttgtatcggttcagaaatcttattgatgaaacagttgccatagacagtcctaggaatagggtgctcaataccataaggcaagtgaacccagcaatttttatccatggcattgtgaatgggtcgtacagcgttcccttcttcatcacacggttccgtgaggcattatttcatttctctgcattatttgacatgctcgagacaactgtgccacgggatgatgcccagcgtgcactaattgagagagatctatttggccgggaagcactcaatgtgattgcatgtgaaggctcagacagggtcgagagaccggagacatacaaacagtggcaagtgaggaatctgagagctggatttgtccagtctccattaaaccaagacattgtgctgaaagccaaggacaaagtgaaagacatctatcacaaagactttgtcattgatgaagacagtgaatggctccttcaagggtggaaaggaaggataatctatgccatatctacatggaagcctaataacaattagggtatggtctgtgagctgtgcctggttgcccgttagcactagcaattaacgaagaaaagtaccttgcattgggctacatgcgtatgtacagatcttcatgtgcacagacagtcctaaacgtccgatctgatgaatctaatggatgatatccattccatggtcctgccttccacagataacttaataacaatagtcgtctacactaatacctgataaattaattaccttaatggcctatattcctcctaatcctgctctggaccaaaaaaaatcccagcctcctgagaatactctgcagctgcatgggtgccaaagtccaatgcctgtaacatcataggcatgaattaatttgacttggatacaatggacatatatcagcacatctatgcattacgaccttctgatcctcatgaagccttggttttaaccgttgccgtacgagtgcttagtgcttgcccctgtttagcctttttatattttcccttttccagggatgtaatttacagtgaaagcttgggccttccacttcatttcaagatggatttctatggaaatactacagtgaaagattgaacagaagccgattgttgctttctcattttgttctcatgcaaaaccagggtcactcactggcagatgccaaaccttctcgattgtgtaaaattcgttctatacggagtataacccaccagggttatggaaatcgcggcctgacctagtgaaggaccgtgatgatctctttcaatgattcctccagcactatcagcttttaaagataaaatcagtagtgcctttttagtttcagtagtctctgttttagtaactttttatttcttttataggtttacaacatttcgatctgttttgttggggatatatgtggatgtgtacttttttttctttaaaaaaaaagaattttaggccacctcaatttaaagct

SEQ ID NO: 26010 - DNA, 2512 bp, Oryza sativa
  ref <308>: DATABASE ACCESSION NUMBER: AK101452
  ref <309>: DATABASE ENTRY DATE: 2002-08-28
ggctgagagctcactcacctctccaatacgcccaacccccacaaaaccctagcactcgaatcccaaatccccgaccccgcgccatggacgacgacgctggcgacggcgccgctagcggcgggacaaagaggaaggtcactgcggcgtcgtcgtcggcggcggcgaaggggaaggcggcggggaaagggaaggccgcctctaaggcgtcggcgttggccacggccaaggagagcagcctcctcaagcagaagtcgcctgctgaattcttcgcggagaacaagaacatcgcggggtttgacaatcctggaaagtcactgtacacaacgatgcgggagttagttgagaatgcccttgattcagccgagtccatctctgagctccctgacatagaaattataatagaagagatcacgaagagcaagttcaacacaatgatagggctagttgatcgacagcgtattgatgaagagctctatgatgactttgaatcggctaaggctcgtgagaaacgccttgccaaagaagcacgcttccaagaaacacaagccaaaaatgctgctcttgggaagaaggttaaggaggctccagctgctcgagggaaaggtcggggtgaggctgcattttttagggtgacttgcaaggataatggtcgaggtatgccacatgatgatatcccaaatatgcttggtagagtgttatcgggcacaaagtatggtttgaggcaaacacgtggaaaatttggtcttggtgctaaaatggcacttatatggtcaaagatgagcacaggccttcctattgagattaagtcatcaatgaaaggccagaattttatttcattttgtcttcttgatatcgatattcataagaatgtccctcatgttcatttacatgagaaaagggagaataaagatcgctggcatggggcggagcttcaagttataattgaggggaattggacaactcatcgttcaaagatactacattacatgcgtcagatggctgtcatcacaccatacgctcaattcctttttagatttctctcagactcacccgacaaaaatttgacaatacagtttgcacggaggacagatgttatgcctcctattcctcttcaaactaagcatcatccttctgctgttgatttactgctgataaagcgcttaatatcagagactacaaagcaaaaccttttgcagttcctccaacatgagtttgtgaatattagcaaatctcatgctgaacgtttgatcggggagatggggcctgatttcagtgcaaaaacgacagttaagagtcttacatcacagcaattagttcggatacatcagttaattcggcaggcaaaatttgatgatcccagtggcaattgtcttagtcctgcaggtgaatacaatttacgtctaggtatcataaaagagctgcaccctgatctagttgctacgcatgcaagcagcccacaggtttttgaaggtcatccattcatcgttgaagctggaataagtattggtggaaaagatgttaaacatggtctaaacatttttagatatgcgaaccgaatcccacttctctttgaacaaggtgctgatgtcatcacaagaactgctttaaaaagaatcaattggagcagctacaaaataaatcaacagcaggacaagattggtgtctttgttagcattgtaagtacaaagataccttttaaaggaactggaaaagagtacattggggatgacataaccgaaatagcatctgctgttcagtcagcccttaagcagtgttgtcttcaactgaagtcaaagatagtaaagaaactacaggctcgtgaacggcaggacaggaaaaggaacctaaacagatacattcctgatgttgcgagggcaattatggagactctgggagaaattgcagatgagtctcccccaaagaggccacgttatgataaggaagatgaggaactccttgagaaagtaaactctgaggaggtgacagagatgacctttagggattgcttaacacaacatgttgaacaggttgattatgaaatggcattggagtacgccatgcagagtggagtaagcgaggaacctcgtgaagcattatatttaaactcccttgaaggatcttacaagtttatcgatttccagagccctgtttttgtgttcagatttattccttgagagtgcaacttgcatgtccatctgttgctaggttgattaatatttacttcccataatcccattgtactgcggatgttttatgaaccttttgccgattcagcagtcatgaccgcaagtttgtaacttacacattatagatttttagagtagtttaggtccatgatatgtttgttgcattcatggagatttttatttttcaatttttctttaacatatgggagttcacttctacccattcaattttaggaataggaaacattagagagtgtgtttgctggtatgattataagttatactacataattatgtgttaaattgatttagatccaagatatgct

SEQ ID NO: 26011 - DNA, 3504 bp, Oryza sativa
  ref <308>: DATABASE ACCESSION NUMBER: AK101453
  ref <309>: DATABASE ENTRY DATE: 2002-08-28
gatcgaccccacccaccctctcccacttcccctctttctctctctcacctcgcgccgccgccgccgccgccgccggtgaggcgcggtgcgccgcgagggggatggacggcctcgacgacgagtgggacgacgacaagttcctcgccgagctcttccgcgcccaggacgaggccgtcgcctcccgcaaccctaaccccactccccctccccctcctcctcctcccgacctcatctcctacctcccgccgccctccacctcatcgtacccttcctcctccgccgccgccgccgcgcttccgctctcctacatcacccccgggccccatgtcttctccgccgcccctgttcacttcttgcctccccgcgagctctcccagcatccgcagggattcgacgtcgggctccgtgacttctcccctccgcgcgagctctcgcagcgcccggcggcggaggtgagcagccgcgagatcgtcgcggtgtcgtcgggcatcgccggtgctgatcgcttcagagggggcgggggcgggggcgcgcggagggagagggatgccagggaggcggctgatcggagggaggtcgagaggctcaagagggagctgaatcgtgtctcgaagcaaatgaacgacgtgaaaaacgaatgcagtgagctgaagaaagacaggacaaggaaagaccttgaaatcaaggctaaagaagcagagattcaaagtttgagaagggcaaatgtgggttctgctaacaaatatgccggcagtatggctatggatattgatcagtctgttcatgcccctgcaaatggggctttgcatactggggattcttgcttggcatccacgagaagagcagagacattaaatggtagaaacaaggagctcagttcccctcaagacggtctctgtttgaaccaaaggaatcaaacatatgcatctgaggtcttggaggaaagtgttcgctttgaatcaaaaggcagcaaacacaaggaaatcaagactgtaggggttcagacagatcttccagggaataacgaatatcttgagcacaagaaagtattggttgaccgtatctctagcaatctgtgtgcagtgtggggcatgccaactaacagtttgatggggaggagtctgatatcaaagatcctggtttcttgctcagaagaaattttgacacttgtccagtctacgggatcgctagacaagtgtgaagcctcttctgaagcgagctcatcggtcagaaatgctatttcccaagtatatgatatcatcataaagacgagcagtgatacaatacctatacaaactcttctcgaagcattgctaaatttggctgctgttggtaatgatgctgttgttagtagagccctgcggatgttacatagtgtcttgcagcacttgctgaataacagaacgatgtctaatcagaggtatgctttactactacattgaatatggttctagttaccatggaagtgtatttcataattggattcgtcactgaactcagattttgaccagccaaccttatcttatagaatagcagctactattgcattcaataccttaccaatgttctcttctgtaacctaccagtcagttcagttttgtattgcttgaattgaactttgaccataaatctctcttggaaaatgctatcttttaattctaaaatcatgagaaaatgaaagtacatttaaatacaaatctggcagtatcaccttagtgtcactaaatcagttagcctaattgttggcaaaactagagtttgattcttacaatgtgcatgccttggaaggtatagttgttaactgaccagctgtgcttcgagcaatttttgtgggctgctatcttcatccaggctgagcaatcaatcactgcatagtagaaataaagtagtatcagataaatgttgagaaatattaatagatattgatattgatttagcacggtgaattgtctttgttttctgttccattgtatttgttatttctgagagaattgggtggggtgggtttttattttgtagatgccttgtaatcaaccaagtatttgacataggcagcaatacaacaagaacgtgggtatatacaataatacgattgttcattattttttccttgtttataatgataggttctcatgcttatgaactttaatacgattttcctcagtgtaacatcaggaataatgtttctattgagccatgtgttaacaatactgttcacatggagcggaacagtcacaaagtctggacttcactcttcactgcaatgctacaaattgcggacaggcattcggaggagaatattcgtgttgatgcattatctataatgattatcattgcaaggacaagtgatcccaaagtggagcgggaaaaattcggatttacttctgtaatggaaaaattgcatcaactgttgcagaaggaaaatggattgcttgttaagaagcattctgtggatctacttttcttgctattgaattgccaacgacattgaagttgctatgcaatggaggtaaagatagccctgagcagattgaagctataagatgtgaaaatgatagatcacaagaagctataagctcaatttttaaggacctatctgaatgcttgagttgtagggcaacaagttctctggggatcaagctttgtcgggtagttgtcactctgttagcatatatagcttcaagtggcaaattggggtatgaagtgcttctaggtccagttactgtccgtggtgccaatttcttggagttgatcatggaagtccttgcgtcacagatggaatatgacacagccctttcaaatggagaacatgagctattgaaagaaaggtatttgctaatgagagaggttctaatccttctaaaccgactagcttcgcatgctaatttttcaaagccaacactggaagtgctcacaagcagcaagctctgtgcaaccttgacaattgatgtcgcaaatcagttgccgcaaaggagcaaatacccattgagacaccttggtgagatcaacatccagatggcgaacgatctcgctgaactagcccagaagttccgcacgcgagtacacagtttcttggaagagcaacattcaacagttgatcattccaatccaagtgctttgcacgagagttgacagcttccaggatgtgcaaaatcccgacggctaactgttctgcccccaattagctgggtgcaaataacagctaaagcagctagggggactatttctcgagctagcggagaaattttgtaatccctgtattatttctcccttttggatatttttgtactaataggtagggcctttcctttcctgggtttgtttggcttggctggggcgagtaaataggttttacctggtggtgtacatagaggctgatgctttctcgccattttggggctatgtaattctacgcaaagagaaggaaatgtacaatcagataaccgcataggctgttgcagcttttggtttgaatcgaactgataatcatatcctcattttgct

SEQ ID NO: 26012 - DNA, 1048 bp, Oryza sativa
  ref <308>: DATABASE ACCESSION NUMBER: AK101454
  ref <309>: DATABASE ENTRY DATE: 2002-08-28
gggctcttcacagtccaggactggagctgtggtccggtggaggttatagagaagaagcagagagcaagaatggctgggctgtatgagagaccgtcggagacgtacaccaagaagcggcctcggtaccctgacgcttggttctccaagctcgccgccctcacagccggccaccaccgcgcctgggacgccggctgcggcaccggccaggcctccatcagcatcgcggagcactacgacagcgtggtcgcgacggacgcgagcgaggggcagatccgccacgccgtcgcgcaccccaaggtgcggtacctgcacaccccggtggacctctccgaggacgacctcgtcgccatggtcggcggcgagggctcgctggacctcgtcgtggtggcgacctccatccactggttcgacatcccgctcttctacgccgtggccaaccgcgtcctcaagaggcccggcggcgtcctcgcggtgtggggctacaactacgagatccacccgttcgaggacaagctgcacggccagctgtacccggccatgcgcccgtatatggacccgaggacgaggctggccatggacaggtaccgcgacctgccgttcccgttcgagcccgtcggcgtgggccgcgagggcgagccggccgacgtcgacatagaggtggacatgacgctggacgacctcgtcgggttcctgaagaccggctccgtcgtgacgacggcgagggagaagggagtagacctggaggcggtgaccaaggacgtgatgaagggggtggaggcggagtggggagacccggcggtggcgaggaagctcgtgttcaaggccttcatgctcgccgggaagcccaaagtgctgaactgaaacgtacgctgaaccgctgattgctgatcattggtcaaccgcgtcttgtttcgttgcgatagattggtgacttcaccagaataaattccggagagacgactgaggccctgtttagatgaaactatttttaagtccctatcatatcggatgtttgaaaattaattataaatattaaacgtagactatt

SEQ ID NO: 26013 - DNA, 2162 bp, Oryza sativa
  ref <308>: DATABASE ACCESSION NUMBER: AK101455
  ref <309>: DATABASE ENTRY DATE: 2002-08-28
gactcgccgtcaccccccaccttgacctccgcttcgaattcgaattcgaatccgatggattcgattcgccgtcgatctgccggaggcatcctcggcatcctctttctggtgctgctccggtgggcgggggcgggggatccctatgcctactacgagtgggaggtatcgtacgtgtggggtgcgccgctgggcggagtgaagaagcaggaggcgattggcatcaacgggcagctgccggggccggcgctgaacgtgacgaccaactggaacctggtggtgaacgtgaggaacggcctggacgagccgctgctgctgacgtggcacggggtgcagcagcgcaagagcccctggcaggacggcgtgggcggcacaaactgcggcatcccgccggggtggaactggacgtaccagttccaggtgaaggaccaggtcggcagcttcttctacgccccctccaccgccctccaccgcgccgccggcggctacggcgccatcaccatcaacaaccgcgacgtcatccccttgcccttccccctccccgacggcggcgacatcaccctcttcctcgccgactggtacgccagggaccacagggccctgcgccgcgccctcgacgccggcgaccccctcggcccccccgacggggtgctcatcaacgccctcggcccctaccgctacaacgacaccctcgtcccgccgggcgtcacctacgagcgcatcaatgtcgacccggggaggacctaccgcctgcgcgtccacaacgtcggcgtcgccaccagcctcaatttcagaatccagggccacaacctgctgctcgtcgaggccgagggctcctacacttcacagcagaactacaccaacatggacatccatgtcggccagtcctactccttccttctcaccatggaccagaacgcctccaccgactactacgtcgtcgccagcgcccgtttcgtccccgacgccgacaagctcaccggcgtcgccatcctccactactccaactcccagggcccgccctctggctctctccctgatgccccagatgaccagtacgacaccgctttctccatcaaccaagcaagatcaatcagatggaatgttacagccagtggtgcccgccccaatccgcagggctcattccattacggcgacattaccgtcaccgatgtgtacctgctgcagagcatgccaccggagctcatagacggccagatgcgtgctactctcaatggaatttcttatattgctccatcgactcctttgatgctcgctcagctctttaatgtcccgggagtctacaaactggattttcctaatcgtcctatgaacaggttaccaaagcttgacacctccattatcaatggcacctacaaaggctttatggagatcatattccaaaacaacgccacatccgtgcagagctaccacttggatggatatgcattctttgttgttgggatggactatggactgtggacagacaacagccgcggtacatacaacaaatgggatggcgttgcacgctccacaattcaggtattccctggcgcttggacggctgtccttgtctttcttgacaatgcgggtatatggaatctgcgggtggagaacctggacgcctggtacctggggcaagaagtgtacatcagtgtggttaacccggaggatagcagcaacaagaccgtgcttcctcttcccgacaacgcgattttctgtggtgcgctgtcaagtttacaaaaggagcaatcgcatagattccaatactcagaagcttctcagataacgcagctgtggaagatggttttcttcatggcatggttggccctttggtagagcttaattagatctgtctgctggggtgatccggagacgagagagctcagagctggtcccaaacatggatgagctctcagctcaagttagtagggtggtgaattttgtcagattcgaattggttagattggacttgagtgatgatcctgtctgggaagggcaaagagtaggaggaagcattgggaaggcatacacacgcttgacttgatttggcttgaagtcgagctagcaggttgctcattagccgttgtgtgatatctgaagatcaacttactacccaaacctagactcacagaaaccaattgattgatatggattaagacctg

SEQ ID NO: 26014 - DNA, 2581 bp, Oryza sativa
  ref <308>: DATABASE ACCESSION NUMBER: AK101456
  ref <309>: DATABASE ENTRY DATE: 2002-08-28
gtcactatcgctcccccatccaccacaacacggacacacggtcttccccaccggcgacgacgagaagcggcggcgcgtgccatgtcgaggttctggaggccggggtcggagaagccgacggcggcgatcgtcgaggacgaggagggcggcgtcctcttcctgcccacaagcaccagctcctcctcctcatccgggtttgggtacgcgagcttggagcggcagcggcagcggctgccggtgtacaagtaccggaaggccatcctctacctggtggagcggcacgccacgaccatcgtcgtcggcgagaccggcagcggaaagtccacgcagatccctcagtaccttaaagaggctggatgggccgagggtggtcgacttataggctgcactcaaccaagacgattggccgtgcagtcagttgcatcaagagtagcggaagaagtaggtgtgagactcggagaagaagttggttacacaatccgatttgaggatcaaacaaatccaggtatgaccatgattaaatttctgacagatggggtattgatcagagaaatgatggaagatcctcttctgaccaagtatagtgtaattatggttgatgaagcccatgaacgatccatttcaactgacatgttgctgggtcttctgaaaaagattcaacgacgtcggcccgacttgcgtctaatcatatcctctgcaacaattgaagcaagatccatgtcaacttttttcaacattaggcgaaagaattctatgcttgagtctgctgatcatttgcccaacccagaacctgctattctttctgtggaaggtaaaggttacacagtggaaatccattatgttgaagaacctgtttcagactacttacaggctgctgtgaatactgtacttattattcacgaaaaggaaccaccaggggatattttggtatttttaactggccaggatgacatagacgcagctgttaagatgctaaatgaagaaattcaacaccgtggaagacattatttagacctgctgattctgcccttgtactctggccttccgcggggagatcaagacctcatttttactccaacttcaaaaggtaaaaggaaggttgtgatatcaacaaacattgctgagacgtcattaactctagagggcgtggtgtatgttgttgatagtgggttttccaagcagaagtgttacaatccgatttctgatatcgagagtttagttgtcgcaccaatatccaaggcatccgcaagacaaagagcaggccgagctggaagggtgcgaccaggaaagtgctttaggctttatacagaggaattttaccttaaagaaatgcagccagaagggattcctgaaatgcaaaggtctaaccttgtttcctgcataacacagttgaaagctctaggaatagacaacattttgggatttgattggccagcttctccatcaccagaggcaatgattcgagctcttgaagttctatattccctgggaatccttgatgaagatgccaaactaacagtaccccttggcttccaagttgctgagatccctctggaccctatgatttcaaaaatgatcctttcagccaataatttcggatgctctgatgagatattgaccatagcagcatttctatctgttcaatctgtgtgggtttccatgagaggagtgaaaaaagagtttgatgaagctaagctccgttttgctgctgctgagggagatcatgtgacgttcctgaatatctacaaaggatttcatcaatctggaaaatctagtcagtggtgttacaagaactttttgaaccaccaagcattgaagaaggttattgacatcagggagcagcttgtcaggattatcaagaggtttggcataccactaacatcatgtgatagagatatggaggcagtaagaaaagctattattgctggtgcatttgcttatgcatgccatctagaggaatacagccagaatgggatgtacaaaacaataaggacctcacaagaagtttatattcatccttcttctgtgctatttagggttaatccaaagtgggtcatctaccagtctctagtttcaactgataagcactatatgcgtaatgttattgccattgaaccatcatggcttacggaagctgcaccacatttttatcagttccggacacccaatcctgcccttcactaactatatgatgaaaactgcaacttgatctttgcacctttttgccctttttggctattctacttattacttaagggtagttggatggagtttcaccacttttagcactcaactgggtgcttggatggtttgcacttttagcacttttaagggtagctgctttcgtgttaatctattgagggcacattgggaggcaaaggagtacgtgccgtgtagactgatagttctactatgtcagcggaaagtagctgccatagctttatatccttcctattcctatattgctgcagtgtactgcgttgaattatctgtgtggcaatatgaatgttgtcgtggcattgtcagagaggaattatttctgttaatgacaatcactgttaccctgcgtcatggtatatgc

SEQ ID NO: 26015 - DNA, 1760 bp, Oryza sativa
  ref <308>: DATABASE ACCESSION NUMBER: AK101457
  ref <309>: DATABASE ENTRY DATE: 2002-08-28
ggcgttcccccctccctccccctcgtcgtcttctccccccaaatccccctcaaaccctaccgccgatccggctccgccgccgcgcagatcgccatggccgcccccaacaacaacgacgccgccgccggcgccagcgccagcgccaccaccagcgagcccgcgccggaggatacctcgatcgaggcgctggcgcggcgcgtgcaggagcacatgaccctggcctccaaccccaccgcccgccgccacaagttctgggagacgcagccggtgggccagttccgcgacgccgccgattcctccctccccgacggcgccatcgagccgcccaccccgctctccgaggtccgtgccgacccttacccgctccccgccgccttcgagtggtacacctgcgacctcgacgacgacgccctcctcaccgatctctacgccctcctcgcccacaactacgtcgaggacgacgagaacatgttccgcttcaactactcccccgccttcctccgctgggcgctccgccccccttccttcttccgcgcctggcacatcggcgtccgcgccagggagtccaagaagctcgtcgccttcatctccggtgtccccgcgcgcatccgcgcacgcgacgacgtcgtccgcatggcagagatcaacttcctttgcgtccacaagaagctccgatccaagcgcctcgcccccgtgctcatccgcgaggtcacccgccgcgtccaccaggagaacatctggcaggctgcgtacactgcgggggttgtcctcccaacccccatcaccacctgccggtactggcaccgatccctcaaccccaagaagcttattgatgttgggttctcccgtctcggacctcgcatgaccatgagtcgcacggttcggctctacaagctgcctgaagctccgcttactcctgggttccgccagatggagctaagagatgtcgctgcggtcacacggctgctgagggcataccttgcgaagttcgtggtggctccggactttgatgagatggatgtggagcactggctgcttcctcgggaggatgtggtggacagctacctcgtggagagccctgaaactcacgaggtcacggatttctgcagcttttacacgctaccctcatcagtgttgaacaatgccaactatgcgacactcaaggctgcatactcgtactacaatgtttccaccaagactccgctgcagcagctgatgaacgatgcactgatcgtggccaagcagaagaactatgatgtgttcaacgcacttgatgtcatggagaatgaatcattcctcaaggagctcaaatttggtcctggagatgggcagctccactattacctttataactatcgcatccgcaatggaatcaagccatcagagcttggccttgtgctgctataggccactcccacttgagacagtgttcgggttatacatttctttcttagcaggtactccttgtgtggctggtttagcatgtgtcttttctggttgctataggtaatgatttgattcccgtcatgctgttggttgctcatttttcttattatggtagcggatctccttcatatgattgccatgcttgtttcatggaaatccgaaatgattcgcaaatgagactcaaattagaaatttggaatcctttccttaattttaagacttattttttattagcgacattcagcttgtatggttaaaagcatgtatgatggcactggtttaccaagaaattttgatagaacttgtgttatgcc

SEQ ID NO: 26016 - DNA, 2343 bp, Oryza sativa
  ref <308>: DATABASE ACCESSION NUMBER: AK101458
  ref <309>: DATABASE ENTRY DATE: 2002-08-28
gaatccaaactgtttctcggcttccgctacacgcctcgccgaccaccatgacgatggctgcggcgccggcgaggtcggcgggggcggcggcggagaagaggatggtggatccgccgcgggtggtcggggagtacaagctgctggaggagattggggtgggctcgttcgcgaaggtgtacctcgcgacgcacctccgcaccggcgatgtcgtggcggtgaaggagatcgaccccaggaggatcgacgagcgcgtccgcggcggaatcctcgaggagaaggccatcctctccaccctttcccaccccaacatccttcgcctcatcgacaccatccaggaggagaatctgtacctgattctggagtactgcaatggaggcgacctcgaggggtacaggacgaagggcggcgaggacgcccggttgccggacgccaccgcgagggacttcatgcggcagctcgcggaagggctcaagatgctgaggggaagatcaatcgtgcaccgcgacctcaagcctcagaatcttctgctatcaactaatggtgatgccatcacactgaaaattggagattttgggtttgctaggtctcttgtgcaagaaaatttagctgctacaatgtgtggatctccatcctatatggcgccagaaattatgcgatgtgaggattacgatgcaaaggcagacttgtggagtgttggtgttattctttttcagctagtcacagggaaattgcctttttatggggctaatctattcaagctgaggcaaaacatccatgaatctaacggcgttaagttccctaaagaaatcaaggatgatttacatcctgatttcattgacctgtgccgagggctcctacgtcttgatccaaagaagagaatttcttttgagggattcttcaatcacaagtttttgtcaacaactgggtcgaccctttactctggtggaagcattcaaaggaaaagagagattagcagtgagcccaatcatcctgctgatttattaagggatacatgccagatcatttcttcggatgtcctgaaagataagtctgaaagcgtggattctagaaatttgcaagcatttgattcatgggaatggattgaacgagaatatgtacttgttcaggcgaactctacttccacggaaattttgtcttcacttgaaaagtcaatgaaggatggtacaggtgcaaaacctgccagctatgataggtccactgttaaacggtctgcttggaaccaaaacagaaattcagtcagtagaggggttgctataaaaagcaatggatgcaccccattgtctacttcccatgaatcaacagctgcagaaaatctgctaaatccaccttattgttacacaaggcttcaactccttaaccagtatattgttgttcttacagaacttgcagaggagaagctttttaaagggctggacttggaggcactatctgttgaacttataatattagctatttggaacgaggcccttaatgcatgtagtttatccacggatgctacacatgatggattttttttgacccaagctcatgtcaatttcctgcctaagaatgaccatcgtccatctcgaaatgtagtacaaggattggatttcaccaggctcgtttctgtctgttcctgggctgaaagtggctttatcaaggcatatgaccgtgcagagaagatatcacataggttgcgggacaacaatgataacaccgagatgccagatgcagtggagatcatattccagacagctttaatatatggaacaactggtgctgcaaaggaagttttgggataccaaaatagatcggtggcgctatactcaaaagcaatcatcttgctcacatttgtattgcaagaagcaactaatttgccactgaatccgccgttttccctttcatcatctgatcagcaacgtatccataggtacatagctaatttgaggagccatctatgcagtgcccagctgaccggacaacaggagagatatgtccagaactaacttttacatgggaaatattggtgcacaaagaagtgaaagttaaattgattccgtggtaaacttcaagcaagctatgttttgttccccacgagtattagtctttgcctccaacttttttttgtctaggagatgcttacttgggggaacttttgtaatgttttgtttgcatgatcatagtccatgtgttctttttgtatataatatataataacacttctaagttgtacagttatttgccatagaactgaaatgacctcttggctctgtatataagtagcatgtaaaaagagcaaatagttttttatttttccaagtcttaaaactgctttgcctacct

SEQ ID NO: 26017 - DNA, 913 bp, Oryza sativa
  ref <308>: DATABASE ACCESSION NUMBER: AK101459
  ref <309>: DATABASE ENTRY DATE: 2002-08-28
gcccttgagctagggttttatcgccgccgccgccgcttctccactctcccctgcccccgtcgccgtcgccaccgccgccgccatgtccgggaggaagaagacacgggagcccaaggaggagaacgtcaccctcggcccgaccgtgcgcgagggcgagtacgtcttcggcgtcgcccacatcttcgcctccttcaacgacaccttcatccatgtcaccgatctgtccgggagggagacgctcgtccgcatcactggtggcatgaaggttaaagctgatcgcgacgaatcttccccttatgctgctatgcttgcttcacaggatgttgctcaaagatgcaaggagcttggaataactgctttgcatatcaagctccgtgctactggtggtaacaagacaaaaacccctggtcctggtgctcagtccgcacttagagcacttgctcgatctggcatgaagattggtcgtattgaggatgttactccagtgccgactgatagcacacgcagaaagggtggtagaaggggtaggaggctgtaatcttcatgcggcctcaaaccgacaacactctgctctcctagatgttaccgtctgcattggactattttgtttctgtgcttttcattcggtggattatttaaaccagttttgaactctgtttctgcatcaattcatgctgtcctcaatgtaaccaacgttatctgcttcgaccggtgaacatactcctgttggattacttgagcatatgccactacaggccggacactgctttcgttgtttattcgggagagcatggcaaacttgggagatgaaaacctggaaaatggtgcgaggataatgggcataactgtaaaatagtgcgttttgtacgaaaactttatatatgaaagttgttttaaaatttcaggttaatcc

SEQ ID NO: 26018 - DNA, 433 bp, Oryza sativa
  ref <308>: DATABASE ACCESSION NUMBER: AK101460
  ref <309>: DATABASE ENTRY DATE: 2002-08-28
tttgccaagaacgcggtggaattagctcggacgctcgagaagctttgatgaatttcatccaaactccaaacatcaaatttgtgcgaattttgattcggcgcctcttcgaatcggtgttgggctcggtgtacaaaggtagaaacagcaaaggtgaacctttttttggggtctactcttctcttctttttggttgggttcatttcccttctcttttcatgtggtagcagcgtcgaaaggaagaagaagaagaagaaaaaaaaataagtagaatttagttccttttttttttgttcatatgcttagaaaaacatggtcctctcatcatttcacccagaccttctgtggtgttctgttctggattgaattctgaatcccaaaatcatccaatctgaaatgtcgtatgatatatgatacatctcatgatcaagtgatc

SEQ ID NO: 26019 - DNA, 2693 bp, Oryza sativa
  ref <308>: DATABASE ACCESSION NUMBER: AK101461
  ref <309>: DATABASE ENTRY DATE: 2002-08-28
gcttttgtagaccgtagttcaaccaatgaaccaaacagcgagctgaaacgatggctggattggtcatcggctgcctggccgtgcagctctcgctggcgtctctgctgctgtgctcgtccgcgtcgacggcgcagcacacgctcggcaccggctcctccctgtcggtggcggaccggtcgcggccgttcctggtgtcgccggacggcaccttctcctgcggcttcattcaggccggcgacgacggcgacaacgccttctccttctccgtatggttcaccgccgccagggacggcgccgtcgtctggacggccaaccccgacgcccccgtgaacggcaggggctcgacgatctcgttccgccacgacggcgagctggccctcgccgacaccaacgggaccacggtgtgggcgagccggacgggcggcggcgggcggggcctgaccgtctccctccgcgacaccgggaacctcgtcatcgaggacccgtcgaccggccgcgccgtgtggcagagcttcgactggccgacggacacgctgctcccgtcgcagcggttcaccaaggacaccaagctcgtcgccggctacttcagcctctactacgacaacgacaacgtgctgcgcatgctctacgatggcccggagatcgccagcatctactggccgttgccgggggtgagcattttcgacttcggccggacaaactacaacagctcgaggatcgccatcctcgacgacgccggcgtcttccgctcctccgacaggctgcaagcccaggcctccgacatgggcgtcggcgtcaagaggcggctcaccatcgagcaggacggcaacctgagaatatacagcctgaacgcgtccaccggaggttgggcggtgacatgggcggcgctcagccagccgtgccaagctcacgggctgtgcggcaagaacgggctctgcgtgtacctgccgagcctccggtgctcgtgcccgccagggtacgagatgatcgaccgccgggactggaggaaaggctgccagccgatgttctccgtcggcaactgcagccagccggcggcgcctgagcggttcaagtctgtggtggtgccccaaaccgatttctacggctacgacctgatgttcaacgggtcctcgataacattcgagctatgcaggaaccagtgcctgagcgattgccagtgcgtcgccttctcctacaggttcgacggcgtcggcagatgcttcacgaaaggcaggcttttcaacggctacacgtcggcgaatttcccggggaacatctacctcaaggtgtccatcgacttcgacgaatcgtcgccattggtcagcgcgcggagcgccgccggcctcacgtgcaatcccaacgtctccatcgtgacagtgcccgctgccgtgtacgggatggctccaagaaacagcgggaagtggacctacctgtttgtgttcgccggtgtgctcggtgtcctggacctcctcttcatcgcgacagggtggtggttcctgtccagcaagcagagcatccccagctcgctggaggcagggtacaggagggtgatgacgagccagttcaggcggttcacgtaccgggagctcaaggacgtgacggccaacttcaaggaggagctcggccgcggcggctccggcgtggtgtaccgcggcgtgctcgacggcggtaaggtggtggccgtgaagaggctggcggtcgacgtgacgatgcagggggacgaggagttctgggccgagatgacggtgctcgggcggatcaaccatatgaaccttgtgaggatttggggattctgctccgagcgcaagcacaagctgctggtgtacgagtacgtggagaaccagtcgctggaccggcacctgttcgacacggccgaaggcggcggcggcatgtcgacgacgacgctggcgtggaaagatcggtgcaagatcgcgctgggcacggcgaggggcctcgcctacctccaccacgagtgcctcgagtgggtcatccactgcgacatgaagccggagaacatcctcctgacgagggacttcgacgccaagatcgccgacttcgggctggccaagctgtcgaagcgggacggcggcgccggcgtggagctcacccacatgagggggacgtcggggtacatggcgccggagtgggcgctgaacgtgcccatcaacgccaaggtggacgtgtacagcttcggcattgtgctgctggagatcgtggtcgggagccgggtggcggaccagaggacggaagccggcgagcggctgcagctgccgcagatcgcgcaggcgctgaggcatgtgctggacagtggcgatgtgaggtctctagttgatgccaggctgcaggggcagttcaaccctcgtcaggccatggagatggtgaggatttctctggcgtgtatggaggacaggaacagcaggccgaccatggacgacatcgccaaggctctcacggcgttcgatgacgaggacgaacaccccgcttaccggtcatgatcatcaccaggctaaccgttagcatagttcagcttagagcagcagtcagctgtgagtttaattcagcacttgaatttcaaatttaaggattatgaaattccgaaaaattgtagttaagacttcaaatcgagtatactcagtagaagtactatagtcagtattgagctcctccccaaatattaagcaatcagttgactg

SEQ ID NO: 26020 - DNA, 851 bp, Oryza sativa
  ref <308>: DATABASE ACCESSION NUMBER: AK101462
  ref <309>: DATABASE ENTRY DATE: 2002-08-28
ggccgccgccgcatcgcgctggggctctccgctcctccgccgcatcatgttgtggagctccgcccctccgccgttgccgtctaccatggaagagcgagatgcgcaccctcaagatcgccgcttggatgctccgtttctcctccctgcagcgccatgcgcacccccaagattgccgcgtagccgccaccagcagacctcccaaccggccatagaagaaggggatggatcagatgggcggatgctccacctttcagcgccacacccagcatcactctcgccgcgccgccgccaacgacggacctcaacatgtgttgatgctgcagaaggtggtcaaagcatggagacccctcagatcgttgttggtgctatactataaagaagatatactgcctcgagttgatgattttgatatcttaacctggtggaaggcaaactcactaaaatatcctgtactctcacacatagcacgtgatgtgttagccattccagcatcaacggttccatctgaaaatgctttcagtacaggagggagggtaatcaatgactacagaagtagattgacgcctgagatagttgaggctctcatttgtctacaggattggatgagagtcgttgattgcccttctgttgggatggtcttatcacaagaagaagaaacttgatgccttgataggttgtggaaaatttcagtgcttcctggtgtggaccatgtcgtgtcattgcacctatttatgctgagatgtcaaagacttatcctcaactcatgttcttgacaatagatatgttgatgacctaatgataattgtaaccatttgtttggtcaaatctgctattgaaaaatgattagtttc

SEQ ID NO: 26021 - DNA, 3609 bp, Oryza sativa
  ref <308>: DATABASE ACCESSION NUMBER: AK101463
  ref <309>: DATABASE ENTRY DATE: 2002-08-28
gaaactcatcacccacgcgctgcgagacgcactgtttcagttcgcggtcaagtccaggaagctggcgtctccgatgttgcgggcgttggggcgcgcgtcgacggggccggtcaccgtcggcgacgacgagctggcggcgctcaggtccatgctccgcagggtccacgccgcgctccgcgacgccgacagcctgtccgtcaccgaccactccgtccgcctctggctcgccgagctcggcgacctcgagtaccgcgccgaggacgtgttcgaggagctcgagtacgagtgccaccgcgccgcgcagctggaggacctcaagatcgacctcctgcgcgccgcggcgctggcgacggggaagcggaagagggaggtcgcgcagctgttcgccgccgcgccggccgcgcgcctccgccgcaagatcgacgacatttgggcgaggtacgaggagatcgcgtcagatcggaagaagctccggctaaggcccggcgacggcgcggcacggccggcggtcggtgccctcgtgccgagcagctcgctcccccgttgccagatccacggccgggagcgcgacctccagagggtcgtcgagatggtctgccaaagccagcccgacggcaggagaaactacgccgtcgtggcaatcgttggtatggccggcgttgggaagacgtcgcttatgcagcacgtctgcggcgaggaggccgtcgcgtcgcgtttcgacctcgcgctctgggtctgggtgtcccaagagttcgatgtcgtcggcgtgacggcaaagatcgttgaggccatcaccaggtcacgccccgactgctccgagctgagcgcgctccacggaaccatggtcgaacaccttacgggcaagaggtgcctgctcgtcctcgatgacgtctgggatgacaaccccaaccattgggacaccatcaccgcgcagctgagcttctgcgcgccggggagcacagtcgtcgtcacgaccaggagcaggatggtcgccaagatggttacccccaatgtgtaccatcttggctgcttgtccgacgaacactgctggctcgtgtgccagcgacgtgcatcgcacgggtgcaccaccgccaccattgatgatgagcttaccaacatcggccagcagattgcaaagaaatgcagaggcgtaccattggcagcagaggcagcaggcacagccatgagcacctcaatcaccaggaagcactggacacatgtactgaatagcaacctgtgggcagacaatgatgaggccaagaaccatgtgctgccagcactcaaggtgagctatgaccatttgcgccattgaaacgatgcttcgccttctgctcattgttccccaagagcttcgtcttcgacaaggatgcgctggttcagctctggacagcgcagggcttcattgatgccggaggagaacagagacctgaagatgtaggcaccggctacttctatgatttggtagcaagatgcttcttccagccatccccatctcatggaatcgatcaagagaagtttgtcatgcatgatctatatcaggagcttgcacagtttgtttcaggcaatgaatgcagaatgatacaacatattgtttcaggcaatgaatgccggacgatacagcagagtaacctgaaccgagccgacaagacatcggctcgccatttgtccattgtcaacaatgagtcccatcctgagcaagaactatcattggactcattttgtggccaagatctgagaacattcctgtttctttcaagattggaacagatcatccatggagaaatgccactcagaagaaagattgctccatatggactgatgacagattttgaatgtctaagggttctagatttaagcaacactgacattgtggaggtaccaaagtctattggaagcctgatacatctgaggtaccttggtctggataacactagaattcagatgctgccggagtcagtaggtgctctcttccacttacagacaatcaagcttaaccattgttcctcccttactcagttgccccacggcagtaagctcctgcagaacttaagatgctttgagatagcacattccaatgtacagatgccatctgggatcagagcattgactagcctacagaagctacctgtttttgtcgtcggagatggatctgctggatgcggaatcggagagctggatgagctgataaacatcagaggagacctgcacattataggtttaagcaatcttgatgctgcacaagctgccaatgtcaatctatggaaaaaggagggacttcagaagctaacactcgaatggtgtgacatacttcaggattcagacgtgacattgcgtgatctgcagccaaatgaagcaaacagagtaccagattgtcgttgcgtgccacaacagaatgacagagcagctcaggtgttacagtgtctcagaccaaattcaaatctggaggagctcatcatcaaaggttataatggatcatcattcccatcatgggtagggtctctgcctttggacaggttagcttctatagaactaaaagattgccaaaattgcgaagaactgccgccacttgggtgcttgccatccctgaaacatgttgtgatacagtcactgccaagtgtccagctagttggacctgaatttcttggcgatgttggagatatcccttacaacaacagggagaaagcctattttgcttttcctgcattggagtctctgaagttcagggatatgggagcctgggaggaatggtcaggtgtcaaggatgaacacttcccagaacttaagtatctcagcattgttaggtgtggaaagctgaaggtattgcccaacttcacttcaggaccaaagcagagaatcaggaattgtgagaaactactccagcctctatgccaggtatgttcttcaagttcaagtcagatgaataccatcaatttttcttgcatcgatttttatataagagatttttttatatgcaaatttcgttgttcatctgctcttggatcatttttactatagtcacagctgacagctgcaaatatcatttctctcttttttcttatggattgcacaaatatgctcataattgctcatcagttacgaccaagaatcattaaatcatatgaaatgagcattagactttttgcactcacaaacagggtgaatgaggcagactatttcagttaacagggacttctggtttacaatataaaaactattttagcccatactacaatttttttatcatggaataattaaactaaaaataatttgttcattcttccctgatcagaatatacactggaatttgatggaatacataccaccttcaagtgaactgtcgtacacatgcatggcagaaggtgatatttcaatcctagaagcttcctgttcatacagtacatagaacattggaaatggagggaggggcaccaattattgtaaatgctcatggattggtgctattttgtcagaaaatcttatttccaggattgacatgaatttttcagtaagtacacatcgtatgaaattgttttgttccaaatgtacccgatcaagaatattcattcacaccaaaactactgaatgcatgttcctggaaaactgcaaagc

SEQ ID NO: 26022 - DNA, 1406 bp, Oryza sativa
  ref <308>: DATABASE ACCESSION NUMBER: AK101464
  ref <309>: DATABASE ENTRY DATE: 2002-08-28
gagcagccgccaccgccgccggaatccgagacctctcgccgtcccgccacgcgcgcgcgcgagcgagcaaagagagagagagaaatggccaccgctgccgccgcctcgctgcagtacgcgctgcacggcgccgcctccgcctccgccaagcccagatccgccgcgccaggcaggagcgtgcgcgtggtcgcggcgaggaggtcggtgcgggcgcgcggaggggcggtggtagcgcgcgccgcggttacagcgagtgcggatgcgacggcggaatccaagtccggcggtcatgaggtcctgttgtttgaggcccttcgagaagcattgatagaagagatgaaagaagatcctacagtttgtgtatttggtgaagatgttggtcactatggaggttcatataaggtgaccaagggcttggctgagatgtttggagaccttcgggttcttgatacccctattgctgagaattctttcgctggcatgggagttggagcagcaatgaaggggctaaggccaattgttgaaggcatgaacatgggtttccttctccttgcttacaatcagatctcaaacaattgtggtatgcttcattatacctcaggtggccagttcaagatcccgattgtgattcgaggccctggtggtgttggtcgccagcttggtgctgagcattcacaacgtctcgaatcgtacttccagtccattcctggacttcaaatggttgcttgctctactccttacaatgctaagggcctgatgaaggctgccataaggagtgagaaccctgtggtgctgttcgagcatgtccttctgtacaacctgaaggagaagatccctgatgaggaatacatttgctgcttggaggaggccgagatggtacgtccaggtgagcatgtgaccatcctcacgtactctcgcatgaggtaccatgtgatgcaggcagccaagacactggtgaacaaagggtacgatccggaggtcattgatatcaggtcgctgaaaccattcgatctgcacacgatagggaactccattaagaagacccaccgcgttctgattgtggaggagtgcatgcgaacgggtggtatcggcgccagcctgaggtcggccatcattgataacttctgggactaccttgatgcccccatcatgtgcttgtcatcacaggatgtaccgacgccatatgctgcaactctggaggacgcaaccgtcgtgcagcctgcccaaattgtggccgctgtcgagcagatctgccaataattcaattcttaatgacattgttgaacatcatgatttgtggattcagaaccactgtcctttgttcgtcttgtcacgtagtgacctccattgtggcgtagacactgtattctatttccccaacactaaagttatacccttacccatgc

SEQ ID NO: 26023 - DNA, 1801 bp, Oryza sativa
  ref <308>: DATABASE ACCESSION NUMBER: AK101465
  ref <309>: DATABASE ENTRY DATE: 2002-08-28
gacccgcaccccacgaggccgaggcggcgtggtatggctccttcgctttccaaacaaccctataaatatcttgcagaaggttccagaagaaggccgttggatcatagcgtcgtcagcaagccacctccacctccacctccaaaacaatggcgacctcgggttcctcctcctccccctcctccccgtcctcccccaagcgccagcgagtggcgccgccgccgccgcggcgcacggacatgctgatggcgctcccgccggacatcctcgacgaccgcatcctcgcgctgctccccttcgacaagctggtctgcacctcctgtctctcccgcgcgtggcgccgccgctgggagtcggtcagaaacctcgagatcgagctgccccgtgcctactccggcggcggccgcgccctgtggcggtgcgcgcggcccgtccgcttcttcagcgcccgcgtcgcccgccgcgacgtcttccgcgccgcccgctggctccgcgccttggcgcggaagggcgtccaggatctaagtctggagttctcgttagccggtaagcagcgcccccttcccggacccgccctcttctcctgcgccgcactcgtccaactcgacctcgagcaatgcgacatgccggcggcgccgccgggctttctgggcttccccaaccttgagcgcctcgacctcgtgtatgtcaccctcccgttcgccggtgccggcacgcagctcgaacacctcatcgtcgcggcggagaaactcgccgtgctaaatttgtcacccgtgatcaccatcaacggcggcggcgtggacacgtgggccatcagagcgcccaaactccggaagctctacatcaccatggagatgggtgacgacaacggctgccgaataccaatgccgctccccatgctggaggaggtgaccatctcattcgatcgcctcttcggaacccaagacttcctcgatgctttccagaatatttctactgtcaataagctctttttcaagagtgataagttcaacattaatatgctggagggaattacatgcaagtttgagaatctgagggagggcggcctgatcatagattttggccagcgcaagtgttctatcgttagtttctttactgaagtttgccccgcacattgaacacctttatattaggactgatcattccatattggaccccgtgagttctgaggatgagatggatgaagactccctgaattctgaagatgagtttgatgaagactccctgaattctcaagatgagattgatgaagactccctgaattctgagataagcagcgacttgcttgcaagcctcaaatatgtgaccctgattaatatgaagtacaactcaaatcaaatgtgctttatgaagcttttactgtccaaagcgagatctcttcaaacatttgacgtcactttcgtctacagttatgaaagcaatggacgctatggaaatgcatgcagagaattaacggagtgccaaaaggcttcaccccaagttgtgttgacagcaaaagtgacaacacacggcatgtaagacagacatcctgtccttgttgatgttgccttcgtattatgggagaaatacttcggaacttgctactgttcagattctagatgaggctgttcttgggcaaccagctgcttgttttccttcttgagaaggcagagagttgtacatagagaagctagtcgatggagtatcaggcttgtttgtgaaacactacgattactcgagatgtatacactgatatagcatgtggcggtattattgaatgacagactgatttagtatgataccc

SEQ ID NO: 26024 - DNA, 2243 bp, Oryza sativa
  ref <308>: DATABASE ACCESSION NUMBER: AK101466
  ref <309>: DATABASE ENTRY DATE: 2002-08-28
gagcggcttcgtcttctcgcttcctccattcctcgccaaaaaccctagcggattccgacgacgaactcgcggcggtgatggcgggcggcggcgggaagaaggagaagggggaggggctggggcgggcgctgatccggcagcggaacaaggcggcggcggccgtcaaggagagaggggacgcgctcgcccacgcgcgccgccgcgcgcagccgctggagtccgtcatcgaggtcagcgacatcgacgccgtcctcgagcgcgccgccgaggccgaccgcctccactccgcgctcgccgactccgtctcctcctccgacctcgtcatcgacctggatgcgacgggggagacggatgaggagaggcggcggatgcagaaggagcaggaggctctgcacgccggcagcctcagggtcccgaggcggccaccatggaattctcggatgactgtggaggagctcgatgagaacgagaggcgggccttcctggtttggcggaggaatctcgcaagattggaagaaaatgacaagcttgtgcttacaccctttgagaagaacattgacatctggagacagctttggagagtccttgaacgtagtgatctgctggtgatggtagtcgatgctcgagatcccttattctaccgctgtcctgatctcgaggtatatgcaaaagaaattgatgaacacaagaggacaatgattcttgtcaacaaggctgatctgttaccaatgaatatcaggaaaaaatgggcagactattttaaggcacatgatattctctatgttttctggtccgctaaagctgctactgccacattagaaggcaaaatattaagtggatactctgaacaagattctgcttcacttgatttggacaccaagatatatggcagggatgaactcttaaagaaattgcaaactgaagcagaattcattgtagcacaaaggagggccgcagccatcaaagaggacagcagagccacttcctctgattctgtttcatcagtggctaagcatgttgttgttggatttgttggttatccaaatgttggaaagagttcaacaatcaatgctttagttggtgagaagaagactggtgttactcacacacctggcaaaacaaagcatttccagacgctgataatctcagaggagctcactctatgtgattgtcctggtctggtcttcccttccttctcaagctcaaggcatgagatggtgtcatgtggtgtcttgccaatcgataggatgactaagcaccgggaagctattcaggtggtggcagatcgtgtcccaagaagtgtccttgaacagatttacaagataactctgccaaagccaaagccatatgaatcgcagtcgagaccaccaactgctgctgagctgttgcgagcctactgtgcatccagggggcatgttagccatgctggacttcctgacgagactagggctgctcgacagatactgaaagattatatcgatggtaaaattccacacttcgaacttcctcctggcatggtagatactgaaaatgaacacgaagaaacctccggattagaaggtccaactacctcagcatacaatgaatcaggtggttccgattccgatgaacgggatgatacagttgatccagcacaaccaggtatgaggcatgtccttagcgacctcgaatcgtttgacctggccactgaagggtctaaacctgctgggaagaagaagaaagaggcatcccacaagcagcacaagaagccccagaggaagaaggaccggtcatggagggtcggcaacgatggcggcgatggaactgcggtcttaagggtgtaccagaaaccagctgttaacctctctgccgtcagtgcaagcgacaagacctagtaccctgatggcatattgtgttttcaactacacttggcacacatgggcaataaggtctttgctcccttgagttttctggagaccctgacctttgcatatgcaaaatcaagaaatctggtttacgcctgccgtgttgagtggtaggggaaattttgccgcctgtgaacaaaattgccgaggcttgcttgctctggtggatgcgagatcggagacgaaagctatatagaagaagaaaattttctgttttatttcagcttttgttcccctggcattatatacagccagtgtgaattgtgtgtgatatgtgtactgtttgttcctccatgaatgatcaagaaattaacatagaaattgtaataacttttcacc

SEQ ID NO: 26025 - DNA, 2109 bp, Oryza sativa
  ref <308>: DATABASE ACCESSION NUMBER: AK101467
  ref <309>: DATABASE ENTRY DATE: 2002-08-28
tttttgttgatgtgcacagtagcaatgctcctaaaaatttctgtaagatcaataaagaagatcttgactgtagtgatacaaaaatggaggaacaagaacataaaactgaggcttcagatacaagtgctgatcttcaggaagaggtctccactgatgtgcattccagcaatgaagttggtcatatattacacaaacacaaagatgaggaaactgttagagaagctttagacattttggaacccgatgggacaaatgtgaattttaaccaacagaagtcaggatcagcaaatcagcaagatgctgtgttttcagtcatgggtcaagaatctcgaagaattgaggatgccatttatgaggataacctatttattctagatgaaggatcagaagaaagtgatagcaaatatcctgtgcatgcagcattaagctcttccagtagccttgtgggcgataacacatattatacagagcaggaaactccaagtacacctgatgaacattttgcgggttcactcttcttctctgatggtggttataggcttctgcaaactttaactggtggatcgagaatgccatcccttgtaataattgacccaattcagcaaaagcattatgtctttccagatgagattgaatttacctacccttctttagcaaattttctcgaccattttatgaatcgaagtctatctccatattatcgttcagccttatctgtcataagttcgaaggagcttctgagaccaccttttattaaccgtgatttccacgaggcagattccatcccccagttgacaacaagtaatttttgtatgttggtctttggatttgaaggttgtgtttcaaaaagtgaactgccgttttcaaacactgaaaatatttcatctgcttggaagaaggatgtattggtgcttttcagcaactcttggtgcggattttgccagcgaacagagcttgttgtccgtgaggtatatcgatcattcaagaacttttgagttcaaattctcaatttttacaggctcaagacttgcagattgaagagaaagaagaagaatctaccatgaagggttttccagctatttatctaatagactgcacatcaaatgaatgccatcatttactgaaatcagttggcaaggaggagcgttatcccacattgttgttttttccggcagagaacaaaagtgcaatatcatatgaaagaggaatttcagtttctaatttatttgaattcttggagtctcatgctagcaattcaccccacctgttggaatataaaggatttctgtggaagaagaaagcggtcgtgcaaggtgatgcaccacaggcaattcagtttgataacagcgacaaaatcagcaacgatgttggttcccattcaccaagtcattcagagaggaacgaggcacgtgtcctcacaggttccgtgctcactgcaacttcgaagctcgggtctgccgttccatttgacaactcccaggtgctcatcgtatccgctgactctcgtgagggctttcatggcttgatcatcaacaagcgcttaagctgggacaccttcaagaatctggacggctccatggagccgatcaagcacgccccgcttttctacggcggacctgttgtggtgcagggctattaccttgtgagcctttccagagtagccttcgatgggtacttgcaggttatacccggtgtgtattatggaaacgtagccgccacagcccaggtcaccagacgaatcaaatcaggggagcaatctgctgagaacctgtggtttttccttgggttctcgaactgggaatacagtcaactatttgatgaactatctgaaggagcttggcaagtgagtgaagagcctatcgagcatttggtctggccagagaattaattagggcattcctcttctatttttagagaatagactagagttttgagggttcccgaattgcaagtgttccatgcacatacatgctgacactgcaatatgacgttgtactgcactcttttttttttttggatcagacaagacagcattacactaacagttttgatatttctactactgaactgtactgctttctttgtggattagaaaagacaacattgcat

SEQ ID NO: 26026 - DNA, 1536 bp, Oryza sativa
  ref <308>: DATABASE ACCESSION NUMBER: AK101468
  ref <309>: DATABASE ENTRY DATE: 2002-08-28
ctgaaccagatccccgatccgttctctccctctttcctccttcctcaccgtcgctgccgtcctccccggcactcccatccctttctcctccatgccgcacccctccccatcgtcgcagccgccccgtcgcccctgctcgcctgcatccaccacaccgcctccctccccagtcgagacggcgttgcctcctcgccccctccgcagccagattgacaccgcgccgttcaatccaccgcctcaagcaccatgcatcgtcgtcgttgcaggcgtcggcacgggcgcgggcgctgccgatcccgagtcgagacgacgtcgtccgctgctgcttctccaccactgacggttgccctgcgtatatcctccctattatcgcggtccccatctgctcctgaatcctgatccacaaaaacagcggagcgccgtcggcctctctgcctccctgcgaccaccagtggcatctgccccgccgtcggctcttcctcacccgcgactcgccgacgatggtgctccacaaaccattcaggccgtcactggtctccggagcgcccgaggccgacgtgtctcgcactccctataatcttgctttgctgcatcagtaacaacatcataacatatcgtggttcatacaatggatcaggctggtaattcgattccaattcttgctcctgaacttttttattggtgattccctctaatgttcagcagattgggtttggtggtggcagtgccgcaccactgatttgtgttagacattggtccttatccaaccctctaatctcttgattatgctcacttacgatgacttcagctcaggtggttgcaagaaacactcctagactgctatttagttttacgttacagggatttggctacagatagttgcaagctgcaatgttctgatatttgttatgttttagagcaagatctgccttatatataatgttataattaggcttcgaatttcttgcttatgttctttaaaaattccaagtaaccttttcagttctttctgtcaggttaattgacagatcgagttgcacttacacatatcttgttttaggaaatgctccaatggcccttgaatccagcaaaattggtagttcctctcgtcctccaggcaccagctatagacaatatctatacctcaaggaagcctcttcatgttcccctcaatatttctttctgggtgcatgcactctatgcttgctatgcaaaacccaatgtatgtgaatgtgatccttatgctgcaaaggtgctactataaacacttcgttcttttatctatttatttaaacattctttgttggtgtcggtgcattgcctctgaattttagatcttttttagtgcaaaatgcatatgaatgtgtggcattgatattcccttggagatgaaacaaggtattcagtgtttgcaaattaacatttacgagtaggatttacctagctagcatggcctctttcatagccacttttgcatgtatgaatctttgtaaattgtggtcctataggcaaatagaaaggtaaaattacgtgatc

SEQ ID NO: 26027 - DNA, 1403 bp, Oryza sativa
  ref <308>: DATABASE ACCESSION NUMBER: AK101469
  ref <309>: DATABASE ENTRY DATE: 2002-08-28
ggctccgcctccacacacaccccaccgccactcggcgccgccaccccgcaccaggtaagggaggaggagtaagaagatgtcgcacaggaagttcgagcacccgaggcacggatccctcggcttcctcccgaggaagcgctcctcccgccaccgcggcaaggtgaagtcattccccaaggatgacgtcaacaaaccatgccacctcacctcctttgtcggttacaaggctggaatgacccacattgtgcgtgaggtcgagaagcctggttccaaactccacaagaaggagacctgtgaggctgttaccattattgagacacctcctattgtcgttgttggacttgtggcctatgtgaagactccacgtggcttacgcagtctcaactctgtctgggctcagcatcttagtgaagaagtaaggagaaggttctacaagaactggtgcaagagcaagaagaaggctttcaccaagtatgctctcaagtatgatagcgatgccggcaagaaggaaatccaaatgcagcttgagaagatgaagaagtatgcttctgttgtccgtgtgatcgtgcacactcagattaggaaaatgaagggcttgaagcagaagaaggctcacctcatggagatccagatcaatggtggtaccattgccgataaggtggactatggatacaagttctttgagaaggagatcccagttgatgctgtgttccagaaggacgagatgattgacatcattggtgtcaccaagggtaagggttatgaaggtgttgtcacgcgttggggtgtcactcgccttccccgcaagacccacaggggtctccgcaaggtcgcctgtatcggtgcctggcatcctgctagggtttcctatactgttgctcgcgctggtcagaatgggtaccaccaccgcactgagatgaataagaaggtttacaagatcggcaagtctggccaggaaagccatgctgcctgcactgaatttgacaggactgagaaggacatcactcccatgggtggcttccctcactacggtgttgtgaagggcgactacctcatgatcaagggttgctgtgttggccccaagaagagggtcgtcaccctccgccagtccctgctcaagcagacctctcgtttggcgctcgaggagatcaagctcaagttcatcgacacctcgtccaagttcgggcacggtcgcttccagaccaccgacgagaaacagaggttcttcggcaagctcaaggcttagtttgtgcggttcctcagcaaagtcagaatttgtcaaaacgatcatcactactctatacttggttctcttctcttgatattttctggggtattaagttttgtagcagatgtttcaggacctgttgatctatgaatttgtgctcccttctgctgtccct

SEQ ID NO: 26028 - DNA, 2743 bp, Oryza sativa
  ref <308>: DATABASE ACCESSION NUMBER: AK101470
  ref <309>: DATABASE ENTRY DATE: 2002-08-28
ttggggtttccgtggggttctcttctccgcctccgaatcccctcttcagatccgcccattgttcttcctccgatcctctccccgttcccagttcctctcctgattcatcagcctcgccgatctgccccgctgcttcttctgatcgatcgatcaaggtacgcatcataaaccccccgatgcgttcattccagtatatgttccctgatatctttgttcggatcgaggaattccggttcgtattgtcggaatttgtcacccaattcgcacgtttattggaatatatgctatgggggatgtgtgagtttgaattcttcgtgccgtcttcgatctccccccttccgttcgactgcgccgtgggcgtcgccgctgcggggctcccgacctcgagatatcgggcgctcccccccccccccttctttccgctctagctcgtcgatctgctgctcctcggctcatatcccctccaccgcgccgcgcgcgcgaccggaggaggagggagggcgaaccgaggcagcggaaggaaggaggagtggagcgattgcgcggcggcgccatgaggtggatgcgaacggacggaaggggagaaagatagatagcacggaacaaaacaatccgcatccctgttggtaaattctagaagccgccgcgaattagatggtaaattccgaaaatggttacgaattaattgacatataacggaatttcttggtttggatgtgtgtctgtggagctcgattttggtagccgggtttaatatgacaggctcgaaggaacaccatagagtaaaatccataaacccacaagttccattgtatgaattaaattgtaggtcttaggtttttgagacagttcgttgcaaaaacccagttctagaattgtaaaatttacttgaaattatgtgatcacaaatctaagatccatatagatctgttgatgttatggtctgatactctgatcacttctggtgtataactaatcccttttgagctgttatgtgctatgctttgattcggccaattggtcgctgcaaattttgctctagtgctgttgctgacttgctgtcccacggtggtgggttcgaactagattgttactgcacatgttcacgtagacttcgatataatcattgtttggaccagctaatgtagactatagttatgattggacagtattcctagtccatttctgagtatcgaaacaggaaatttatattgttggaaaaaaaatttgctaggcatgccgcatcgtttatctgaagattattattatcagcatttccagtagttttgctgatacagattccacttaattattatctacatcaaaatttcactagattacttgttatctgcttctttgtgattcgtcctgatttactgttccatctgcatgttagttactctgtaaattcaccacttcttatatcaatggccactggtttcagccataacttgaacactgaaatctagcagtttaaccgacatcctaacacaatcgacctatatgtatgtggtggctgtttgctagttgtttacttcatgtttatcactgcagctagattattaccatctacaagcactgtgcatatcgatttccatgtatagttgtgacttctcgtgctcacttatcatgtttggttgtttttgtacgtgcagatgccgatgcacatcgacatcgtgcaccgcctctgtggtggccagcttgttgatctcaacagggtgaatgcaggccctgaccataaccgcggggtgccagccaatggtgcccagcagtttaactggtcagggttcagtctcatgcttggtgcagcccagataatggttttggcttggcaagtgatacatgtgccgtggcctctgctgcctcaggctatatggttttcaaatcgcttttcctgtatattatcattggcacggtgacaacaacaaccaaggtgcagcagcaccagcaagtgcaggagcaggacggtaaggcacataccaccacttttgttgcaaaccatcctatatgagttgctggaaatgcatcaaccatgctttgttgaaaattctataccacaggatgcgatattctttctaattaacctaaaattgattttattcttacaaaactcgtgtgtgctgccctgaaaccctcagtgtcatgttcatgccatatgggatcccatgcgagtaaacattttcacacaccattcataaattgggttgtgggtgtaaccatacagaacttacattactcttgcaacgtgcagtgatggtgaataatgctgtggaggagaacaccattccggatgggggcagtctagcctggagcggctacgccatgattgtcttatcagtgttggccttgtggtctgggttcgtcagtgaaccagtggcggtcttcctggccttcgtgcttctgttgcttggttgtggctttcttcacgtcgccatgctcgcaccgtccaagcccaagatgctctgatccacggcgatactaagaattttgggtattgtgtgttcataggtttcacagaaggatatgaaaacaaaacaaaaaaaaggttatgcgtgtatgttatgtgctccatagaacaccaatcatgaatgcatatatttataggagtatttgggaactatgtacagtaccttactgccttgtatacatagaggatagaaccttgtgtgaaatatgtgtaattaaaattcatctgggcctcctgatatatcatttattactgcaagtcatattacatttcacc

SEQ ID NO: 26029 - DNA, 2463 bp, Oryza sativa
  ref <308>: DATABASE ACCESSION NUMBER: AK101471
  ref <309>: DATABASE ENTRY DATE: 2002-08-28
gctacctcacctcaccatacagctgctttctctctctctctccatccacccgaagcagaatccccaaaacaacagcgagagaaaaaaaattcacgcggcgaagccaaaattttttgttgatttcgatttggacataaaccctagctccaatctccccatcgccgcgtcggccccgaacccgtgcgcccccccatcgctcgctgaatcgaagggcgcctaccagtcgattcccccaagacgaggtaatccgctcgaccccctcgagagagagagagcctgggagagaaatcggtgttgttttctgctgaatcgatcgggttggcgggcgatttagggttttgggaagggtggctcgccgccctctccgaaggggactagcctgcgcgtctcgatctcgcggggagctagggttttgtgatccgagtgcgaggagggactggtgtcgccctggttctgatgagaattggcagtggaatgctcagattggctgccggcgacgacgagaggagcagctcccttggcagcggcggcggaggaggcgccagattcaccgcccccaaggtccgcacgcgcgataagggcgcgctcgtggccctctgattcgaggagggttgctggtgcgtagacgtggagccttctctgaggagagtgggagatgacgaggatcttcgtgcagcgcggggctgccggctcctcgtccagctccagccgctcggggtcacagacactgcagcagcagcagcaactgcaggcgacatcagcggttgcccgggaggaggagctgccgccgcagcctcatcagcatccatcggagctcacggcttcagacaatataactgaccatctagtggaggatgctgataacagcagtaatagtaataagccattggggctagatgatcccacatcagagagttcaagctctgcagaggagagggctgttatggagaaacctcccaaagacgactccagtgtgatcgatcctgctttcttggtggaggaattaacaggcctccagttttctgatcagtttgagcaggaaaatctagtgcagtcaggtattggtccatcacagattgctggtgcagcatcacacccaccacctccaccagctccaccagccccaccaccgaaaccatcgtctggtaataatgggttaaggagaatggggtctggaagctcaaacaatgcacggattggatcttcaagaaggccagttgcttggccaccagtggcagttcggtcatctgcttcgggttcccgaccttcttcacctagatcacttgctgatagtgaagggtataatagtgcagatgagcagggcccctgttacgcctctaattattatgattcggaaagggagcgcatgtttgaacatgacctaagacgagtgagaggatttgaaatcaataagatggctgaagatgggaattgtctgtttagagcagttgcagatcaagtttatggtgatccagaagcttatgacatggctaggcagatgtgtgttgattacatggaaagggaacgtgatcatttctcgcagttcatgacggaaggttttacatcatattgtaggagaaaaagaagagataaggtatatgggaacaatatggagatccaggcatttgctgagatgtacaatcgtccgattcacatatattcctatagtacagagcccattaacatttttcaaggaagctacaatacagatgtccctccaattaggctaagttaccatcatggtaatcattacaattcggtggttgatcctcgtgggctgacagtaggggcaggcctgggatttagttcctttagagggacaaataacgttgacagggatcaggtgaaggctgcaataaaagcacagcaagatcagcagattgagaatgcacttctggctgaaggacgactatactctgatttggagttgacagagaaggaaatagagcggatggtgatggaggcctcacgagcagagtatctaaagcagcagcaacaacaacttaacttcagagagtcatcaacatcaggggcagagccatcttcttctgctgcgattagtgggtcttctcggtcagctgggactgccgatagagttggcgaggagtgcttcgttctcccggacaccgtgctaacccgcagcatgcagctcctcctggcaatgggcttcaactacatccaggtcatggaagcctatagcatatttggcgaggacgtcgactcaatgatctactaccttgtggagatgggaggcaccggagcctctgcaggtggtagcaatcgcaggaaaggaaaagctgctgagtgatctgtgtacctttcaccggctatgacgaatcgaaataaaaatagttatgcataagccacaggagagggatggcaagactcgtggattaaatgagctgaaatgtcaatatactttccactgtatggagtgataacaaaataaaattcacttcttcc

SEQ ID NO: 26030 - DNA, 790 bp, Oryza sativa
  ref <308>: DATABASE ACCESSION NUMBER: AK101472
  ref <309>: DATABASE ENTRY DATE: 2002-08-28
ttgggcgacgacccgacctacccctactacttcaaggtccgggtgctcgatcgctcctctctctctcctcctcctcctccctttgatctctctcgatttggttgggggtggtgctgattggtggtgttggcgcctctgttgttgtggtggatcgcagctgcggtgcgagaactgcggggaggtcagcgccaaggcaacctgcgtctccctcggcgaggtcgtcgacctgcccaacggacgcagcaccgctaaccttgtccagaagtgcaagctttgtgggagggatgcatcgattgtgatgattcctgggcaggggacaccactgactatggagcagagccaaaaaggagatagaacttgtttgatggtctttgactgcagaggctgtgaacctattgatttcgcttttggtaatggctggaaggctgaatctctggaagggacttcatttgacattgactgctctgaaggtgagtttgctgattacgatgagaagggggagtgccctgtaggtgtgggcaagctgcggtcagaattcagagtggtgaagaagcaggagagtcgtgggaagactaaatatgtctagatccagcggcatctggggtattcaatcatacaagctgggaatgtataaagcgtattataaaatgagacctttctctcgtatgtgtgaacaaaactcgggaacatccttttgctgatgctgtgggatgccaatggatttggcgacatgttaggcaccgaaccatccattattccctaccagttccattaacctggatcatttcgc

SEQ ID NO: 26031 - DNA, 2664 bp, Oryza sativa
  ref <308>: DATABASE ACCESSION NUMBER: AK101473
  ref <309>: DATABASE ENTRY DATE: 2002-08-28
ggtgctccaccaccggtgaggtcacggccgccgcctccgcacctcgcggactgctcgccggcgcggccggtgcccggcggctctcggttcctgccgcgacctcaccgctcagcccggatgtcctcctctacggataaggagctgcacgacgcacagtgaatgatgtcctacagtcagctgatggcactttctcctgcggcttcctcaccatctacagcaatgcttttgccttctcaatatggtataccaactcaaaaaacaagactgttgtctggaccgcgaaccgcggacgccctgtgcatgctaggcgctctgttgttaccctgcagaaggacggtgccatggttctcaaggactacgatggcactgtggtgtggcaatcagacagcaactcaattgatgtccagtatgctcaacttctggacactgggaatcttgtcatgaagaactcgagtggtaaggttgtatggcaaagttttgattcacccacagatactctgctaccaactcaaaaaatcactgcagctacaaagttggtctctactactggtttatatgttcctggtcactacacatttcatttcacggattcatcaatactgtcacttatgtatgatgatgctgatgttcatgaaatatattggccagatcctgaccgtggagagtatggaaataagaggaaccgttatatcaatactaggatggggtttcttgatgataatggggattttgtttcaagtgatttcgctgatcagcaaccattttctgcttctgataaaggttcagggatcaagagaaggcttactctagaccatgacggtaatctccgtctctacagcttgagtaatggggaatggttggtttcctgggtcgcaatatctcaaccatgcaatattcatggtttgtgtggtccaaatggaatctgtcattactcgcctacgcctacatgttcttgtccaccaggctatgaaatgaatagtcatggtaattggagccaaggttgtaaggctatagtagacatctcctgtagtgttgcaaaagttcagtttaagtttgtgcatcttcctgatactgacttctggggatctgatcaacagcttgttaaccatgtatcttggcaggcttgtatgaacatatgcaggagtgattgtaactgtaaaggttttcagtacctaaaaggggaagggacatgctttccaaaatcattccttttcaatggaagggcatacccatcacactttgtgtcaccacgcaatatgtatcttaagatccctataagcatgaatatttcaggtatgccagtatcccaatccaatgtgcttgattcaagaaaacatagccttaattgtgatcagatggatgaaaaaactagggaactatttcccgatgtgcacaagacaagtcagggagaaacaagatggttttacttgtatgggtttgcgggtgcgatttttattcttgaagttttctttattggatttgcatggttctttgtttcaagatgggatctggatgcattagaaatacaagcagtcgagcaaggttacaaggtgatggcaagtaatttcagaagatataattataaagagttggctaaggcaactagaaagtttaaatgtgagcttggaagaggaggctcaggtattgtctacaagggaaccttggatgatggtcgagtagttgctgttaagatgctggaaaatgtaaggcaatgtgaggaagaatttcaagctgagttgcgcataattgggaaaattaaccatatgaatctggtaaggatatggggattttgctcagagaactcacacaggatgctggttaccgagtatatcgagaatgggtcattagctaacatactgtttaatgaaaacattttgctagagtggagacagcgatttaatattgctgtaggtgttgccaaggggctagcctatctccaccatgagtgtctagagtgggtcatccattgtgacgtgaagccagagaatatcctgttggacggaaattttgagcctaagatcgcggactttgggttggcgaagctcctaaacagaggcgggtccaatcaaaacgtgtctcgagtgcgagggaccataggttacattgctccagagtggatcagcagcctgcaaattactgcaaaagttgatgtgtatagctatggagttgtgctgcttgagctggtgtcaggaaagcgagttctggatttggctacaagtgctaatgaggaggtgcatgtagtgctcaggaggcttgtaaagatgtttgccaataacttgagtggaaatgaaccatcttggattgcggagtttgtggattgcaggctaagtggccagttcaactacacgcaagtaagaacaatgatcacactggctgtcgcgtgcttggatgaagaacgaagcaaaaggccaacaatggaatctatagtgcagctgctccttttggttgatgaatcttgtagcagtaatgttctatgtcctgagatgccaacaaggtggacaactggacacgccaaggcaaatgcaagtttttgtattcatagtttgtagttctatctcattgtatggaaattcggaaactcttgtacttcaaactctaggcattcatttattcagatgtgctgcatattccttcacaaattataataaagtatgctattcaagg

SEQ ID NO: 26032 - DNA, 1520 bp, Oryza sativa
  ref <308>: DATABASE ACCESSION NUMBER: AK101474
  ref <309>: DATABASE ENTRY DATE: 2002-08-28
gacagtaaactgaccaacgcaaaccgcatcgatcaactccttccccaagtcgaagcaaaatccctagcgatgtcgtcgccgccgcccgccgccgccgccgcgatggccgtcgacgacgccgacgacgaccagctcgcctccatgtccacgggggacatcgtcagggcaacccgcctcctcgacaacgagacccgcgtcctcaaggatgagctgcagcggacgaaccttgaggtggaatcctacaaggagaagatcaaggagaaccaggagaagatcaaactcaacaagcagctgccttaccttgtcggcaacatcgtcgagatattggaaatgaaccccgaggatgaggctgaagaggatggtgcgaacatcgatctggattcacaaaggaaaggaaaatgcgttgttttgaagacatccacaagacaaacaatattccttcctgtaatcgggcttgttgaccctgaaaagctcaagcctggggatttggttggagtcaacaaagacagctacttgatactagacacgctaccttcagaatatgattcacgggttaaggcaatggaggtagatgaaaagcctacagaggattacaatgacattggtggccttgagaaacagattcaagagcttgttgaagcaatagtattgcccatgactcacaaggaccggtttcagaagttgggaattcgccccccgaaaggtgttcttttgtacggaccacctggcactggaaagaccctaatggctcgtgcatgtgctgcccaaactaacgccacatttctgaaacttgctggtccacagcttgtccagatgttcatcggtgatggtgcaaagcttgtccgtgatgcctttcagcttgcaaaggagaaatccccctgcatcatttttattgatgaaattgacgcaattggaacaaagcgttttgatagtgaagttagtggtgacagagaagtgcagcgcacaatgttggagttgctgaatcagctagatggattcagtagtgacgagaggataaaggtgatagctgcaactagtcgcgcggacattcttgatcctgctttgatgaggtctggtaggctggaccgaaaaattgagttccctcatccatccgaagaagcacgagctagaattttgcaaatccattcaagaaaaatgaatgtaaaccctgatgtcaactttgaagagttggcacgatctacggacgacttcaatggtgcacaactgaaggccgtttgtgtagaagcaggcatgcttgccctacgccgagatgctacagaggtgacacacgaggatttcaatgaagggatcatacaagtgcaagccaaaaagaagtccagtttaaattattacgcttaattcttccgagagagttattaggcctaaggaaacgctccgtccaaaattgtttgtttgtaacactaccgttttatatatttgtgtggttcaagatgtgattgtacgaaacatgtcttgcgctgttccttctctgcttgatatatactgatagaagttgaccc

SEQ ID NO: 26033 - DNA, 1026 bp, Oryza sativa
  ref <308>: DATABASE ACCESSION NUMBER: AK101475
  ref <309>: DATABASE ENTRY DATE: 2002-08-28
gtcttgcattttctccatcaataatggcgggacgacgacgacgcccattcgctgctccggtcatcaactatctcctcctagccctgtggctcgccgcgtcgtcgtcgttcgccgtcgccgtcgccgtcgccggccatggccgcggtcgccgcagccatgtgtcgtcgatcgtgacggaggagatgtacaacaagtcgctgttcatccacaaggacgacgccgcctgcccggcgaggaacttctacacctacgccgccttcctccgcgccgccgaccagtacccgagcttcggcggcgccggcggccgcgacacgcgccggcgggaggtcgccgccttcctcgcgcaggtctcccacgagaccaccggcggctgggccaccgcccccgatgggccctacacctggggcctctgcttcaaggaggagctcaagccggcgagcaactactgcgacgccgccgtcgccgcgcggtggccgtgcttccccggcaagtcgtaccatggccgcggccccatccagctgtcgtggaacttcaactacgggccggccggcgaggcggtggggttcgacgggctccgggagccggaggtggtcgccggcgacgccgtggtggcgttcaagacggcgctgtggttctggatgacgccgcggccgccgtcgaagccgtactcgtgccacgacgtgatgacggggaggtaccggccgtcgagggccgacgcggcggcgaaccggacggcggccgggttcgggctgacgacgaacatcatcaatggcggactcgagtgcaacaaccgcaccggcggcgatccccgggtggaggaccggatcggattcttccggcgatactgcggcgcgctcggcgtcgatgtcggtgacaacctcgactgcgcacaccagttgccctactcataatcgcgatttgttcattgctactattacgacatcctttttttttgttttacttcttgatgatgtttaattagtttacttgattatgtttctttcaataatgcaaatcaaaagttcc

SEQ ID NO: 26034 - DNA, 2061 bp, Oryza sativa
  ref <308>: DATABASE ACCESSION NUMBER: AK101476
  ref <309>: DATABASE ENTRY DATE: 2002-08-28
gatccgattttcccgtcgagccctgcagaaatctttcaacagaaacagcgaactagtagtagatgtcatcagggaaaagaaaatgaaaaaaagaacaaaaaaaaaaaacagaacgaagacagcggcatgcatcgcagcataggccggtcaagaagacgatggccctgacgaggcgcctcctcatcgatctctcgtcaagacgccgccttttcaacgccggcaaattctccaccacgcacaagaagaaaccagtgctccatgaagcggtgagtttggctggattcttgcgctgctcgcgcgcgctggtgtcgtggatggtggcggagaggaagatgcagccatcgccggcggcgccgccggcggcggagcaccggaggcgggcgctgctgcgctacgtggtgttcctcgcggtctccctcctcgccttctcctgctgggctctcgtcagctcgcggatcgacggcgccgtcctcgcggcgaccgccggcggcgagcatgacgaccacgatggcattattgttagaagcagcacccaagcggagatgccagcgagaggcgggaacgcgacgtcgcgcggcgccgtcgaggtgggtgtgggtactccggcggcgatgatcacccggcagccgtcgtcgggagagacgacgacgacggcggcgttggcggcgacgtgcgacgcggagagcgcgctgctgagggtgtacctctacgacctcccgccggagttccacttcggcatgctggggtgggacggcaaggcggccggcgcggcgtggccggacgtggccggcgacccgcgcgccgtgccgcgctacccgggcggcctgaacctgcagcacagcgtcgagtactggctcaccctggacatcctctcctccaccacctccggcgaccaccgccgccgccgtccgtgcaccgccgtgagggtgacgaacgcgagccttgccgacgtgttcctggtgccgttcttcgcgtcgctgagctacaaccggcagtcgaagtcgccgcacggcggccatgggagtggcggccggagcgacaggcagctgcagggcgagctggtgaggtacctggcgaggcgggaggagtggcggcggtggggcggcgcggaccacctcgtcgtgccgcaccacccgaacagcatgatggacgcccggcggcggctcagcgccgccatgttcgtcctctccgacttcggcaggtacccgccggacgtcgccaacctgaggaaggacgtgatcgcgccgtacaagcacgtcgtcccctccctcggcgacggcgactcgccggggttcgagcagcgccccgtcctcgcttacttccagggcgccattcataggaaaaatggtggaagggttcgtcagaggctgtaccagctgatcaaggacgagaaggacgtccacttcacctacggcagcgtccgtcagaacggcatcaggcgcgccaccaaggggatggcctcctccaagttctgcctcaacatcgccggcgacaccccctcctccaaccgcctcttcgacgccatcgtcagccactgcgtccccgtgatcatcagcgacgacatcgagctccccttcgaggacgtcctcgactactccgccttctgcgtgttcgtccgcgcctccgacgccgtcaagaggggcttcctgctgcatctcctcagggggatctcccaggaagaatggacggcaatgtggaggaggctgaaggaggttgcacaccacttcgagtaccagtacccttcgcagcctggtgacgctgttcagatgatctggggagctgtagctcggaagatgcatttggtgaagctgcaacttcacaagcgtggtagatatcagaggacattttctgaatcataaaaggttagggtagcaaagcatggaggagattcagagctataggttgcagtttttgatcaataattttcatgtggctggtaaagttctatggtcattttgcaatctaagttgcaaggactatgtgcagccagtctttgtccaagaggtaattattagacagttagttataaattatattattcttattagttcttttatcccc

SEQ ID NO: 26035 - DNA, 2148 bp, Oryza sativa
  ref <308>: DATABASE ACCESSION NUMBER: AK101477
  ref <309>: DATABASE ENTRY DATE: 2002-08-28
gagcctccccccctcccccacgacccccaccccacccacgaactcacgaggagggaaatgctcccctaaaaatcccccaattggagcgaagcaccgccttgatcccttcctcccagccaagcctgcggccggatctgagctccgccgcgccgcgcgccctcgtagcgatggatccgcgcgcgaggtaccctcccggcatcggcaacggccggggcgggaaccctaactactacggccgtggcccaccgccatcgcagcatcagcagcaccagcaccagcaccagcagccgccgcacccgcaccaccaccagtacgtgcagcggcagccgcagccgcagcaaacgccgcacaacagccagcatcagcagtggcttcggcggaaccagatcgccgccgaggccgcgggcgccagcgagcagaaggcgccgcctgtcgcggacggcatagattcgagttcacaagactggaaggcccaactgaagctcccaccgcaagatacacgctacaggacagaggatgttactgctaccaagggaaatgaatttgaagactattttctgaagcgagaactccttatggggatatatgagaaaggatttgaaagaccttctcctatacaagaagaaagtattcctattgcattaactggcagtgatattcttgcaagagcaaaaaaatggaactggcaagactgctgcattttgtatacccgcgctggaaaagattgatcaagacaaaaatgctattcaagttgttatattggttcccacaagggaattggctctacaaacatcacaagtttgcaaggagcttgggaaacatttgaagattcaagtgatggtcactactggaggaaccagcctaaaggatgatattgtccgtctttatcaacctgttcatttacttgttggaactcctggtcgcattttagaccttacaaagaaaggtgtctgcgtcctgaagaactgttcaatgcttgttatggatgaggcagacaagcttctttctcctgagttccaaccgtctattcaggaattgattcggtatcttccatcgaatcggcaaattttgatgttctctgcaacattccctgtgactgtcaaggagttcaaggacaaatatctccctaaaccctatgtcattaaccttatggatgaacttacattgaagggaattacacagttttatgcttttgttgaagagaggcagaaagtccactgtcttaatactcttttttccaagctgcaaattaatcaatcgataatattctgtaactcggtaaatcgtgttgaactattggcaaagaagatcacagagcttggttattcttgcttctatatccatgctaaaatgttgcaagaccatcggaacagggttttccatgattttcgcaatggtgcatgcaggaacttggtttgtacagatctttttacaaggggaatagatatccaagctgttaatgttgttatcaattttgatttccccaagagcgcagaaacatatctccatagggttggtagatctggcagattcggccaccttggtttggctgtgaatttgatcacctatgaggaccgttttaacttgtatcgcattgaacaagagcttggaaccgagataaaaccaataccacctcagatagaccgagcaatatattgccaatagttatctgacagaacgatcttgtatgccaatctctggaagtaataagataacctgtgtaaatatcagctcataagaaaagtcttctgttcatcatcattgaatttcatgcaaatcaaggaccttcatgtcgtccgaaagttcatggagaactggttttggggcctgtaacattagctgaaaatgtcttcacatgcagacatttgtattgaggatctcagggtttgtcgtacagggctcgttatcctgcatctttagggtataaaaccagtaatgccattacaagaacaatataacttatgttggtactcgataaaatatctctttactgttgttgaaagcctctgaccagccagggtacaggcccagatttcccctgaatagttctcatgcgttgtacaggagtgctttctagagttgtattttgtgacatccttgttttcagttaaccctgaaggtagattaacgtgatattagctggcactc

SEQ ID NO: 26036 - DNA, 3198 bp, Oryza sativa
  ref <308>: DATABASE ACCESSION NUMBER: AK101478
  ref <309>: DATABASE ENTRY DATE: 2002-08-28
ggctgctaggcccgatccactgctctccccaccggtggtgagtcaccacgctgcgtggcaaaccctagttaaccggcgcggcgtccggcgaccgtacactcggcggaggccgcagagcggcagcggcaggcggcggtgccgccgagggcagtcggctcggctcccgcggcaaagcgggaacgggagagagagcagggcggcacacgcgcgcgctgaggctgcgcgcggtgggcgcggcgtccggcgatgcccgggcaagagctataggaaggcgaagtcgtgggctacagccccagtccccagtgctaaggcagtttctgattacccaagtgtagatgtgatggacacccatcacagcgatcaatatgcaaagagcagcctgcagctgcaattcagggacacctctgtttcctttgaaaacaacaattctgttttggataagcatgatattacaagccctcaagttggcatgacttttgagacagccgatttggcatatcggttctacttagaatatggctaccgtgcagggttcggggtctcaaagaggacttcccatagtgttgatggggtgaaataccgtgcaacatttgtttgttacaaaggcggcattgctaggatcaagcctggtctcaaagctcgaaggaggcttgttgcaaagactggttgcaaagcaatgatggtagtcaagtataacacaactgaaaaccagtgggaggtagtttttgttgagctggagcataaccatccatgtaatcctgaaatggttagattcatgatgtgctttaaagatctccctgactggcagagggagcaccgcccattcaatgccaagactagattgaatccaaagattcactctggcagaggcaggccacccaaccaaaacaaagacttcatggtgaaaaaaaccttctcacaatcaaattattccattgaagcagcaggcaaggctggaaagctgagatttgcagagggtgatgttgaggcactcttggtcttctttgataagatgcaagctcaaaattcaaactttttctacaactgggacatggatgatgaaggtcggctcaggaatgtttgctgggtcgatgctagatcgagagctgcataccagcacttctgtgatgttgtttgctttgatactgtttatttgacataccaatttgtcattccattggttgcttttcttggaatcaaccatcatgggcaatttgtgttgttgggatgcggtttacttggggacgaatctccagagactttttcttggttattcaagaaatggctaaaatgtatgaatgataaatcacctgaagcaattattaccacccactcaagaccagtggtcaaagctgttgctgaggtatttccaaatactcgtcacagatacaatctttggcatatcatgaaagagcttcctgaaatgtctggaagagttgaggataaggaggcaattagcctaagaatgaaaaaggtagtcttcgacactattacatcaactgattttgagagggaatgggttgagatggtcaatcagtataaccttcatgataatcattggcttacaaccttatttgaagagagggcaaaatgggtaccagcatatgtcaaggatactttctgggctggtatatccactgttcgccgcagtgagcggttggaggcctttttttgatggatacattacaccagagaccacaattaagacatttattgaacaatttgatactgctatgaagcttaggtctgaccgagaagcgtatggtgattttcgctcatttcagcaaaggcctcaagtcttgtctggtctactctttgaggagcaatttgcaaatgtttatacaataaatatgtttcagaagttccaagatcacttgaagcagctgatgaacgtgacttgcactgaagtcagtaggaatggatcaatagtgacttacactgtgaccgtcattggtaaggagaggaagtatgactacaaagtgatgtataacagtgctgagaaagaggtgtggtgtatctgcaggtccttccagtttaaaggtattttgtgtagccatgctcttgctgtcttgagacaggaacttgtgatgctgataccttataaatatattctcgatcgctggaggaaggactacaaatgccccgaggaatccaaggaaactcccatctcaccaaaagcgatcaaagctacagggaagggcacaaaaccggaaaatgcccgtgaagataaagtggacaatctgtacaagcatggtcaccagtactttgctgacattgtggaaatgggagcaacggaccctgatgcaatggagtatgttttgtcggtcatgaaagaagccaaagagaaggtacggaagttcgaggaatctcgaaaagatagaaggcctggagacagtccagtttctactggtaagagaaatggcaagtcttcaagaccatccaatgaggatgggggcaatggcatatcagattcaacacctgcgactacaacagtggcgacagtcgcggtggccacatctacaacaatgcaggcaacgcctacaatggtggctatagcgcctacttcggcaactgtgcccgccggaatgtttttggtaccaatgcacccacatccgatggttttcccacctttcacccctgcagtaccaccagtggtagcacctgcagtgccacctccagcaccagcagccaatgtgggtgatgtggcttccaactccacaaggaagagaaagaaaagaaaggggaacaaatgatgttcctaatactgattatgcctaactcaaatttagtcctacaagctgcaccaggccctcctgtccatgtgtaataatggtttatcatcgtctcctgctgcaggatgatctgcccctctgaatgctttctgtgaattatcccccttgacttggaactgtccgtgcagctttggactgtctactgtaaattgatatggaaagtaatgtattatgtatgtagtgcagcttaggaatgttagtctctgtttctgctcatgtggattgcgacctggagcagcgcagtaccaagactaccagtagcgtagcagtaccccttgctggttggtagagtaccattttctttcctttctggagtttgtcactttatgtaatgatgtaatcacactgaactttattgccaaccactaatgcttagtttcatcttatgccgttggctgttgcactg

SEQ ID NO: 26037 - DNA, 3514 bp, Oryza sativa
  ref <308>: DATABASE ACCESSION NUMBER: AK101479
  ref <309>: DATABASE ENTRY DATE: 2002-08-28
ggaccccgaaaaatcccccacaaaaaaaagaaaaaaaaaacccaaaccccctcgcgcggaggccgagagagatcccccgctccgctccgatccccaggcgtgcgcgcgtgcggggctcgccgcgcgtcgcatggtggcggcgcggccgccggagcacacgcctcggcctcgataccccccaccacagccatggcggcggcggcggacgcgcggcgcttcgcggtcgtgccgcagctagatattgcgcagatactgaaggaggctcaacaacgatggttgcgtcctgctgaaatttgcgaaatacttaaaaactacaaaagtttccgtattgcaccagaaccaccaaacaggcctcaaagtggctcgcttttcctatttgatcggaaagtattgagatactttaggaaggacggccataattggaggaagaaaaaggatggaaagactgtcaaagaagcacatgaaaggctgaaatctggaagtattgatgtgcttcactgctactatgcacatggagaagagaatgagaacttccaaaggaggacttactggatgttggaagaggattttatgcacattgttcttgtacattatcttgagaccaagggtgggaaatctcgtactaggggcaacaatgacatgcatcaagcagctgttatggatagtccattaagtcaattaccttcacaaactatagatggtgaaagctcacttagtggacagttctctgaatatgaagaggcagaatcagatgtttattcaggaggaaccggataccactctttcactcagatgcagcagcagcaaaatggaattggacctgtgactgatgcttctatgttcagttctcgtgtttctgcttcatccataggtaattatcagggacaacatgctatgggacatacaacaaacttctattctagtagtcaacatgattcacctcttgttctcagtgatccaaaccttgaacttgcaaataatggacatgagtcattgtggaatggggttatgaaacctgatgaagggactgttcaaatgactcatctacaacctcctgttcatcctgagcaaggcatgttcaccacagaaggccaaggggttgaatatttgacattcgatgaagtatattctgatggactcagtctgaaggatataggtgctgcaggtgctgatgtagaaccattctggcagctctctagtgctactgctgatatatctgcaacagagaacagcgtccaacaaaatgatggatctctaggggcagctattggcttcccatttttgaaaactcagtcatccaatctatctgacatcctgaaagacagctttaagaaatctgacagttttacaagatggatgagcaaagagcttcttgatgttgaggattcgcaaattcagtctagctcgggggcatactggaacactgaagaggcagatagtatcatcgaagcatcaagccgtgagccactggatcagttcaccgtggcccctatggttttgcaagaccagctattcagtatagttgatttttcgccaagctggacatatgcaggctcgaagaccaaggttttagttactggtagattcttacatgctaatgaagtcacggagagatgcaagtggtcatgcatgtttggagaagttgaaattcaagcggagatttcagcagatgggactcttcgatgttattctcccccgcataaaccaggcagagtccctttctatgtcacctgttccaacaggttagcctgtagtgaagtacgtgagtttgaatttcgaccaagtgactctcaatacatggatgctcctagcccgcttggtgcaaccaacaaagtttatttccagatacgtcttgacaacctattgtccctggggccagatgtgtaccaagctactataactaaccccagtaaggagatgatcgacttgagcaagaagattagttcactgttggcaaacaatgatgagtggtccaagttacttaaattggctgatgataatgagcctcttagccatgatcagcaggatcagtatgctgaaaacttaattaaggaaaaattgcatgtctggcttctccataaagtaggcgatggtggcaaaggacccagtgtgttagatgatgaggggctgggtgttcttcatcttgcagctgcccttggttatgattgggccataaggccaactgttactgctggtgtgaacataaatttcagagattttcatggatggactgcattacattgggctgcattttgtggcagagaacggactgtagtagcacttattgcactgggagcagctcctggagctttgacagatccacatcctaattaccctgctgaaagcacaccagcagaccttgcatctgctaacggacataagggcatctctggtttcctggcagagtcctctctgacaagtcatcttcaagccctcaatctgaaggaagccaatatgtctgaaatatctggtctacctggtattggagatgtaactgagagaaatgcatctcagcctgcaattggagattccttaggtgctgttcgaaatgccgctcaagctgctgctcgaatatatcaagttttcagggtgcaatccttccagaggaaacaagcggtccaatatgagggtgacaaaggtggcatatcggacgaacacgcactttcactcctgtctatgaagccatccaagtcaggccagcttgatcccctgcatgctgcagcatctcgtatacaaaataaatataggggatggaggggagaaaggaatttcttctcttcagacaacgaattgtgaagatccaggctcatgtgcgaggccaccaggtgaggaagcattatcggaaaatagtttggtctgttgggatagtggagaaagttatattgcgctggaggcgaagaagggctgggttacgtggttttaggcctacagaaggtgcaatagagagcagcagtggtggcacaagtagcaatttggtcaaagataaacctgctggagatgattatgatttcttgcaagaaggacggaagcaaactgaagaaaggctgcagaaagctcttgccagagtgaagtccatggttcaatacccagaagcaagggatcagtaccaaaggattttgaatgttgtttcgaaaatgcaagagtctcagaccgtgcaagaaaagattttagacgaatcaaccgagatggatgaaggtgatttcatgagtgaattcaaggagctgtgggatgatgatacaccactccctggttatttctagtgttctagactaactggtggtgtctctgtaaatctcttctcttcagttctgctgaattgacacctgccgataacccaaactctcaacatagcatgaatagcatgatcttaaaatcttgaatgcttggatttggattcagttgtggtattcttgcttttatgttatagcgttatgtacagtagaatcttattttatcattgaaggagccatgtatatgcagtatgaaactaatgcagaaagttggtggttgtatc

SEQ ID NO: 26038 - DNA, 2178 bp, Oryza sativa
  ref <308>: DATABASE ACCESSION NUMBER: AK101480
  ref <309>: DATABASE ENTRY DATE: 2002-08-28
gggggttggtgagttggtctgttggtggccggggcgcgggcgcgcttacctgttctccctcgcgtggagctctttgactacgcccgccagctgcgcgtgtgtataaccttgcttgcttgcctctcacagccgaagtcgcaggcgcagtcaggagctatcgggaaaacgggatttcccccagctttccaaggttcgcgggtcaatctcgcagtgatactccggcggcggcaatggacgccggcgaaatcatcgtggcccagccatcgccgcggctgtataagagtttgactttccggaggatcgcgacgaaggaaaggaccattccccaggatgaagagatgaagattcgcagcccgaggttccaggacgaaagcctcactgcgccatttatactagacaagaaagcgaggagcaaagcgccaacagtggtcctaggattcgagtgcttggagagcacagcatttaacggcattgccacgaacctggtggtgtacctggagactctcctgcacggcagcaatctcgcgagcgcgtccaatgtcacgacgtggttcgggacgagctacctcaccccggtgttcggcgccatcatcgccgacacgttctggggcaactacaacaccatcctcgtctccctcgtcttctatctccttggtatgatgctggtcaccttctcggcgttcctgccgaccaccgcgctgtgcaccgtggtgggctcgtcgtgccagcagccacttcttggcgcgcagaccatcgccttcctcgggctctacctcgtggcgttcggaagcggcggtgtgcgcgcggcgctgctgccgttcggcgcggaccagttcgacgatgacaacacggccgaccgcgagcgcaagatgtccttcttcagctggttctacatctgcgtcgacttcgggatgatcgtgtcgggccttttcatcgtgtggatccagcagaacgttagctggggacttggcttcggcatcgccacggcctgcatcgcgctcgccttcggcggcctcgtgctcgccacgcccatgtacaagcgccgcatgcccacaggcacgccgatcaagagcctcgcgcaggtcgtggttgccgcgtgccggaaggcaagactccgtgtccccgcggacactactcttctctacgaagtccatgacaagatcaaccagtcgaagatagcgcacaccgaccagttcggctttcttgacaaggccgcggtggtcatggagtccgacttggaagaggaatcgaacgacgtcgcggcggatgcctcgtggaggatctgcacggtgacgcaggtcgaggagctcaagatcctgctgcggctattgccgatatgggcgacgagtatcgtgctttcggcggcgtacgcgcagctgaacacgacgttcgtgcagcagggcgccgcgatgaacatgcggatcatgtcgttcaccatcccgcccgcgtcgatggtgtccttcgaggtgctctgcgtcctggcatgggttctcatgtacagctccgtgatcgtgcccatgctcaacagcttatccctggccaacggcgagccgtcgcagctgcagcggatgggcgcggggcggctgctcatggcgttcgcgatggccgtcgcggcgctggtggagatgatgcggctggacgcggcggggcgcggcgagtccctgagcatcgcgtggcagatgccgcagtacttcgcgctggccggcgcggaggtgttctgctacatcgcgcagctggagttcttctacagcgaggcgccggagtccatgaagagcatgtgcacgtccctggcgctgctcaccgtggcgctgggaagctacatgagctcattcatctacgccgtcgtgaacgcgttcaccgccgtggacgggcggcccgggtggatatcggacaacctcaacgaaggacacatggactacttcttctgggtcatggcggcgctgtgcacgctcaacttcgtcgtgtacagcgcgttcgcccggacctacagggtgaagctggtcgtgtcgtgattgttcgttactcccttaccatgatcaggttacacgcaatcgtggtcgtattgtgttacagaagaatcttgtactcctagctagcaatagcgacagccgacagtatgtgtaaagttcaaggaaaaaaaacaaggtttgatgggctgacagcccagcagcttccttt

SEQ ID NO: 26039 - DNA, 1877 bp, Oryza sativa
  ref <308>: DATABASE ACCESSION NUMBER: AK101481
  ref <309>: DATABASE ENTRY DATE: 2002-08-28
gaatcccaacaagcaaaccgtctcatcttcttcttcctcctcctctgatcttctcctccttgtcatgcgatcgagctttgctctgctctggcaatggcgatgaacaagctagtcggcgccgcggtgaggcggcctgggtgggccgacctcccgcgggacctcctcgagtccgtgctcggccgcctccccgtgccggaccgcctccgcttccccggcgtgtgcacggcgtggcagtcggctgatgcggcctccgccaccgcacggtttcgcgccgcgcagccgccgtggctcatgctcccgttcaacccgacggcgcgcaggcagagcccgagcggcggcggcggtggggatggtaggttcttggaggcgaggttcttgagcctctccgatggcagggcgtacgccatcccgcagccggcgccgccggtgtctgagcggctatgtgttggctcgtccgacgggtggctcgtcaccgccgacgccgcctccgagctccacctcctgaacccgctcaccggcgcgcaggtccagctaccctcggtcaccacgctgcccttcgtcgacgccagccgcgacgccgacggccgtgtcgcgagctacgacctccgctgctgcttcggcgatggagacaacgacggcgacgaggtgctcgtcccgccggagtcgttcgcgccggacaggctcaggtacgagctctacgagaaggccatcctagttgcaccgccgcggaggcagacgacgccgccggggtcttggggcggctacgccgtgctgctcatctgccagccactgtaccgtctcgccattgccagagcaggggacacgaagtggactctcctcgacatgccatcacgatgctgggtcgacgccgtgcgcgccgcctccgcccccgccgccgacgggcaccaagcggtgtacacgctggactccgtgggtcgcgtcgaggcatgggacatggacgtcacggcggcgggcacgacgccgccgccgcccagggagatcgcgccgccgtgctgctgctccggccgcgcgtgctccatgtcgatcccctgcagcaaatacctcgtcgagctctcgccgggacacctgctccaggtgcaccggctcagggacaaggcgcacgcgcggtccaagtgggagccccggcaagaacgcgtcgagtacaccaccgtcaaggccgagctcttcgagtggaacgccgccggcggcggccatggcgagtgggcgcgggtggacggcgccggcgccggcatcctcgccgggcgcgcgctgttcttgggcaagagcgcgtcgctgtgcgtcccggcggattgctgcccggaggtgaagggcaactgcgtctacttcaccgacgacgggccatggtcgcacgagaggtgccacgaggtggttcccgacgtcggcgtgctcgacctcgccgacgggagctacaaagtgccacgcggcgccgtgcgcgacctgctctggaagtggccgccgccggtgtgggtcttcccttcctgcaccaactgacgaacgccaatccgtcagtctgaattctgaaatgttcagagttttttcctttttttcagacaaagttcagatatcttcatttcttcagcatctgcagctcaactttttgttgacctgcttgctgcttgtaaaaagtttttttagcttccgaatgcgtgggtgaggtcaacgtcttgttgacctgtttgcaataagttgtaaaaatggatgtgcttgtcagtgtgagaacgaggtcaatctctggttgacctcttgtaacaacaaattgctagttgtggccaagacaggttgccctgtcaggatcacaatgtactaatctggttcattattcaagataccagtgccatctgtgagttttaatgtgc

SEQ ID NO: 26040 - DNA, 4632 bp, Oryza sativa
  ref <308>: DATABASE ACCESSION NUMBER: AK101482
  ref <309>: DATABASE ENTRY DATE: 2002-08-28
gagcgaagagaaggagaagcacgcacgcagcacgtgaacttccagctctaaacccttccccctctcttgttccaagcccctcctccccttacccccccgccgccgccgccgccgccgcctcatcacccgaaaccctagccccattcgccgcggtcgccgcctcacccgaaaccctagccccattcgccgccggggtcgcggcctcaggagcggaggccatggaggacgtctgcgaggggaaggacttctccttccccgcggaggaggagcgcgtgctcaagctgtggtcggagctcgacgccttccacgagcagctccgccgcacgaagggcggcgaggagttcatcttctacgacgggcccccgttcgccaccggcctcccgcactatggccacatcctcgcgggcacaatcaaggacgtggtcacccgccaccagtcgatgcgcggccgccacgtctcccgccgcttcgggtgggactgccatggcctccccgtcgagttcgagatcgacaagcagctcggcatcaccaaccggcagcaggtgttcgacctcggtatcggcaagtacaacgagacctgccgcggcatcgtcaccaagtatgtcgccgaatgggaggccgtcgtcacgcgcacggggaggtggatcgacttcaaagacgactacaaaaccatggacataaatttcatggagtccgtttggtgggttttctcgcagctctgggagaaagacctcgtctacaagggtttcaaggtgatgccttacagtacaggatgcaagactgcactatcaaactttgaggccgcacttgactataggactgtcccagatccagcaatcatggtgtctttccctattatcggtgatgcggacaatgcagcacttgttgcatggactacaactccctggacacttccaagcaacttagccttgtgtgtcaatgccaatcttgtgtatgtcaaggttaaggacaagtcaactggagcagtgtatgttgttgctgaatctaggcttgggcaattgccagccaaggctaaatcatctggaaagaagcaagcaccttctaagggaggcactgctgaagttgttcagggtggattggatactgaagcatatgaattattggcaaagtttccaggatcatccttagtaggcctaaaatacaaacctctgttcgattttttcttggagctccaagagactgcctttagggtgatagcggataactacgtaactgatgatagtggaactggtgttgtccattgtgctcctgcttttggtgaagatgaccaccgtgtttgtcttgctgctggtatcattgaggccagtgggcttgttgtcgccgttgatgatgatggctgcttcattgaaaagatatctgagttcagtgggcgatatgtcaaagaggctgacagggatatcatcaactctgttaaggataaaggaagacttgtcagtaaagggagcattgaacactcttatccattttgctggcgctcgggcactcctcttatttaccgggctgtcccaagctggtttgtgaaggttgaaaagattagggaccagttgctggaatgtaacaagcagacctattgggttccagattatgttaaggaaaagcggttccataattggctagaaggtgctagggattgggctgttagcagaagtagattctgggggactccactaccgctgtggatcagccaagatggtgaagaaattgttgttatggattccattgagaaacttgaacggttatctggtgtcaaggttaatgatcttcaccgacactatgttgatggtatcacgattccctctagcagaggtccggagtatggggtgctcaaacgagttgaggatgtttttgactgctggtttgagagtggttccatgccatatgcctacattcattatccatttgagaaccgtgaattgtttgagaagaactttcctggcaactttgtggcagagggattggatcaaacacgcggatggttctatactttgatggtgttatcaacagctttatttgggaaacctgcatttaaaaatctgatatgcaatggtcttgtattagctgaggatggtaagaaaatgagcaagagtaaaaagaattacccttcacctgtagaagtcatcgatgaatacggagcggatgctttgagactgtgtttgataaattctccagttgtacgagcggagtctctacggttcaaaaggagtggtgtttttggtgttgtgaaagatgtcttcctgccgtggtataatgcgtatagatttcttgtacaaaatgccaagagaattgaaattgagggattctcagcattttctccaatagatcaagcctcacttctgaagtcatcaaatgttctagatcactggataaactctgcaactgaaagtctagtcagttttgttcaccaggagatggacgcatatcggctttacacggttgtgccatatttggttaaatacatcgacaatcttactaatatatatgtgcgtttcaaccgtaaacgtttaaaaggacgtactggggaagaagactgcagagtatctctttcgacgctctaccatgtaagtatatattgtgcagtgcactgtttctacttaagtttgttttatggattgatgagaataaaaatatcaatgctgtatgtatctcaatatctcatgttcacattttcatgtcttcctgcctctgagaactccaaaaggagtcttcatcatcttttatgtacctcccctttatttctggacgtataatgcttatccagttggcagataatcttgttgctattaaacttctcttttttttttcttaattttgataagtgaaatagcttcaggctgagttggacgctaccctttcccaacttctactcccttttttttcacgtgcacaattcccgaactgttaaacggtgcgtttttttcaaatattttttatagggaagttgctttaaaaaaatcatataagtctattttcaagttttttagctaatacctaattaatcatgcgctaatgcgtcgccttggtatccacgcggggcggagaagttcccaactcctcctgaaatgatcttttcttgctccttagcatctattacgtaatattttgggggtactctatgcattaaaaaaatcctaattagattgtatgttttgctggtactttgtagtatttcacaaagacattttgttaatcatgaatgcaggcacttgtaacaacttgtgtggcgatggctccatttacacccttctttactgaaactctctatcaaaacctacgaaaggtgtcaactaaaccagaggatagtattcatttctgcagtttcccttccacaactggggagagagatgagcgtgttgagcaaagtgtaaacagaatgatgaccatcattgatcttgcccgcaatattcgtgaacggcataacaaagccttgaaaacaccactgaaggagatggtgattgttcatcctgacaatgaatttcttgaagacataacgggaaagctaaaagagtatgtcatggaagaaatgaatgttaagactgtcactcaatgtaatgatcccatgttgtatgcttctctccgggcagaacccaattttagtgtgctaggaaaaagactgggaaaggacatgggcaaagtgtcaaatgaagtgaagaaaatgacacaggaacagatcttagcctttgaacaaagtggagaaatttcattctttggtcattgcttgaagttagacgatattaaggtgatccggcaatttaaacgtcctgcaaatgtggcagagaatgaaattgatgctgcgggagatggtgatgtgttagtcgttttggatcttcgagctgatcaatcattgtttgaagctggagttgctcgagaggttgtgaacagaatccagaagttacgaaagacagcgcaacttgagccgacagacttagttgatgtatattacaaacctatggacgatggcaagaatactctagtagagattgtgcagtcacaggatcagtatataagggatgctcttggcaatccactaattccaaagatggcggcgccaccagatgcagtaatgatctgtgaggagtctcacaatgtacaagacatgtcgtttgtcatttacattgcaagggtttctccagtggtcacagatgatctccttgtccatgccgctggcaaccgtgagcattttgatgcattaaaagtatatttactgtcaaggtctatttccagattgaagaatgaattccaggctgggaatggcaagattacggtggatttcattgaaggcttcccaccaattgatctccagctgggaaaacatgtttttcttagtacaggagatttctacctggctactcgttcttgatttttctttcaagcatcccaattttgagtgatttatctttttttttactgcaatcattttaccccgggccctattctatttgtgcccacaaagcaatgtatgtggtttcatctgccatgaaagaatgaaaggggtactatcatattgaatggtctaatcgaaaactcgtgtatgctgtactgaatactgatacacccgtgttcatgtggctacacaccgattatttaattgtgccaatagcggttaaagcattc

SEQ ID NO: 26041 - DNA, 2990 bp, Oryza sativa
  ref <308>: DATABASE ACCESSION NUMBER: AK101483
  ref <309>: DATABASE ENTRY DATE: 2002-08-28
gggcgcaaatcctcctcgccgcggcggagcactaaaccctagcgagagatgccgtcgcctgcggggggtccggtggccgtggcggcggcgtctgcggcggcggcggaggcgctggggatctcgccggagatgtacccgacggaggacgacctggcgtacgaggaggagatcctgcgcgagccgttcaagctcaaggggtggtggcgctacctcgtcgcccgcgccgccgcgccgttcgccaagcgcgccgtcatctacgagcgcgcgctcaaggcgctcccggggagctacaagctgtggcacgcctacctccgcgagcgcctcgaccacgcgcgcccgcaccccatctcccaccacgcctacgcctccctcaacaacaccttcgagcgcgccctcgccaccatgcacaagatgccccgcgtctgggtgctctacctcacctcgctgctcgaccagcgcctgctcacgcgcgcgcgccgcgccttcgaccgcgcgctgcgcgcgctccccgtcacgcagcacgaccgcatctggccgctctacctccgcctcgcctcgctcccggcctgccccgtcgagacctcgctccgcgtcttccgacgatacctccagtacgacccctcccacgctgaggacttcatcgatttcctcatctccgcaaaccgctggcaggaggccgccgaccgcctcgcgtccgtgctcaacgatgacggcttccgctccgtcaagggtaagacccagcaccagctctggcttgagctctgcgaaatcctcaccaagcatgccgatgaggttgcggggctcaaggtggacgctatactgcggggcggcattcgcaagttcaccgatgaggttggcaagctgtggacctccctggccgattactacgtcagaagaaccttgtatgagaaggcgagggatgtcttcgaagagggggttgcttcggtgatgacggtgcaggaattcagcgtggtgtttgaggcgtacacacaattcgagcagagtatgcttgcggcaaagctggaggcagccgaggaggagggtgcggggagtgagggggaagaggaagcgggcaggaagaatgggatggacaagctgtcgaagaaattcctcgcagattgctggctgaatgatgaggatgatactgatttgaggctggcaaggtttgagcggctgttggatcgccggccagagctcctcagcagtgtcctgctgcgacagaatccgcataatgtggaggaatggcacaggagggtgaaactttttgagaaggatcctacaaggcaagtagccacatatgttgaagctgtgaaaaccgtagaccctatgaaggcagctggaaaaccacatactctatgggtggcattcgcaaagatgtatgagaaacataatcgtctagatagtgctgaagagatctttaaaaaagcaacacaggtgaactacaaggcagttgaccacttagccagtatttggtgtgagtgggcagagatggagctgaggcacagtaattttgacaaggctattgagctgatgaggcaagctactgcagaaccctctgttgaggttaagaggcgagctgctgctgagggggatgaacctgtccaattgaaagtacataaatccctgaaactgtggagcttctatgtggacctggaggaaagtcttggaacattggaatcaactcgtgcagtttatgagagaatattggatttacgaattgccactccccaaatagttctcaattatgcatatcttcttgaggaaaacaagtatttcgaagatgcgtttaaagtgtatgagcgtggtgtgaaaatttttaaatatccccatgttaaagacatttgggtgacctacctcacaaagtttgtaagaaggtatcagagaagcaagttagagcgggcaagagaactgttcgatgaagctgtcaaacaggctcctccacaagaaaagaaggtattgtatttgcagtatgctaagctggaggaagactatggccttgcgaaacgtgcaatgaatgtatacgacgaagctgtaagggctgttcctaacagcgaaaagatgagtatgtacgaaatatatattgcacgggctgcggagctatttggtgttccaagaacaagacagatatatgagcaagcaattgaatctggactcccagacagagatgtcatgacaatgtgcatgaaatttgcagaacttgaaagaaaccttggagaaattgatcgtgcccgtgccatttatgtccacgcatccaactatgctgatccaaactctcatcctgaattttggaataaatggaatgaatttgagattcagcatggtaacgaagatacattcagggagatgcttcgcatcaagcgtactgtggctgctagccgcagtcagactcatttcatactcccagagtacttgatgcagagggaccagaggctgaacctcgatgaggcagttgacactctgaaacgagccggtgttcctgaggatgagatggctaacctagaaaggcaactagcgccaggaccttccacggctccaccagctccaagcactgctactgctcctgctaaccggatgatgaactttgtcagtgctggagtgcaggcacaggctgagagcagcagcaggcaacaacaggctgctgctactaacaatgaggacattgagctgcccgatgagagcgacgaggaggaagacgatgtccaaattgcggagaagagtgttcccgctgcggtgtttggagagctcggcaagagagctgcagagaacagggaggaggaaagctctggtgcccaggagaatgagcagcttggcgcccttgagaggattaagcgaaggcgtcaatgatctgccactgtcaagatgcccacaccattagctggtgcccttaacgatgttgtagctgtaacaacttgtaaacatgattttgagtggtgtttttgctcttgtacaagaatttacgggagttattaatccgttgttgatctgcgacc

SEQ ID NO: 26042 - DNA, 2029 bp, Oryza sativa
  ref <308>: DATABASE ACCESSION NUMBER: AK101484
  ref <309>: DATABASE ENTRY DATE: 2002-08-28
ggtcagtccaccggtcacccgctcgtcagaggtaggtcgccgtcgccgcgtccccctccgccgccggctcccgtcgctctccggtctcacgcgccgcgcggccgcagcagcaacaacaacaacaacccgttttgaccgcgccttcctcctccgccggcccgcgcgctcgccgcgcgcggccgccacgggtttctctctagaagccccgcacgaattttatccgttttttcgcattctccccgcctcatctcctccttgacaccgacctctcctcctcggctcggggaattcaaacgcgcggcctcgccgggtggcctcgcctcgcctcgccgcgttccgacagcgagtgccccgctggtgccactatttcttgccgccccaacccctcgcatcgatcccccacacccacatctcgcctcctcttcctcgatcctttgtcttcttgcttagctagctctgccatggtggggagctacgcggcgggagggggacggggagcggcagtggcggcggtggcggaggggaagctggacgagctgcggcggaggatggggaaggcggacggcgacctgctgaggatcgtcggggtggggggcggggcgtgggggagcgccttctgcgcgctgctgcaggacgcgtacgggcggcaccgcgacaaggcgcaggtgcgggtgtggcggaggcccgggcgcgccgtcgaccgcgccaccgccgagcacctcttcgaggtcatcaactcccgggaggacgtcctccgcaggctcatccgccgctgcgcctacctcaagtacgtcgaggcccgcctcggcgaccgcacgctctacgccgacgagatcctccgcgacggcttctgcctcaacatggtcgacacgccgctctgcccgctcaaggtcgtcaccaacctgcaggaggcggtctgggacgccgacatagtcatcaacggcttgccctccaccgagaccagggaggtgttcggggagatcgggaggtattggaaggagaggatcagaccccccgtgatcatctcgctggccaaggggatcgaggcgtcgattgaccccgtgccccggatcattaccccgacacagatgatcagcaatgcaactggagttccattggagaatattctatatcttggaggtcctaacattgcatctgagatatataacaaagaatatgcaaatgctcgcatatgtggagctgacaagtggagaaaacctctagctaaatttctgaggcagcctcattttattgtgtgggataatagtgatctcatcactcatgaagtaatgggcggcttaaagaacatatatgccattggtgctggtatggtggctgcactaaccaatgagagtgcaaccagcaaatcggtttacttttcactttgcacgtctgaaatgatatacatcacccatctcctagccgaagaccctgagaaacttgccgggcctttattagccgatacctatgtaacactgctgaaaggtcgtaatgcatggtatgggcagaaattagctaagggtgaactgactcttgaaatgggggacagtatcaagggcaaagggactatccagggtgtctctgcagtccatgcattttatgagctcttgagccagagtagcttaagcgtgacacatccagaagtgaagaagcttgttgctccggtcgagctgtgcccaatactaaaaacactttataaaatcctaatcaagagggagcttgccactgactccatcctccaggcaatacgagatgaatcaatgtatgatccacgggagaggattgagatgtctcagcgccagtgtctttaccgaccatctcttcttggcctacctaaagtagatattacccaggcttagatctattcttttttttttctgcagatttgttttgagatttgcaggattctttgatgtattctttgcatagtggtcctcaagatccttccttgtgtgccaagtgcatctcgtgttcgaacactgattccattctctactagagaatttgataatgaggtgttttggttttt

SEQ ID NO: 26043 - DNA, 1859 bp, Oryza sativa
  ref <308>: DATABASE ACCESSION NUMBER: AK101485
  ref <309>: DATABASE ENTRY DATE: 2002-08-28
ttgggagaggaagcgacagcgagcgaggcgaggcgaggcgaaggcgagcgctcccatctcctctccacttttccgcgccgcgtgcgccgaggcggggagggaggcaggttcgcgcggatctcgcgatgcggatcgcgaggctgctgctgctgctggcgctcgtcgccggggcggcggtggcgcaggacgcggggctcggggacgtggcggcggaggagacgaccgcggcgagggccaaggaggaggcggcgctcgcggccgagctgggccagctcagggcgaagatctccgccttagagtcgagcataacaaaacagacccaggagttgaagagcaaggatgacggcatccagaagctggaaaagcttattgaggagaagtcaaagaaaattgctaccctgcagagtgagataacttcacttgagacaaagagatctttagctgcagaggagcaggcaggcaaggccaatgcccgggctattgagcttgagaagcagattgaaaaactgaagaaggatattgaagcacaaaatagcaagaaatcaactgtggaggctagggctggtgatgcagataagaaggtgcaagagctgaatgctaagctggagaaactccaaaagacaagtgatgagcaaaagcgtaggattcagaagactgaacatgctcttaaagttgcagaggaggagcttatgagggtgcagttagaaacaacaacacaattaaatcagctgaaagaggttcatggagcttggttgccaccttggttagtgacacacacagctcgtgctaaggaaatgatgttaagtcactggaatgaacatgggaaacctgctgttaacagtttattgcagaaggcatcagagaaatcagttcaggcaaagaaatgggccgagccacatgtagaagctgccaagacgaaatggatacctgttatcaaggaaaaatgggttaccatgaagacaaacgcagagccttatgtgcaaaaggtctcagcaaaatctatagagctctatcaagcatctaaggatgttgtcttacctcatgttgtgaaagcacataagattgctgatccctacttccaggaagccaagaaagtatccaaaccttacattgatcaagttgctaaggccactaagccacatgtcgagaaaattagaatttatttgaagccttatacaaaaagagcagtccatatatatggaaattttcttgagaaggctacagcttatcatcaacaggctcaagcaactgtcttggactacctgcaccaacatgaattgacaaaagaatttgcgactgaagagttggcctggtacctggcttctgttttgctgattatgcccatttatgttttttacaatgtcctggttgaaacattctgctccaagaagaagaagaaagccacacggaatgttaatgctaaccatggccatcggaaacacaaacgccggcatgctgacaaatagaccatatttgttggattttggtcatgtctggtctgccacattgtagttggagaagatctcggatggcatacagagtaggatatcccgggccatcgctaagcattggtttgtattattaacgagttacactagatcacacaagaactatgtatttttgccccccatgtatggacctagttgtaattgcggttctgtaactgtcgatctgcccttcgctgagtaggatttagtggacatggaggctgtatgtgcttattcattttattggtcatgtcttctagtttttgttcatgcgttttccttagagcttgtgtgtggttgtgtaatccctgcctcgttttctgggctctcacttactgaaactgtagtattgtacttcttcatgtttaacag

SEQ ID NO: 26044 - DNA, 2444 bp, Oryza sativa
  ref <308>: DATABASE ACCESSION NUMBER: AK101486
  ref <309>: DATABASE ENTRY DATE: 2002-08-28
ggcgagtagagacctggccctcctccccttttctctctctgttccgcgcggcgagataattcggttgcttctccccgcggccgcggcggcatctctcccggcggcggcggagctcacgtccttcgcggcgaactgcgctccaggcagcgggaccagaggggatgggggaccgcgccgcggggagcggcggcgggggagggggaggaagcggcgtgcggagggtaggggactacgtgctggtgcggcagatcgggtcgggggcgtacgcgcgggtctggctcgggaagcaccgcacgcggggcacggaggtggccttgaaggagatcgccgtggagcggcttagcagcaagctccgcgagagcctcctctccgaggtcgacatcctccggcgcatccgtcatcccaacgtcatcgccctccacgagtccatcagggatggtgggaaaatatatcttgtattagagtactgtcgaggtggtgacttacactcataccttcagcagcataaaagggtttctgaaacagttgctaagcatttcatccagcagctagcatctggtctgcagatgctgcgtgaaaacaacgtggttcatcgagatctaaaaccacagaacattcttctagttgcaaataatgaaaattccctcttgaagattgcggactttggatttgcaaagtttttagaaccttcttctctggctgaaacactttgcggttcaccgctttacatggctccagaagtcatgcaagctcagaagtatgatgcaaagaacaggcagatttgtggagtgttggtataattctatatcaacttgttaccggatctcctccttttaccggggatagtcaaatccagttgctgagaaatatactcaatacacgagaaatacgatttccatctgattgcgacttgagccatggctgcattgacttatgcagaaagttactgcgaatcaattcagtggaacgccttaccgttgaagagtttgtgaaccatccatttctcgctgaacatgctttggagagaaccttgagccggacaccatcggacataagagatggctttccattcattaatagcagtcctacgagaccttcaagccaaagttctcaggaagattgtatgccttttcctttggatgatgagtcaactggacaggatgaaggtcctgtttctgatagtaagagtgcaataaaatcctatgggtttgccacgagtaaaaggcttgataaaacttcaggtcagagtccaacgaaacattcaagtctggtctctaaatatattaggggaaataattacgcatctagtagtcaacgcctggaccatcctaggagaatcaaggaaaacaagggtgatgaagggcacaaccctaaaggtggttatccagaagattcccctatcattgattcattagagtttgtagatcaggaatatgtctttgtgcacccagagggatcctcctcttcgatgaatgactcccgacagcgcaccatgccatcaaaacttgacagttcttctctttcaccaccgaagttattaactgctgtgagtgcaccaaggccaatacatggcatggcaattaacagacagcaatctggtggaactggtagcttggacagtcactgctctccagtatctggtacttcacaaggatctgcagatctcaacgatgctatggatcaaccaccatctgattgtctgaccagggttagattattggagcagtatgcgtctaccatagcagaattggtgaaagaaaagattaaagatgccaagcacttagagggattctcgattcagctagttgttcttgcaacctggaagcaagcaatttacatctgcacttcttatgcatcttctgccacaagagagaatccttcccatgatgtcaccgcgaagggttttggctcaaatgctccccatttgcttgcaaactctcaactgttatatgatacatgcatggagatagagagtcagtttttggttcaaatggaatatgctgaagaacttgccaacactataggacagacagttgatgctacagaaatgccagatgcgatagaaatcatatttcagaccgcgcttaacctgggaagacatggtggtgttgatgagatgatggggaaatcagcatctgccatggtgctgtactcgaaggcagtatccatgctgcgctttctcctgactgaggcaccgtcactcgccctgaaccccgctctgtccctaacaagagatgatcgacgccgcctgcgcacatacattgaagccgttaacgctaggctcgtcccgttgcaataccagcggcactgaccgctcacctgtacaatattctttcatcctgtacatatattcgttggcccaaacgagggcgtgtaagatatgtcatgtctgagaacgtgctccgattagggagaagtagcgaaaaatccagtgtaacttgccc

SEQ ID NO: 26045 - DNA, 2346 bp, Oryza sativa
  ref <308>: DATABASE ACCESSION NUMBER: AK101487
  ref <309>: DATABASE ENTRY DATE: 2002-08-28
gacccactcctctgaagtcccagtgccatctgctccatacttcgcaggtaggagggagcatggcggggagcggcggcggcgtcgtctccggcggccgccagcgcgggcccccgctgttcgcgacggagaaaccggggcggatggcgatggcggcgtaccgggtgtccgcggccacggtcttcgcgggagttcttctgatatggctgtacagagccactcacctgcctcccggtggcggcgacggcgtgcggcggtgggcgtggctcgggatgctcgcggcggagctctggttcggcttctactgggtcctgacgctgtccgtgcggtggtgccccgtctaccgccgcaccttcaaagaccgcctcgctcaaagctacagtgaagacgagcttcccagtgtggacatttttgtctgtacagcggatccaacagcagagccaccgatgcttgtcatctccactgttttgtctgtcatggcttatgactacctgcctgagaagctgaacatctacttatctgatgatgctggttcggttttaacattctacgttctatgcgaggcatccgagtttgcaaagcattggattccattttgcaagaagtacaaggtggaacccagatcaccagctgcttactttgctaaagtagcttcccctcctgatgggtgtggacctaaagagtggtttaccatgaaggaactgtacaaagacatgacagatcgtgtgaactcagtagtaaattcaggtaggatccccgaggttccacgatgccattccagaggcttctcacagtggaatgagaatttcacttctagtgatcacccttctatagttcagattttaatcgatagtaacaaacaaaaggcagttgatattgatggaaatgcattgccaacacttgtatatatggcacgtgagaagaaaccccagaaacagcatcacttcaaagctggatctttgaatgctttgataagggtatcatcagtgataagcaacagtccaatcatcatgaatgttgattgtgatatgtactcaaacaattcagagtccatcagagacgcattgtgttttttcctagatgaagagcaaggccaagatattggttttgtacagtatcctcagaattttgaaaatgtggtgcacaatgacatctatggccacccaatcaatgttgtcaacgagttggatcatccttgcttggatggttggggtggaatgtgttactatggcactggatgcttccatcggagagaggccctatgtggacgaatctatagtcaagaatataaggaagattggactagggtagcagggagaacagaagatgctaatgagttggaagaaatgggcaggtcacttgtgacttgcacatatgagcataacaccatctggggaattgagaagggggttaggtatgggtgcccactggaggatgtaactacaggattacaaatccaatgccgtggatggagatcagtgtactacaaccccaaaagaaagggattcttaggcatgacacccacctcactaggccagatcctggtcctgtacaagagatggacagaagggttcctccaaatatccctctcacggtacagccccttcttattaggtcatgggaagatcaagctgggtcttcaaatgggctactctgtctgcggcttctgggccgtgaacagcttccccaccttgtactatgtcacaattccttctctttgcttcctcaatggcatctccctctttcctgagaaaactagcccctggttcataccctttgcgtacgttatggtggccgcatactcctgcagcttagcagagtcactgcaatgtggtgacagtgcagtggagtggtggaatgcacagaggatgtggctcattagaaggatcacctcatacctcctggcaaccatcgacacattccgcagaatattgggcatctctgagtctggattcaacctgacagtgaaggtcactgacttgcaggccttggagaggtacaagaaggggatgatggaattcggatccttctcggcgatgtttgtaatccttacgacagttgcgctgctcaacctggcatgcatggtgttaggaattagtagagttttgttacaagaaggcccagggggtttggaaactttgtttctccaggctgttctgtgtgtactgatagtagccatcaattctccggtttatgaggcgctcttcctccgcagggacaagggcagcttgccagcttctgtcgctcgagtttccatttgctttgtgttgccactctgtatactctcaatatgtaaatgatattacgtacagtatgtacaatgctatatatcaggaagaaattaaactt

SEQ ID NO: 26046 - DNA, 1385 bp, Oryza sativa
  ref <308>: DATABASE ACCESSION NUMBER: AK101488
  ref <309>: DATABASE ENTRY DATE: 2002-08-28
gtgggggcggtgcactgcattattgttgcctcgctcgctcgatcgatcccctctcctctccaaatcccatccccaaatcccgaatcctccatcgagatcgatcgacgtcgagcggagcgaaggggggatatgggcggcgtggcggcgggcaccaggtggatccaccacgtccggcggctcagcgccgccaaggtgtcggcggacgccctggagcgcggccagagccgggtcatcgacgcctccctcaccctcatccgcgagcgcgccaagctcaaggcagagttgctgcgcgctcttggtggtgtgaaagcttcagcatgcctcttaggtgttcctcttggtcacaactcatcgttcttacagggacctgcatttgctcctccccggataagggaagccatttggtgtggaagtaccaactctagcacagaagaaggcaaagaactcaatgatcctcgagtgctaacagatgttggtgatgtccccatacaagagattcgtgactgtggtgttgaagatgacagattgatgaatgttgtaagcgagtctgtcaaaacagtgatggaggaagatcctcttcggccattggtcctgggaggcgatctctcaatatcttatccagttgttagggctgtgtctgaaaagcttggtggacctgttgacattcttcaccttgacgcacatccagatatctacgatgcttttgaaggaaacatctattcgcatgcttcttcatttgcaagaataatggaaggaggttatgctaggaggcttctacaggttggaatcagatcaattaccaaagaagggcgtgagcaggggaagagatttggtgtggaacagtatgagatgcgcactttttcaaaagatagggagaagcttgaaagtctgaaacttggggaaggtgtgaagggagtgtacatctcagttgacgtggactgcctcgatcccgctttcgcgccaggtgtctctcacattgagccaggaggcctctccttccgcgacgtgctcaacatcctccataacctgcaaggagatgttgtcgccggagatgtggtggagttcaacccgcagcgtgacacggtggacgggatgacggctatggttgcagccaagctggtccgggagctcacagccaagatctccaagtgagcatccattcagattcagggcatatcatatcaccaaccaaccccttgagtctgaagcagcaaagaggatgattcccagactcctttagctgttagtctaggttcctatgtagtagacatcagctatgccagattttgtatgtgaatatactcattaggttgcaataatgtttgcctccattttgcacttgtgatgttatggttatccctcatcatcgtgtgctagaagaatgc

SEQ ID NO: 26047 - DNA, 2076 bp, Oryza sativa
  ref <308>: DATABASE ACCESSION NUMBER: AK101489
  ref <309>: DATABASE ENTRY DATE: 2002-08-28
gaatcagagcggttcttggtgtctgaagaaacgcacaaagccgaagtggaaggaagaataaagggtgaggtgagctaagtcgtaggctgtctgccgcgcgcgtaccatgggttgtgggctgtcgagggagaaggacgccggcggcggcccacggcggcggccggggagcgtcggcgacgtggtcgtgttcctcccggggctccgggtgccgaggagcgtggatttctcccaggcgctcgccggtcgcctcgacgaggcctcgtcgaggctgtcgtcgctgcgggcgcgggtcgtcgacatggcaatgcaagaatcggcggcggcgctgaagccgaagcggcgggcggcggcgcggcacggttcgagcactgctaatctcctacaggctctggaagactatctgccagtgctgctaggattggtgaaggaaggtagcgaattgcggcacggagtgcacttcgtctggactaaccaagaggataatgctgaggaaacggccatggcagatgcatggtatgaagtgttgtccgttctgcatttgatggccatggtctgcttgttgcaggccaattctctgcttcttcccaggtcatacggtgatggttatgcgccaagggtttctgaagagagcagacgagctactgttgatgttttcttgaaggcatctggctacctagactgcgcaattagacaagtactaccccaaatatcgtcggagttaaggagacaacttccagtagatctggctgaaggaaatctcaaagctcttagcctgcaagctctgggtcagggagtcgacatgcaacttggtctggcaattgatagcccaaaggccactctagcggtaaaacggcgcttagcttgcgagatggtcaaatattggcatcaaattcaggagagcattccagaaattccggtatccgatggatgggggaaaaagcatttattgtttgttaagtggaagtatgttgaagcaaaggctgcagcatactatttccatggtttgattctagacgagggaaacacagagaaatctcatggaatggcagtagctgccttgcaagcttcagaagaatttctgaaagaaagcaaaagggcttctgaagccttccatgcaactcctccaacatcaaggagccccactcctttcggaacagctaagtacatgcttgacaagattccaaaagatgcttcaagcaaggtcaagatcaatcaggacctgtatacgcaagagagggtcattggaacaccgcctccattgccggattttgcgttggctctaaaacctgacgactacgatcttcctccattagatccactttggaacaaagaagacagccgtcagtagcagtatattcagcaagaatgtgaatgttgtctttcagaggttcaggctctagtataccatgtcgaagccagacgtggtacgaatgaagtgtacaaaatttgtcccaacaaattgtggtgtcagcaaaatttaaacaaggcctggagataatctcaagagcattgtacaggcgaatcttattctgacaaaggaaatgctttgccaaaaaaaaaagaagaaaaaaactaaccatttcaaaagattccaatatgactcgtggatccattttctcaggattcccttcagaatggcttggttttgatctatactgagtactgtgaaaactgtcacattttgatcctgctgcagcgactatatcatctagacagtttccagtgttctgagatacaactacacaagcgaacaaaacgaaacttgacacgctcgtttcaaaagcctttgtctgatgttctacaatcggtccaaaaggcaagtatgcgtgccaaataacacaaagaaaaccacgcgaaatggcgcatatatagtttgcctactgccgtgagcacatatatggctacaatttacagactccaaattataaagaaacatcattattgtattatgttatttacatgttactcttaatcatacacgattgctgtttacatcaattctattctttaccactaggtttgtttctgttcaataatattgctatcaggtattcaggcaggaacatattcctttcc

SEQ ID NO: 26048 - DNA, 1336 bp, Oryza sativa
  ref <308>: DATABASE ACCESSION NUMBER: AK101490
  ref <309>: DATABASE ENTRY DATE: 2002-08-28
gccggttcccagccatggccaccgccgccgtcttctccgcctcggcccgccgcctcctctccaccgtcgccggcggcgccggggccggatccgccgccgagctccccgtcttgattggccacctccgcagcctcgcccgcgcgggccgcctcgccgacatcgacgccgccctcgcgccgcacctggcgtcccactccgtcgcggcggtctccgccctctcctcggtgggcctccccgaccgcgcctccgcgctcctcgccaccatccggaacccaaccgccgcgcacctcaacgcgctcctggccccgctcctccgccgccaccgcctcgtgggcctcatccccaccctcctcgcggcgcacccctccgtcccgcgcgacgacgccacggagggcatccacgccaaggccctctgcatcgccaccggcgccgactccgcgctccacctcctccagcgggagtcgccgccgccgtccctccagctcttcaccagcgtcatcgactcctactataagcagcgcaagccccaccgcgccgagcagctgtggcgcgagatggtcgaggaccacggcatcgtccccgacgccgccgcccacaacgtcaggatcacctacaaggccgccaccggcacggtggaggaggtcaaggagctgatccgcgccatgcgcgaggatgccggcctccagccggacatcgtctcccacaacgggctgatgcgcgcgatggcgcggcacgggagggtggacgagatgatggaggtgtacaagaggctggagaagggtagcgcctccgccgcggcggagggcaagtcggcgccggactgcgcgacgtacacctgcgtggtggccgcgctgtgcaaggcggggcggtggtcggaggcggacgacgtgttctacgaggcggtgaagcggaggaagctggccgacctcgggacggcgcgcgttctggtgcgaggcctcaaggaggccggcaaggggcgggcggcgaggcgggtggtgatcgggctgcgcaagaagttccccgaccgcttcgacggcccgtggaaggatctcgaggagttggccgggatcgccggcgaggatgaggagagcgatgtcgaaggggaggacgacgagcagccgccggcgacgacgacgaccactgccgcgtgagctctcgcagtaatttggtcgtgttcgtggttttagcaaatttgcattcgtggtaatacgaagaccatataatggtttaggattttagggctggatcaataagaagcaaattctgaggatgcgagaatcactcaaattttgtcaaactagcttcttgaatcacaccataaaacttctttaatgtg

SEQ ID NO: 26049 - DNA, 1607 bp, Oryza sativa
  ref <308>: DATABASE ACCESSION NUMBER: AK101491
  ref <309>: DATABASE ENTRY DATE: 2002-08-28
gtctgacgtcatctccgccgccacccccgctcgccgccgacccatggagccaccgccgcggggaaccaagcgcccgctcccggccgacgccgacgccgacgccgacgccgccggcggagacgacgacgacggcgctcttcccggggagcgcaagccgcggttccccaaggggaagaaggccaagtaccgggaccccgccgcagccgccgcggcggagggcatcgacggcttgataaaccccgagctcgcggcggagcggcgcgcgaggcgacgccaccgcaaggacgaggatgaccagcagggagtcgcctccgacgtcaggggattcgaagtgcgatacgaggatagtgcaaatttggttgatgatggcattcgactagagccttttaacttggaacaagagagggaggaaggatattttgacgaaaacggaaactttgtggagtacgcaaggggcaacgacatcaaggatgcctggttggatagtgttgaagttgacacaaagtatgctgaaaaggttcaaaagaagagagagaaagagaaagaagaggagttccaggatctttcatccgatgatattggaaagataaaaagaagaatatcaaacatacttgagccaggcgaaacgataatacaagctttgaaaagattgaagaatacatccagtgataagcgtggcaagatgactgaggggaccaaacgtatctttgatgagttgacagaagctgccatgaagctaatggagaacggagagtataatgtttattcagatgatcgggagacttttgaacgtgaggctgcgggttatgaacgtctggcacgtgctcgtcttggtctgccagaagctgaagaagatatgtttgcagacagtccaaaagataaaaccactgcctcgttactggatatggagcctggtccttcagctgcccatacctctacaaccaccaccacatctaaggaagatgacagtgactttgacatgtttggtgacgatgatgacaagaccgatgtcaaacgtgattctgatgcaaatgctgtaggttcaggttcgaatcctgaacaagtatctcacgatgctaatgaaacctcaggtgcagagaaaggtgagaatggaagtgtgagctcagattatgtttatgatccaacttcaggttattactatagcagtagcacgggctattactatgattctacatctggatgttattgctctgcatctacaggagcctggtactcgtatgacgaacaaactggcgaatacaaagagatacagtctgaacaagccagcacggtcaatgaaacaccgggagatggcatcaaagagtagcccgagtacttgtaattggctctctcaagttagcttgtttattacacagtgggatgtagcttcagtttttcggtagaggggcattcgaatctcacttttgtttgtacaagtacggggagaatgaaaggctgtcttactaccataggattttatttagatatagagcagaatgatccgctgagtgcaacccttacgcccacttctttattttgcattgccccatggtccatttccctgtacaaatctgtgacatgtaatattccctgccatgttcagcttc

SEQ ID NO: 26050 - DNA, 3739 bp, Oryza sativa
  ref <308>: DATABASE ACCESSION NUMBER: AK101492
  ref <309>: DATABASE ENTRY DATE: 2002-08-28
gtcctgtctcgcccgcagccacgccgccgcctcgccctttgcacgcgccatggccgccgcatcctcgccctcctccagccatcatcgtcgcgccgctgccaccaataagggaggccgtggcatcagctagtgatggccccgcgtctgtcgcccgcggcgagacgcgctctccgctccggtcagtgcggcgccaaatccacctcggggacatcggctgtctcgctgcggtagaaggaggtggtaggaccattgggggttgaacagtgattgctaggagatcgaggaggataaggaaggagaagagcacagctcagttacggctgccacgacgatagctgctggtcggcgacaactacggcaaggccatcgcccagtgccacacgtgccgctgtacatgtcaccacgccgtcctctcttgctccactagaatctcctcatctcctctccgtcctcttcaggaatggccaattcgtcactgattattttcttgacgttcatgattcctaacactatgaatggatgagtgacaagtttgacaatgagttttgcctacattatgcatgaatctaaaaagtccacctacataattcatcaagcctacaggtgctctcctacgatatctcacaaggatttagggtctagtgaaatctattcatgtattgtgacctgaaaaattaatcaaggattgctctttaccgatgaagataacatacggaaatatgccaagcttgcaaagttgatttgattgataagaaatccatgtcccattatcaatgcgttcaagagtcaagaatctgtgctggtaatgggtactacatgaacttttctgcaactacaggtttcaagcatttgctccctttctgttctatgcactttccaaatttatcaaggcaagcacatggatcatggacgttatgtactaatgtacatatttgccaaactatcgcctttctaaatatggaacttttcatgtttcagaatttaggtaagatttagggttgccacttatatttagtgatcagtacaaattcaaagttttgtcatttttctttggtgcatcataggtcaattgagattcattcttgccaagctttcatcaaaattctgacagcttgtgttttacacctacctgttttttctatgtttacttacaagcatgaatattggtagagaagaatagtactatagtttgctcatataagtaaaccaggatatgagatgatttggtgtggcgtgagacaaagctgaattaatcagcaagtttttaatcaattattcttgctaaaggcactttgagaagttgttttcagtttgacaaaaataataaagaaaacaacaagaagaaaagttgtttaaagttatttaagtaaagttgtgagctattatgtgatagtgcatcaaatatttgtaagatagatgtagccggttactctgaaaagtaaaattgaatgaatcaatgcccatctttcgttttttctgttctttaatttatattttttagcgcatataatcctttatgttgtcgattgcacaatataaaataatggaactttaccaatgccctgcaggtgaaaactttacattatagttcatcattctatctgacagctaataagacttttagagctccttcaattactactcaagcttccgtgtagccatgccaataggattagcaatgaagattcccacgcatgctcacacatatgcatgggaaaactcatgtggttccgaaactaatgttgcatcatatatctcaattaaatcaagttaactgtatactgagcttgatgttgcatatgcattgtcttgaacgatttgtctattgcggatttgcggtttgccatatatgaaatggttcttgaatgcatcagaagtctctgtcttttttttcctatgcattgttaggcatcgttcgtttaggggtgataggggagattggctctcgtttttcgcgcgcacgcttttcaaattactaaacggtgcgttttttgcaaaaaatttctatgggaaagttgttttaaacaatcatattaatccatttttaaaatttaaaatagttagtactcaattaatcatgagctaatggctcacctcgttttgcgtatcttcccaatctcctcaatccccttagtctatggacagcgctacgctgcgcgcgtttattgctagtattattaaggggcgcggattggggcgatggcggcgcgggccacgtcacctctttttcctcccgccgtccgatcaggcgtgggcggctgggattgaggcgcgcggtgtaaattttgcgaaaatcctccggtttatgcgtaattcgatttaagtcccttcggagcagtagctatgaggtgctattttacgtataggcccttacaaaatcctcatattccacgataaggagagaaaaaatcgagaataaggactgtgctgtaaacagtgaaaaccgagggactttttcgcaaaatgtcgcccactaaccccaaaccctagccgccgcccgcatcctctcctccctcccgtctcaccctctccctctccctttccttctcccggcgccgccacctccgcctcacgccgtccccgtctcctcgcgccgccgcctcctcctccgccgccaccgtcgtcatgtcctcgtctccgtctccgcctccgcctcgcgccgccgcacgccgccaccgccgcgagaggagctatcggaagcgccgccccggaggaggaggaagagaggcgagagagcggaggacggagagggatccggcaagatgggagtcctggcgttctaccggtggctggcggaccggtacccgcagacggtgtcggacgcggtggaggaggagcccgtggagctcgagcctggcgccttcgtccccgtcgacctccgccgccccaaccccaacggcctcaagttcgacaacctctacctcgacatgaacggcatcatccacccctgcttccaccccgagggccacgcacgatcctattcccccatcccctctgtcttctcgtcttctaatcaacccattctgtgttcgatctcaccatggatttggactccctctcctgcagccggcaccgaccacttacgacgaggtgcggctctgaaggggaatttcgtcgaacaagatgaatgcgttgccaggaacttcaagcaggcggccaaactgctgggcctggactccaagctggagaagaacttgctcatcccattcagggagatcaaggttgaatgcacagttccgaaagatgatgggactttagcatcttacatgttgggtttagggtttaacatgacaatgttaggggacctatgaagggtggaatcagataccgccatgaggatggtgaaaaaaagcctatattctgctgttagacaattcataattaggaatttgatattttaggccaccgactgggtcttcgacaccacagaggaccgcgcctgccaagcacaaaagtccctgttgctactgtgcatgaagatctttcctctgtggctcctcctcctgtccattgccctcggtgttataaagttaccatttgatatttctggtctgggtaatctcctaatgtaaggtgttagtttgttctattattctattctcgattatacaagctgtggctttaaagaaatagcagtagatatgatatggaccattgaggtcacttccataaacttggatctgggtgtgcaacatttgtcagtacaccattgccctcggtgttataaagttaccatttg

SEQ ID NO: 26051 - DNA, 2748 bp, Oryza sativa
  ref <308>: DATABASE ACCESSION NUMBER: AK101493
  ref <309>: DATABASE ENTRY DATE: 2002-08-28
gactcgtcagaagcatccgccgcctacctgccaacccctagaattccgaaaatgcccctggaccccgactcctcgccggcgccgccgcaccgggactggttcttcccgccggcgccgcccttcctcccgtcctccagagcccgaacgccgagggcccccttcccctccacctcccgctcctccaatccatactccttcccggaccgccggccgcctcctaccccgcgctcccgctcccgctcccccctcccgccgccggagcagcagaagcagcagcagccgcccccgacgacgcctcctcccgccccgcgccgtcgcgacccccggtatgctggcgtccgccgtggcgatgtccgaacgctcaccgccgagaaagcggcggcggcggcggcggttcctacggccgcgcaggtgcacgggagcaagtcagcggcgtcggcgaccaccctccgatggtcagggatggtatccgtggcggctattgtgctctgcttctcttcccttgtccgcagtaactcctcgctacatgatcaggtccaccatttgaaggctcagcttgcggaagctactacaaaattgcagtcttgtattacagagtcctcgatggatatgagtagcatattatcatatcagagcaataacagtacttcgcagaacagaggtcttaagaatttctcattgctgctctcgctttctacgctgtacgccccattactcattcttaagtacatggaccttttcttaaagctgaggagttcgcaagactccgaagaagaagttcccataaacaagcggttggcataccgagttgatatatttttatcacttcaaccatatgctaaacccttggttctacttgttgctacattgttacttattggtcttggtggcctggctctttatggtgtaaatgatgatagccttttagattgcctctggctgtcctggacctttgttgctgattcgggcaaccatgcaaacgcagaaggctttggaccaaagttagtttcagtttcaattagtatcggtgggatgctggtttttgccatgatgcttgggcttgtaacagattcgatctctgagaagtttgattcactgaggaaaggaagaagtgaggtcatagagcaaagccacacgctggtccttgggtggagtgacaaactgggatcattgctgaaccaaattgctattgctaatgaaagtttgggaggaggaaccattgtagtgatggctgagaaagacaaagaggaaatggaagcagacattgctaaaatggagtttgacttgaaaggaacagctataatttgtagaagtggaagccctctgattctagctgacttgaaaaaggtctcagtttctaaagcgcgtgcaattgtggttttagctgaagaaggaaatgctgaccagagtgacgcacgcgcattgcgaacagtcttgagtttaactggggtcaaagaagggctaagaggtcacatagttgttgagcttagcgaccttgacaatgaggttctagtcaaacttgttggtggagcccttgtggaaactgttgttgcacatgatgtgataggtcgtttgatgatacaatgtgcacgtcagccaggccttgctcagatatgggaagatatccttggcttcgaaaactgtgagttctatattaaaagatggcctcagttggatggtatgcaatttgaagatgtgctcattagctttcctgatgccattccatgtggcataaaggtggcatcttatggtggcaagattattttaaatccggatgacttttatgtcttgcaagagggtgatgaggtgctagtaattgcagaagatgatgacacatatgccccagcgccattacccaaggttatgagaggttacctacctaaagattttgttgttcccaagtctcctgaaagaatattgttttgtggttggcggcgtgatatggaagatatgataatggtactcgatgcttttctagcgccagggtcagagttgtggatgttcaatgacgttcctgagatggacagagaaagaaagctgatagacggaggcctggacttcagtcgtctagaaaatattactttggttcaccgtgaaggaaatgctgttattcgccgtcacttggagagcctccctttagaatcatttgattctatactgattctggcagatgaatctgttgaggattcagcaatccaagctgattcaaggtcgcttgcaacactactgctgatcagggatatccaggcaaagcgacttccattcagggaggcgatggtttcacatgttactcgaggaagcttctgtgaaggttcttggattggggagatgcaacaagcatctgataaatctgtcataatcagtgagattctggatcctaggacaaaaaatttattgtcagtgtcaaaaatcagtgactatgttctatcaaatgaactagtgagcatggcattggcaatggttgctgaagatagacaaataaatgatgtcttggaggagctatttgcggagcaggggaacgagatgcaaatacgaccagctgatctctaccttcgagaagatgaggagttaaatttctttgaggtcatgctacgtggtaggcagagaaaagagattgtcattggctaccgtcttgtggatgctgaacgcgccataatcaatccaccagacaaagtttcaaggcggagatggtcggccaaagatgtttttgttgtaattaccgagaaagaatgagttacatcatttagc

SEQ ID NO: 26052 - DNA, 1201 bp, Oryza sativa
  ref <308>: DATABASE ACCESSION NUMBER: AK101494
  ref <309>: DATABASE ENTRY DATE: 2002-08-28
gtgaaaccgccaccgccaacccaaaccaaacaaagccgcgccgccgatctcgccatggcgcagcagcagccgcggcgagttctccgcgtggcgccgccggggcgaggaggggcgcgcgcggaggcggagcggggggaggagggggaggcggtgttcgcgacggtgcaggcggcggtggacgcggtgccggtggggaacagggtgcggacggtgatccgcctcgcgccggggacgtacagggagcccgtctacgtcgccaaggccaagaacctcgtcaccctctccggcgaggccggctcgcccgaggccaccgtcatcacctgggacaacaccgccacccgcatcaagcactcccagtcgtccagggttattgggacaggaacgtttggatgcggaacaattattgtggagggggaggatttcatcgcagagaatatcacatttgagaactcagctcctcaggggtctgggcaggcagttgctctccgagtaacagcagataggtgtgccttctacaattgcaggttccttggttggcaagacacattatatttacattatggaaaacaatacttaagggactgttacatcgaaggtaactgtgacttcatcttcggcaactctattgccctgttggaacattgccatattcattgcaaatcagcgggttacattactgctcacagccggaaatcctcatcagaaactactggttatgtgttcttgaggtgtattattactggaaatggagaagctggatatatgttcctgggtcggccttggggaccgtttggaagggttgtctttgcgcacacttttatggatcgttgtattaagcctgctgggtggcataattgggacagatctgagaatgaacgaactgcttgcttctttgagtacaggtgctcagggccaggtttccgcccatcaaaccgagtggcttggtgtagacaattgcttgatgttgaagtggagaatttcctttctcactctttcattgatccagaccttgataggccttggctcatccagatgatggcaataaaagtaccagtctcagcatagtctaatcccaggattgtagttcatccctcctccctagtctatcttataaataattttggagggtgtattataagtgtaacatttggtcaacttgtgcccacgcaattgtattgaggagaggtatttgttgttttcc

SEQ ID NO: 26053 - DNA, 1888 bp, Oryza sativa
  ref <308>: DATABASE ACCESSION NUMBER: AK101495
  ref <309>: DATABASE ENTRY DATE: 2002-08-28
gatacatcaaatcaggaagatcatagcacagttgcacacagtcttgatcagcaatggcatctcacagagctgctgtttttgctgttcttacgctgctactttcagtagctgcaattgcaatggctaggccaatcagaagaagcgatttgggcttgggccttggcgctaatggtgggctaggtgtaggactaggacttgatatcggactaggtggttccggctcggcatctagttcaggccagggctcgggttatggggcctggtctgggccaaacggtggttcttacactgcgtcaggtcatgggttgggcttgggctccggatatgggtatggatcaggatccgcgtatggagctggtaatgggggctctgcttcgggttgtggctctggctcaacatcttgctcgggctcaggatcaggttccgtaggactagggacatcgattaacgttggtgtgggtgtaggagccaatggtggcactaacggcgggtcagattgcgacactggctctgggtcaaactatggctctagcacaggctcaagctctggctacgggtcgggtggagtttcctaccgctcacgtggtcatggcgggtcttctagtattgggtcaggttcgggggttggtttaggagcaacttctggtgctggtgccggttctaatgttgggccaagtggtggttgctcgacttgtggttctggttctaggtcgggatcaggtgcgggtgggggttcatattctggatcaaatagcggctcgtcatcgagttctggctctggttcaaactcaaattcaattggagggtcaggatcaagttcgggtgctggctctggctcaagtgcaagctcaggttatggtggctctagttctggttctatgtcaggatctggttcaagttcatcatccggttccacagggatgtcatatggttcatcaggtgctggctcattcagtggatcaagcagcggttcaaactctaatgccggctccatgtcaggtgcaaactcaggagccggttcaagctctagtgcatatggtgcatcaggcagtggatcaaactccatgtcggattcagggtcaagctcaggatcggttagtgcttccggaagtgggtcgtccaactctggtgcaggttcaggttccagctcttcttcatggtccggttctaattctggctctggcacaatgtcgggaattgacgctccgtcaagtacaggaacatcgtctactgctgaatcaaactctggatccgccacctctgtcaccggtgcaaactcaggctcatattcaagcgcatggtccaactccaactccaactccggctcgactatgccatctggtataggggttgcttctaatgctggctctagctcaggttcttggtctaatgctggctcaaacactggcacactctctggggctggatcctctaactggtcaagctcgacgtccgggtctacctcaagctcaggtttaggtggtgggcaaggggttggaagcagattcggttccggagcccaaccgacttttggtatgggtggaggaggtgggtttggagcgggttacggatttggagccggagccggaggttggggtaagcaccattaagataaggtgttgggcagattcttatataaaaaagaagggggtgagaattttggatccccttgctctcatggttgatttacatgttgtattgagttccctgggaataagcgatcatcagttttcagtacgctcagttcctcttgtacactagcagtagctgctctttgtttccaacaaaatgcttgaatcgttgtggtcatcgtgacgcatcagtacgtacttcttcatatgtaccggcagatgctatcttggaatgaaatcatgaaatctttgtgacc

SEQ ID NO: 26054 - DNA, 4339 bp, Oryza sativa
  ref <308>: DATABASE ACCESSION NUMBER: AK101496
  ref <309>: DATABASE ENTRY DATE: 2002-08-28
gattccccactgatccgcagaaacccgactcctcgatccccagttccccacctcgtctcctcgagcgctcgccggcgggcggttcgccggcggcgcggcggagcacgtgctcctcttccccgatctcctcctccgcgtcgtggccgccaagctctagacgggacaggacgccatccatcctccaggttatccacttccgctcccttctgctggtaagcgctccgccgtcgcctcaatctgtcgtgggatcgagctccgcaccggtgcctccgatccgtacgtcggtctccgggccgaaggcggacggtggtcggggatggatcggccccaacgccggcgtcgtggccgggcttcggatgaatggtgtgcgggtgacgggcctatagtccgtccgtccgtctgctgatctgcatcacgcggccaacaagtcaatagatagtgaactgtagtactgtaccactaccaatactgacatattctgaagacaaaacaaaccaattctgggaaattgtagacgagattccaagaaatttcgtgactcttgtctgattctgatgtccatcaagaggatgcaaagcaccaagttgggtcgtcatcagcacgtatgccaggtgacgggaggacacagtgacggctcatgatttggttcgtcgttccatcggcctaattttttccttttgccatacttgttagtagttgagctgtcttaatcggcctaattttcttcgtttagtcgtcttaataaaattattgttcgtttagctaggtgggtcgtctggtctagtgcttaatttgggtattgctggctttacataagtgggatatttaatattgttgctatgattatccagttttgtcatttcttgatgatggaacatataatggccaacatgtcaatcaatagcaggccccaaaggcatccactctgaccagctagcccattgagcaaaggcgagcaaacacattggttttatgatggcagcagtgaactcttccatgggggtcatggcgccactcctcaccaaacttgccatgctgctcagcaacaagtgcaagaaactcaagggaatgcgtaagaacattgagttccttagccatgagttgaccgaaatgaatgctgtgttggagaatcttgcagatatggagaagctagatggacagcagaagctgtggaggaatgacatccgcgagatggtctacgacatcgaggactgcattgatgtcttcatgtaccatcttggtgatggtaataacaaggatggcttgctcaggaagactgcacgcaagctcaggaatttgcgtgctcgctatcagattgccgacaagattcaagaactcaaggctcgtgtcatgcaggtggctgagcgccgtgataggtatgccaatctaggtgtatctacctcaagcattcccaaagtggtggaagttgatccgcgtctacctgcactctatgaagatgcaaaaaatcttgtgggcattgacgtccatgtatggaaattactcagtggctaatggatgaagtagagaatggttcgatacaacaacttaaagttctctctgtagttggctttggaggcattggcaagacaactcttgccaaacaagtatacaaccaattgaaaaaacgattcaatttcacatcattcgtgtcagtgtctcaaaaccctgacatggttaagctgctgagaaatttactttcaggaacaggatttcaaggctacggaattcttgatgaccatcaaaagctcattgacaccctcagaggacatcttgctaataagaggtaccttattgtagttgatgacatatggaacactcaagcatggagcattattcggtgtgcttttgctcaaaataatcatggtagcagagttatagttacaacaagagtcgaagatgtagctacaaagtgttgcgttgatttccatggtatggtgtacaagatggagccacttaatgagtttaactcacaaaagttattttgtaaaaggatatttgattcggatagtattcctgagcagtatagaaatgtatcagaagatatgttaagaaaatgcaaaggtgtcccattggcaatcattagcattgctagccttttatccagtgaaggcatgaatgtgggtaagtggaagaagattcataactttatgggttctgagtcggaaacaaatcccactctagaatggatgagacatgtactgaatctgagctaccttgacctctcacataatctcaagacatgcttcctgtatctaggaatatatcctgaagaccatacaattttcaaagctgatttgataaggctatggatagctgaaggatttatccatgagaaacctggtttggatctggaggaaacagctgagagctatttcaacgaactcattaataggagtatgattaagctagatgattatcgttccagtgaggcatgtcatgtccatgaccttatgcttgaccttataatatcgaagtgccaggaggaaaacttcatcactatagcatctaagcagcctgtaaagaatgtaacaaagcttccagttcgtcgtctgtgccatcagttgtcatacggaaacttggccatggaaagaatgaaactatcacaggttcgatcctataatactttccctgcgtttggctgcagtatgcagcctcctatttctatgtttgagcatttgcgggtattggaacttagggcctattctacatccgttttccttgatttgtctgctgtgagcaacctcttcctgttgagacacttgagtatcagaggtttcaggttaaagctgcctcagaaaattgggagactccagtgtttgaggacactagatctactaggcagccttttggttactggttttccatcagatgttatttctctatcatcattgtgtcatctaacagtttcaggtgatgcagtgctgcctaatgggattcagaaactggtctctctacaaactttgttgacctttaattcagggggtttgcccgacatttttactattgtggagaaaatttctcgatttaattcatctgctttcagactggcaaaaacacgtcgtttcaacaatggaggtcttcgttctaccaatggaggtcttcgttctccccctgcctcccttgagtttccaagtttcgatgatggttggccaactgaatccattctggactacctatctcagcatctggatacaccagcttcctcacattcggacctcttctcgccaaatttggttgcttgttcaccgcatattctgaattttgcatcgttatggcttcagcaactcatcatccgtaagaacattcgcaatgtcccatcctggctgtggttttctctaagctcacaatgctagagcttcgtgttgaggagctcagttgccgcgacgtccaatttcttgctgggctgccctgccttgttgacctcgacttgactgctcaagctacccctgagaacatcatcactaaacgcgttaccacgcgtttgggaagaatcacccataccgacaatttcccaaagctgcagaaatttgttttaacatgtgatttggcatgcctgacgtttgagccaggggcaatgccacagcttcagattctgaagctagatgacaagaagccttctaacttggaggaagggcatggcaccagtggagcggcgcaacatggcaaaactccacttattggcatcgagcacctaccaaggcttgaagaggtccaagtgacaagccactccagcaaggtgcctgcatacagggacgccgtccaaaggcatccaaggtttcaagacatacgtgccacgtttaatatctataattgaagtacaaggactcagaaaatagcgctgaaagacgctctcggcgatgaatacaagctactcaagggggttcaaaaagagattgcaatcctgaagcatgagctgagctgcctaattcccttctccagaagcttatcgacttaggagtggaaggacaaggtggggaactggcctacgatattgaggactgtatcgacatcttcctgcaccaacttcatcctagagaggacaaggatagactggtctggaaggcggtccggaagatcaaagcaactatgtgcctgcccgccatcaaatcgccctccaaattcaagaactcaaggcacatgtcgatatacatgatcgatgtatcaacctctggcgataggttcataaggatttgattcccgattgtcgttgctttatgcagaagctggaggccttgttggcatttgtaggttgtttagggcctgtttagttcgcgaaaagaaaatttttgattgtcacatcggacgtttgaccgaatatcggaaggggttttcggacacg

SEQ ID NO: 26055 - DNA, 2672 bp, Oryza sativa
  ref <308>: DATABASE ACCESSION NUMBER: AK101497
  ref <309>: DATABASE ENTRY DATE: 2002-08-28
ggccgcgccgtcacaccgccgccgcctcctcgccatggacaccccgccgtccgccgccgccgccaccgccaccgccgttgcgtcagactctgattgcgactccgcgctcgtcgccgacgtggcggaagcgctcgtgtcggcgtcccgcctgccggagccgccgcctatccccgccctcctcgccctctacctcccgcgcctcgccgcctcccaccacccgcgcgtgctctccctcgccgcctcccacccggggctcgcctcgccggacctgctcctcgcctaccgccgccacctctcgccgccctcctgcctcccctccctcgtcccgctcctccccgtcctcccctaccgccacctcctcccgctcctcctctccttcgtcccgctcgacccgcttcgccacctccaccgccacctcctcgcgcacctccccacgagtcccctcgccgatgccgcgctctccgcctacgcccgcctccgcctcccccacctcgccgcccagctcctccactccctccgccgccgccgtggcgttcgcccttccctccaggctgccaacgccgtcctctccgcgctttcgcgcagcccatccaccttgccgcaggcctccctcgatgtcttccgctccctcatcgagctccgcctccaccccaaccactacaccttcaacctcctcgtccacacgcattgctccaagggcaccctcgccgacgctctcgccacgctctccaccatgcaggggttcggcctctcccccgatgccgtcacctacaacacgctcctcaatgcgcactgccggaagggcatgctcggcgaggcccgggcactgctggcgaggatgaagagggacggcatcgcgcccacgcagccaacgtacaataccctcgtgtcggcgtttgctaggcttgggtggattaagcaggcgaccaaggtcgtggagtccatgacagcctacgggttcgagcctgacctgaggacgtacaatgtgctcgccgtggggctgtgccaggcggggaaggtggacgaggcattccggctgaaggatgagatggaacggctcagcaccgcgttgccggatgtagtgacttacaatacacttgttgacgcctgcttcaagtggcggtactcatcagatgcattgaggctgcttgaggaaatgcgtgacaagggggtgaagccgactttggtcacacataacattgttgtgaagagtctttgcaaggagggtaaattggaggaggcattggggaagctggagaagatagcagaggaggggttggcaccagatgtaatcacgtacaatacgttgattgatgcatactgtaaggctggtaatgtcgcaaaagcattcacattgatggatgagatggtcggaaaggggctcaaaatggacaccttcacacttaacaccgtgctgtacaacctatgcaagatgaagcgttatgaagatgctgaggagcttttgcattcacccccgcagcggggtttcgtgcctgatgaagtcagctatggtactgtaatggctgcgtacttcaaggagtataatccggagcctgctttgcgtctgtgggaccagatgattgagaggaagttgataccaagcatttcaacgtacaacacgttgatcaaggggctttgtaggatggagaggctgaaagaagcaattgacaaattaaatgagctcgtggagaaggggttggttcctgatgaaaccacatataatatcatcattcatgcatactgcaaggaaggggacctagaaaatgcctttcgattccacaacaagatggttgagaattccttcaagccagatgttgttacctgcaacactttgatgaatggcctttgtctgcatgggaagctagataaagcattgaaactctttgaatcatgggtggagaaggggaagaaggttgatgttatcacatataataccctaattcaatcgatgtgcaaagttggggatgttgatactgctttgcacttctttgatgacatggaggtcaagggattgcagcctgatgcatttacttataatgttgtgttatctgcactatctgaagcaggaagatcagaagaagcacataatatgctacataagttagccgatagtggaaaattatctcaaagctttgcttgtcctctgttgaagccttcttctgcggatgaagcagatgtcaaggaacatgagggtaaacctgaggcagaatccagtgaaaaagcacaagacaatgctctggagacatacatggaacgcctaaatgggctatgtaccggtgggcaattgaaagaagctaaagccgttttggatgagatgatgcaaaaggggatgcctgttgacagttcaacatatataactttgatggaagggcttatcaagagacagaaaaggcaaacccatgcagctggacagtccacactatagatttttgctcccgtgggatgcgggcatgtgacatcattagggctttagtcataaatctggaaaactcaagtgcttggctaccaggattaccatcatggacaaaaaaaaaagaagtcggtatgtcaacattttttttctgcagtcagaaccttatatttgtaactttcagtacaaagtaaattcatttttagttttttcactgcacgctatgttaaatgtataaagaataccagcagtgatttgaatc

SEQ ID NO: 26056 - DNA, 1418 bp, Oryza sativa
  ref <308>: DATABASE ACCESSION NUMBER: AK101498
  ref <309>: DATABASE ENTRY DATE: 2002-08-28
gagattaattctcgcgtcgtgtcagaccacgctgccgcgggggatctgccgggtggcgaggctgcggagatgtcggacgcgctgatcaacggcgtcgccggcgccggcggcgggatcatcgcccagctcctcacctacccgctccaaaccgtgaacgcgcggcagcagacggagcgcgacccctccaagccggcgttcaaggacggcgccgtccgccagatgtgcctggtggtgaagcatgaagggtgggagcggctgtacggcggcctcatgccctcgcttgttggcactgcggcctcccagggtgtctactattacttctaccagatattccggagcagggcggaggccgcggctctccagcgatccaggagaggaatcggcgatggatccgtcgggatgctccaatccctcactgtcgctgcgctttctggatgtgttaatgtacttctcacaaacccaatttgggtaattgttacacgaatgcaaactcaccggaaggcaaacaaacagcagagtcctctggatttgacgtgtgttcttgacaaggccctacaagctcccgctgttgaaaacatacctcacaagactatccatgttattcaggacctttacaaagaagctggatttttgggcttctggaaaggtgtagttccagctcttattatggttagcaaccctgcaatccaattcatgttgtacgagactcttttgaagaagttgaaaaagagacgtgcctctaatttgaagggagctgatggactgactgctcttgaaattttccttcttggtgctgttgccaaactgggtgcgactgttgttacatatcctcttctagttgtgaaggcaagacttcaggtgaagcaaataattgatgatgacaagaggcaccgctacaaaggcacatttgatgcgatcacaaagatgatacgttatgaaggtttgtcagggctttataaaggaatgagcacaaaaatcgtacaaagtgtttttgcttctgctctcctttttatgattaaggaggaactggtgaagggcgctcgattattggtaaccggcaacaccagccttgttaagaagttaccatcgaagccattaagatgatctaggttgtacaagagttagttccctacttataccacaattgtttccataaagcgatggacagagttgccaagcgcccctgttaggagatatcaagttatctgtgagactctgatcgactgtaggctctccaaaaaaaggagattaaagatgtagtacaattaccactgtgattcttgtaggaaccaataatgatggtatatattgggtaggctatctctgttgctcgtgtaaagtatactgttatggaagattgaaacactagaaaataagttggcaatgagaatcgcaagcgctagtcatctgttcagatt

SEQ ID NO: 26057 - DNA, 726 bp, Oryza sativa
  ref <308>: DATABASE ACCESSION NUMBER: AK101499
  ref <309>: DATABASE ENTRY DATE: 2002-08-28
ggagttggcggcgtagagggaacgagaagaggcgagttcttgacccttccaccgttgcgcgcttcgtctgagttttgcgcctctcctcgagaccggcatggatgcaaagaacttaggcaacagacgacaaaatcatgagaagagtacaatgacagaagatgcacggagccgagatcaggagaccttgcagcggtttgcagattcagatattactgtgagtccagtcaacagtcatgaatctggagatgtgaacatggaagctgccatctctgctgaggatgtcttgcgagctggtggtttcggagcaaaagatgacatcggcagcctccttcccacagccgtagattcgactgatttcgaggcctcgctacgggatgctcgcgactttgaaggcgagagtgaaaaaccatcgcatcctggactaggatacaaagcaaatgaaactgacagtggaggcaaaccatcagatgtgcagcagcagcagcagcagcagtgatccttagtgttctcttctcctccatgcaattttagctttggataacatgacattcgccgcgttcctctagtgctccgaagacctatcctgttctgactttgtgctaaggtatgtggcatttctgttgtttccctgatgtaccatgtatgaacgtgaccatgatgattctgctgtatgaaccagatcgtttcaccttgtatacctaagtattagtggtagtagtttgtgcc

SEQ ID NO: 26058 - DNA, 1922 bp, Oryza sativa
  ref <308>: DATABASE ACCESSION NUMBER: AK101500
  ref <309>: DATABASE ENTRY DATE: 2002-08-28
gatcttccttcccctaccttccttccccaaatccaacgcacgcgccgtggccccacccaaatccgatggcgagctgagtccccggcgtgcaaccacggcgccgacaaactcccgccccaccgctggaggcggcggcggaggccgtcgcgctgccggatgctgcggcggtggcgtcggcatggacgcggcgctgtgcgacgacctgctgcaggaggtgttccgcctgctgccgcgcgcctccgcgccggctgtgtccctcgtctcccgccgctggtacgccctcctccgcgcgtcgattgcctccctgaccctccgcctgccggtctcctccgacgcctcggtgttggcgccgctctctgcgctgctgtctcggttcccctatctctccgccctggcggtggtctgcacagccgcaaccgcccaggtcgcggacgcgatgctgctcgtggtcgcgtcttcgccgtcggccgcgcagctctccgggctgaggttcctgcctgattcggctatctcgcctgcggcgctggttgctgcctgcccagccttctacggcctcacctcgcttcacctgaccgccctccgtcccctctctttctgctggattgcgttcttgccccgcctcaaatccttctacctcgtcaactccgctgccgccgccgccgttgactacgccggatggagctctgatgatgtcgacggcaacggtgagaccattggctctttgcctctagagaggctgtctctgtgcggcatctgctccggcgaccgagggatcgggtggttgtggcgacgatgtgggaacctccagtggcttcagctgcgcgcctgtgacggcactggggacgggccctcgtcgcagttcttcgcgggatgccttgctggcctgctcgcgctagagctccgtgcttgtcgctccgtctctgaccacgtcctcctcctcgctgctgatcgctgccgtgtgctcaagtcactcctggtgtacgatggcggcagccgggaggccctccaccggttcatccaccagcgtggcgcagcgttgcacacgttagacctccgcctccctctcgacttgcacaatgaccacctcctagcgatcggtgccgaggccgagcaaggtcagcaaagccagaatggcgggcatagcctcgctgcgctccggcttcagagctgtgtgctcatcactggcgacggactccggtccctcgcacgcacaaccactggagctggtatcgaagagcttgccttggtgaactgcgatgtggtggaacgggagcctggactgcttaccttcctcagccagagcatgcgccgccttcgccgtcttgatttgtcatacaacgagactctcagtgacaaggaggttggtgccatgctatcgtcctgccataatctaattgatatcaggctcaggggttgcaggtgcctcactcgaggatctttggtatcgttgctcagatactgtggccggtcagtggaggtcatcgacatcactcgctgccttagcattgcagcagccgatgttgaattatttgcacaggaagccactcgattaattcaggtaatcatcgaggacagcttgttgtcagaggaattgcgggccattgcacataagaaaggcataagggttggcccattgcgttgcgattgataattgtgataaaaggtaatcttcttcataatgcccctcatagatgcttgaatctgagcaatcccaactccctacttgaatgtgggaataaggtttcacaacgacatctcactacttgtgtatatgagtttatatgttcaagtatgtatatattattagggaacctattattaattgcaaacttgtctggcaatgtaaattcagcaccaagaattgtgctgttttgtatgctcctagaaataacacgtgaaataatacagaaaacttcaaatcc

SEQ ID NO: 26059 - DNA, 1854 bp, Oryza sativa
  ref <308>: DATABASE ACCESSION NUMBER: AK101501
  ref <309>: DATABASE ENTRY DATE: 2002-08-28
gtggcaactggttagacttttttttccctttgcctataataaagccatctctcataaagccatcgacctcatctcctcctcctcctctctctgtctctctctggctgttcttatcagtttacgttgtcctcatcgtcgccggcgccgccctcaaaagcttcatagatagctcgatcgatcgatcccgtcgtcgtcgatcgtcgtcgacgcagcagcctcgccggcggccggagactggggagatcgatcgagagggagggaggttgagtaaggtggatccacgggtcaggcatggcaagaggcccctaccggccggcgaggaggaggaagaagaccagccaccgcctccgacaccaccagcaaagcaggagcagcaggacgaggaggagctcgccgcggtcgtcatcagcggcggcggagcaggagcagctccggcgccggagacgtacgcgcagtactactacgcggcgcgcgccgaccacgacgcctccgccatggtcaccgcgctagcccacgtcatccgcgccgcccccgacctgcacctcccccaccacccatcctcctccgcctccgccgccgcccacccgcagcaggcttcttccttctacccgaccgccgccgccgccgcctcctcgccgtccgaccagctcgccgccgccgccgctgccgaagagcaagggaggaggcggcactacagaggtgttcgacagcggccatgggggaagtgggcggcggagataagggacccgaagaaggcggcgagggtgtggctggggacgttcgacacggcggaggacgccgccatcgcctacgacgaggcggcgctccggttcaaggggaccaaggccaagctcaacttccccgagcgcgtccagggccgcaccgacctcggcttcctcgtcacccgtggcatcccccccgccgccacccacggtggcggctactacccctcgtcgtcgccggcggcgggggcatgccccccgccgcggcagcagcagacggtcgtgccgtacccggacctcatgcggtacgcgcagctgctgcagggcggcgtcggcggcagttacatgccgttcggcggcgccgcgacgatgtcgtcgtcgacggtgtcgtcctcgtcggcgccgcagatactcgacttctcgacgcagcagctcatccgggccggcccgccgtcaccaatgccatcgtcgggctccggctcggcgaccgcggcggcgtcgtccacgacgtcggcgtcgtcgcccggtgcatggccgtacggcggctcggagcgcaagaagaaggattcgtcgtcgtgacgtcactggatggatcgatcgatgcatgaatatgccatgcatttgagaggaagaggtcaagtttttttttaagcaatggaaatggattacatcttcggcctcggcacgtggacagaaagagatcaagtgatatggatcgagaagaatgtttagctgatctgctctttactctgcacgatcgaggagatgaaaatgcatgcaatatgcatggaggggtaagtgttaagtggttaattggtgatttttgcgggttaattaattacatggacattaatttttcttttgatcaccttttgtttattttttctctgaaaactatcttcttttgttcatttttattttcttggaggtacttaattaattagctaggttaattagctggtgatttttagtttgttgtttccctccttttgttcaagtgtgaactaattgtgcaaaattagtccaagtaaagcaaagagagaggattcttatttaattattggttaaacattacccttttttaagatgaaacatgatgtctttttttaaaaaaaaaatctgaatgattacc

SEQ ID NO: 26060 - DNA, 1015 bp, Oryza sativa
  ref <308>: DATABASE ACCESSION NUMBER: AK101502
  ref <309>: DATABASE ENTRY DATE: 2002-08-28
gatttccgcctctctctctcccccccatctctacagaggcagcagcagcggcggcggcgacaagggaagccgatggccatggcgacctccaccttctcccccccggcctcgcagctctccctcaccgccgccgcctccacccgggccccgacctcctcaccctctcctccccgcgcctccgcgccggcctccgcctcgcccgcgccgccgccggggaggcccccgtggagactgtcgaggcgccgccgagcaagccggaggccgagccgtcccccgctgcgtccaacggggccgccgtcaaggccgagaagccgccggcggcggcggcggcgcccccgctgcccaagttccgggactcgaggtgggtcaacgggacgtgggacctcaggcagttcgagaagggcggcgccgtcgactgggacgccgtcatagacgccgaggccaggagaaaggaaatggcttgaagattgtccagaggcaactagccctgacgaggccgttgtcttcgatacttcaatcataccgtggtgggcatggatgaagcgtttccatctccctgaagccgagaagctaaatggccgtgctgccatgattggcttcttcatggcatactttgttgatagcttgaccggcgtggggcttgtcgaccagatgggcaacttcttctgcaaaaccctactgtttgttgctgtggctggtgtgctgctggtcaggaaaaacgaggacatagagacagtgaagaagctcatcgatgagacgacgttctacgacaagcaatggcaggcaacctggcaagatgagtccccttctcagcccaagaaatagctctgaagtggaatctgaatctgaatcctccctatgttgtattgtatcacttctttttgcagcccctttctcaacccatttattagtgaggctcagtacattttgatgatcttaatacctatgacgtcttgtaaaaagtacgaactcgtttctgtgctagaggttaacgttgctgcgggttacttggttg

SEQ ID NO: 26061 - DNA, 1961 bp, Oryza sativa
  ref <308>: DATABASE ACCESSION NUMBER: AK101503
  ref <309>: DATABASE ENTRY DATE: 2002-08-28
gacttcgcaatgcatcgactgcgtcaccatgccgccctcgcctcctcccgcctcctcgtccgcgacaaccagcgcatcaccgcgctcgcccgcgccggcgacgtggccgccgcgcgcagggtgttcgacgccatgccccgccgcgacgccgtctcctggaacgcgctcctgaccgcgctgtggcgggcgggccgcgacctgcccgccgcgcgcagcctcttcgacgatatgccctcccgcaacgtcatctcctggaactccatcatcgccggatgcctcgcccacggcgacctcgcggccgcctccgcctacttcgcgcgcgccccgcgccgcaacgtcgcctcgtggaacgccatgctcgccggcctcgtccggctcggcagcatggaggacgcgcggtcgctgttcgaccaaatgcccgagaggaacgtggtgtcgtacaccaccatggtggatgggctcgcgaggtgcggggaggtcgctagcgcgcgagagctgtttgacgcaatgcctacaaggaacttggtttcgtgggctgcaatgataagtgggtatgtcgacaacaacatgttggaagaggcaagaaaattgttcgaggcaatgccagagaagaatgttgtggcatgcactgcgatgatcacagggtattgcaaggagggcgatttgcagaacgccagaaggctgtttgatgggattcgtgccaaggatgtcatatcttggaacgccattatttctggatatgttcataatggacttggagaagaagcaacgaaactgtacatcataatgcttagagaaggtatcaaaccagatcaggcaacacttattgcactactgacagcatgttcttctcttgctctgctcagacaaggaagatcaacacatgctgttgtcatcaaagctatgttagaatcaagcatttctatttgtaatgctttgatgacaatgtatagcaagtgtggcaatgttgacgagtctgagttagtcttcatgagtctcaaaagccaggatattgtttcttggaacacaataattgccgcatatgcacaacatggcagatatcagaaagttattgctctgttccatgagatggaactgtgtggactgataccgaatgatattaccttccttagcatgttatcagcgtgtggacatgctggcagagtggatgaaagcttgaaactgtttgatcttatgttttccaaatatgcaatatctccaagagcagaacactatgcttgtattgtggatatattgagccgagcaggacagttggagaaagcatgtagttacataaaggaaatgccttctgaggctgagaagaatgtttggggcactctactttgtgcttctcagacacatggtaatgttcagttgggtgaacttgctgctaagatgcttgtcctatcagactttgaaagttcaggggcttatgtgatgctttcaaacatatatgctgctgctggcatgtggggtgaagtcaatcgagtaaggagccaaatgaaggaaaaaggtgtgaagaagcaacctggacatagctggacagagattgctgataaagttcatatgtttgttggtggtgatgcatcccatcctgagatggacatgatcttatccgagctgagaaaaattagctttcatatgcagatggtcactgataaaactcagatgatggaagagctagttcaagaatgtggttagtgctttttatatcatccaaattctcgtgcgagtttagtaagctctgctgtactcagaatctccagctttgtgctctaggatcaaatttctatgaatagattattcatatgagatacatgaattcccagaatggattttaatcaaacgagtacagtggatgttgctttgatgacaaagatatatctctttgcaaaaggagggttgaaactagacatgagaaggagcatattttggaggtaacagctacatttattgatcct

SEQ ID NO: 26062 - DNA, 2457 bp, Oryza sativa
  ref <308>: DATABASE ACCESSION NUMBER: AK101504
  ref <309>: DATABASE ENTRY DATE: 2002-08-28
gacatgtgcgcgcatgaactacgggcttaatttgcacctccgagcgaaacattgatcgtttcttatgaagcacacgcccactggtgggtcagtcacgatcgcgcattcaaaatctctcatgtttttacagtaaaatccaccctggagcctggatgacgggagaatgtagaccgctcctcaactctgtgctcgttggacttggacgcagcctataagtggctgaccccgagttctccgagttagcaagaagccactccactcggccgctcctgcatgtataactagctagttctagctcgctcaggcactcgatccaccgccgggcgcgttggattgagataggctgaggagatgatatccgggcacgacttctacacggtgatggcggcggtggtgccgctgtacgtggcgatgttcctggcgtacgggtcggtgcggtggtggggcatcttcacgccggaccagtgctccggcatcaaccgcttcgtcgccatcttcgccgtgccgctcctgtccttccacttcatctccaccaacgacccgtacgccatgaacctccgcttcctggcggcggacacgctgcagaagctgctcgtcctggcggggctcgccgcgtggtcgcgcctcccctcgcggaccggcgcgccgcggctggactggtccatcacgctcttctccctctccacgctgcccaacacgctcgtcatggggatcccgctgctgatcgccatgtacgggccatactccggctcgctcatggtccagatcgtcgtgctccagtgcatcatctggtacacgctgatgctcttccacttcgagttccgcgccgcgcggatgctgatcgccgaccagtttccggacacggcggcgtccatcgtgtccctgcacgtcgacccggacgtggtgtcgctggagggcggccacgcggagacggaggccgaggtggcggcggacgggcggctgcacgtcaccgtgcgccggtcctcggtgtcgcggcggtcgctgctggtcacgccgcggccgtcgaacctgacgggagcggagatctactcgcttagctcgtcgcggaacccaaccccgcggggctccaacttcaaccacgccgacttcttcgccatggtcggcggcgggccaccgcccccgacgcccgctgcggtgcgcggctcgagcttcggcgcctccgagctctactcgctgcaatcgtcgcggggcccaaccccgaggcagtccaacttcgacgagcactcggcacggccaccgaaaccaccggcaacgaccacgggggcactcaaccacgatgccaaggagctccacatgttcgtgtggagctcgagcgcgtatcccgtctcagaagtcagcggcctgcctgtgttcagtggcggcggcggcggcggcgctctcgacgtcggcgccaaggaaatccacatggtcatccccgccgacctgccgcagaacaacggctcaggcaaagagcacgaggagtacggcgcagtggcattgggtggcggcggcggcggagagaacttcagcttcggaggcggcaagacggtggacggcgccgaggcagtagacgaggaggcggccttgcctgacgggctgacgaagatggggtcgagctcgacggcggagctgcacccgaaggtcgtcgacgtcgacggaccgaacgccggcggcggcgccgcgggcgcggggcagtaccaaatgccgccggcgagcgtgatgacacgcctcatcctcataatggtgtggcgcaagctcatccgcaaccccaacacttactccagcctcctcggcctcgcctggtccctcgtcgccttccggtggcacgtctccatgccagcaatcgtcgagaagtccatctccattctctcggacgcaggcctggggatggccatgtttagcctgggattgttcatggcgctgcagcccagcatcatcgcgtgtggcaaatcagccgccgtcgtctccatggccgtccgcttcctcgcgggccctgccgtcatggccgccgcgtcaatcgccatcggactccgcgggacgctcctgcacgtcgccattgttcaggcggctctaccacaagggattgtgccttttgtttttgcaaaagaatacaatgtccacccggccatcctgagcacagcggtaatttttggcatgctaatagctcttccaatcacattgctgtactacatccttcttggactatgatcaagaaagcttatggacgctctcacataaaacggaagaaatgggggcaaagagagagaaaaaaaagcgatcctgtccatctcaaacagcgtatgcttatatgtatagcctgttgtcggacattgcccatgatgacaagacaacgaagttgttacagagctatatatctctgcgacatttgtacaagagataacgacagaatgtactcaaatataaccgatattagatatgtgttctgttaaagatctc

SEQ ID NO: 26063 - DNA, 1808 bp, Oryza sativa
  ref <308>: DATABASE ACCESSION NUMBER: AK101505
  ref <309>: DATABASE ENTRY DATE: 2002-08-28
gagaaacccgagcattccaccgtgcgcgaaagcgccccgtcaccatgcgcctccaactctgcttcctctgcttcggcttgcttctcgtctcctcctcgctgcaatgccacgggctgcttctgccgctcaccaacaccctctcctcgctccgcccagccaatgacacagccaccatccaccgcctcctccgctcctcctccctccgttccgccgcgcgccaccgcggccgccgccacggcacgcgccgcgcgcctcctcctccacggcaccgccagctctcgctgccgctcgcgccggggagcgactacacgctgtcgctctcggtcggcccgccttccacggccagctccgtgtcgctcttcctcgacaccggcagcgacctcgtctggttcccctgcgcgccgttcacctgcatgctctgcgaaggcaaggcgacgcctggtggcaaccactccagcccgctccccccaccgatcgactcccgccgcatctcctgcgcgtcgccgctctgctccgcggcgcactcctccgcgcccacctccgacctgtgcgccgcggcgcggtgcccgctcgacgcgatcgagaccgactcgtgcgcgtcccacgcgtgcccgccgctgtactacgcgtacggggacggcagcctcgtcgcgaacctgaggcgcggacgcgtcgggctggccgcgtccatggccgtggagaacttcaccttcgcctgcgcgcacacggcgctcgccgagcccgtcggggtggccgggttcgggcgcggcccgctctcgctcccggcccagctcgccccgtcgctctccggcaggttttcctactgcctcgtcgcccactcattccgcgccgaccggctcatccggtcaagcccgctgatcctcggccgcagcacggacgccgccgcgatcggcgcctccgagacggacttcgtgtacacgccgctgctgcacaacccgaagcacccctacttctactcggtggcgctcgaagccgtctcggtgggcgggaagaggatacaggcccagcccgagctcggggacgtggaccgcgacggcaacggcgggatggtggtggactcgggcacgacgttcaccatgctgccgagcgacacgttcgcgcgggtggccgacgagttcgcgcgcgcgatggccgcggcgcggttcacgcgcgccgagggcgcggaggcccagacagggctcgccccctgctaccactactccccgtcggaccgcgccgtgccgccggtggcgctccacttccgtggcaacgcgacggtggcgctgccgcggaggaactacttcatggggttcaagagcgaggaggggcggagcgtcgggtgcctgatgctgatgaacgtcggcgggaacaacgacgacggcgaagacggtggtggtccggcagggacgcttggcaacttccagcagcaggggttcgaggtggtgtacgacgtggacgccggtcgcgtcggcttcgcccgccgccggtgtacggacctgtgggacacgctctcgcgccggtgagctgctggtgcggacttacgatgatcgagtatgatttgtcctaagctctcaggtgtacagagtacagactagtggtagctgccatgcatgtatctgtaggattgttcttcttgcgacgttactgttttgtttctcgtgtttctgcttgtaaatctgtcttgctctgcccgtatggaacctgattaacgattaaccgatggcaacgactcggacggcgagacatgtctccacacgggtttttgctaccaacagagaaactgcagtaaacaaactcgaacctttggc

SEQ ID NO: 26064 - DNA, 2325 bp, Oryza sativa
  ref <308>: DATABASE ACCESSION NUMBER: AK101506
  ref <309>: DATABASE ENTRY DATE: 2002-08-28
gagcctcaaccccaagccctccaaccccaagagaggccgcgccgcgagagagagagagagatccaatccaatccggcccccgtctccccccctcctccacgccgcggcgccgctccggttgcttgctcaggttggagtggtcgcgccgccgccgccgccgccgcgccgcgcctctcgattcggccgcgcgagcagatccgagcacccaacggcggccgctgcgcgcgggggggttcgaattctgcgccgctgccgttgcttcgcgtctcctttctcagggtgtgctgctctgttcgcttcctgcaggggggcgggctgctgatcgaaatgggcgggcgcgtgtccaaggcggtggcctgctgctgctgccgctcgcagcaccatggagtcgtcgtcgagagctcggagaagacggcggaggaggaccatggggagtcgtatgagctgccggcctttcaggaattctccttcgagcagctgaggctggccacctcaggctttgcggtggagaacatcgtgtctgagcatggtgagaaggcgcccaatgtggtgtacaaggggaagctcgacgcgcagcgtcgcatcgctgtgaagaggttcaaccgttctgcatggcctgacccgcggcagttcttggaagaagctaaatcagttggacaacttcggagcaaaaggttagcaaatttgcttggctgttgctgcgaaggtgacgagagattgcttgttgcagaatacatgcccaatgacacactagcgaagcatcttttccattgggaggcgcaagcaatgaaatggcccatgagattaagagttgttctctatctggctgaggctttagaatattgcaccagcaaggggcgtgctctgtaccatgatcttaatgcctacagagttctctttgatgatgactgtaaccctaggctttcatgttttggcctcatgaagaacagtcgagatggtaaaagctacagtaccaatctggcgtttactcctccagagtacatgagaactggacgtatcacacctgagagtgtcatttacagctttggtaccttgcttttggatgttcttagtgggaagcatattcctcctagccatgcccttgacctgattcgagatcggaattttaacatgctgacagactcctgtttagagggtcaattttcaaatgaggaagggacagaactagtgcgattagcttcaagatgcctgcactatgaacctcgtgaacgacctaatgtaagatctctggtgcaagcattggctcctcttcagaaggatcttgagactccatcttatgaactgatggatataccccgtggtggtgcaacatctgttcagtcattgcttctttctcctcttgctgaagcttgttccagaaaggatctgacagcaatacataaaatcctagaaaagacgggctacaaggatgatgagggaacagcaaatgagctctcatttcagatgtggaccaatcaaatgcaagatacattgaactcaaagaagaagggtgacaatgcttttcgacaaaaggacttctcttctgcaattgactgttattctcagttcattgaagttggtacgatggtttctccgaccatttatgcgcggcgttgcctgtcatatctgatgaatgacaaggcagaacaagctctcagtgatgcgatgcaagcgctagtaatatctccaacatggccaactgcattttatcttcaggctgctgctctgctttctttaggcatggagaatgaagctcaagaagcaatcaaggatggttgtgcccatgagacaagtagcagcagtggacattgaatatgactgaacaaatttgtagttcagaaaatgcacataacttcaggtgttttggtgtgaacaatcattggacatggaagcagctgttgttcatttgtcaatttggctaggggtttctttaaccttgttctgatttgcacgtgcggaaggtcgtccctcgtccatatgttcatgtaggatgtatatatggaagaaagcgacagcagaggccctgaaagagattgcaaagacattgaaggtgaataagtcctgcagacacgacattgatgggggaagggcaaaacttggtcttggttcctcctacccaagaaaatgggaaaacgaaaaaaaaaaagggattgttatcaaaaggcgttgttgatgtacatgtcaatcttgctggtaggcgtgtaaacttgtacagcaagcgttgtgttttctccaggtcatttttcttttctttttggttttgtttcatatgtgttagcccccattggtatattctagagaaaatcgtggaattcttgtcaggcg

SEQ ID NO: 26065 - DNA, 1039 bp, Oryza sativa
  ref <308>: DATABASE ACCESSION NUMBER: AK101507
  ref <309>: DATABASE ENTRY DATE: 2002-08-28
ggggggtggtctttgtgaagcggacttgaaggatcggaggtgttccatggcaagctcgcagtgctgggagaacccgccggcgctggacccggccggcggagggggcgaggtcgtcggcgacttcggcgggcagaaggcgtacgtcgctggctcggccggctccaaggccgccgtcgtcctcatctccgacgcctttggctttgaagccccaaacctgaggaagatagcagacaaggttgctttgtttggttacttcgttgtggtgccagatttccttcatggggacccataccagccagacaatcccaacaatcctggaatttggttacagtcacataatccgaaagaggcatttgaagaggcaaaaccagttattgccgctctaaaggagaagggagcatctttcatcggggctgcaggttattgttggggtgcaaaggtagtggtggagttaggcaaagtccatgaaatccaggctgctgtattgctacacccttctttacttgctgtcgatgacatcaaagaagtcaaatgcccaatttctatacttggtgctgaaattgacaagacgtctccaccagagctgttaaagcagtttgagcagatcctttctcctaaccccgagattgctcacttcgtcaagattttccccggcgtagagcatggatgggctgtgagatacaatcacgatgatgcagctgccgtcaagagcgctgaggaagccctggaagacatgatggattggttcaagaaatacctgaagtaaaatctgaattagcagctctccatgtaccaagatattgctaagtgctagctaatgcacgaacagctgatcttgatatgccattttgggcctgaacttcgtttatgccattgtgttgtaatggcgtgtgtgcttccgttccatgtgcctcatgatacttacttttagtactatttctgaacatgtgtgtgaggttgatccaatcctgcaccaacaaacctgaaatttttgctgtgcattggagttgattttccagcaatgaaatttgcaaatgcc

SEQ ID NO: 26066 - DNA, 1601 bp, Oryza sativa
  ref <308>: DATABASE ACCESSION NUMBER: AK101508
  ref <309>: DATABASE ENTRY DATE: 2002-08-28
gagtccggcctacagcttccagccgaacccataaacaaagcacgcaacttgggagcgagcgaggggccgcacagctagccatcgatcgagtagccaggccaccacatcgccgtcctcgctagctggctgtgtcaactgcagcgacgacgaaacgaacgatcgatctcgccggctggctggctagctgctcctcctataaatccccggctcccagccgtccccctccgataccgtcatctcaccacacaaacgcaggcacacaaacacagagagcagcccaaaccgaccaaaatcactgcagagttcaggcacttcttcagatagttctccccctctgtttctttctctctttatttctttctcgagttcagtttgagagatggatttggcgtggtggttcgcggtggccgtggtggtgtgcggccttgtggggggcggcagcgccgggctgctggagaccaacccgggtttggcgtacaacttctaccagaagtcgtgccccaacgtggactccatcgtccgcagcgtcacctgggcgcaggtcgccgccaacccggcgctccccggccgcctcctccgcctccacttccatgactgcttcgtccaggggtgcgacgcgtcgatcttgctggacaacgccgggagcgagaagacggcggggccgaacctatcggtggggggatacgaggtgatcgacgccatcaagacgcagctggagcaggcgtgccccggggtggtgtcgtgcgcggacatcgtggcgctcgccgcgcgcgacgccgtgtcgtaccagttcaaggcgtcgctgtggcaggtggagaccgggaggcgcgacgggcccgtgtctctggcgtccaacaccggcgcgctgccgtcgccgttcgccgggttcagcacgctcctccagagcttcgccaaccgcgggctcaacctgaccgacctcgtcgcgctctccggcgcgcacaccatcggcaaggccagctgctccagcgtcacgccgcggctgtaccaggggaacaccacctccctcgacccgctgctcgactccgcctacgccaaggcgctcatgtcgtcgtgccccaacccgtcgccgtcgtcgtccaccatcgacctcgacgtcgccacgccgctcaagttcgacagcggttactacgccaacctgcagaagaagcagggcgcgctggcgtccgacgccgcgctcacccagaacgccgccgcggcgcagatggtggcagacctcaccaacccgatcaagttctacgccgcgttctccatgtccatgaagaagatgggacgcatcgacgtgctcaccggcagcaaagggaatatcaggaagcagtgccgctccgcctcctgaatcctgacgatcaccatacaaacatattttcttcttggtttcttgaatttttttttcttcttctcctctctcgtttcatcggcgctgatcaaaatatattgtgcgccatgatgattaattaaggtcccaagatctgtattaatttgttaagtgctcgattcgatcgttcaaggtgtgacattttgttcatcttggccttcgtcgcgcgatctaatcgaagaatgaaagaatgcagctcgttctttcc

SEQ ID NO: 26067 - DNA, 3468 bp, Oryza sativa
  ref <308>: DATABASE ACCESSION NUMBER: AK101509
  ref <309>: DATABASE ENTRY DATE: 2002-08-28
ggtttccgtaataaaaaaattagaagagtggtatctcgatagtgccactcgtaagagtggcaaatagttaaaaaaaacccatattccttccgtcgtctccgactccgaacatcctctccggcggccggcggccatcgtcgttgcctctcggtactcccgcccatgaccgctgccacgacctagcaatggggaggctttcctgtatcaaacgccttcctcgattcgctctccggcgcggcgtctccgatgctttcctccgtccccttctccgcaccgcattcctcctccgccgccgccgccgtctcagcaccgcggagagcactcatcctccgcggcggggacgcttccgtcgggaccccgattctgatgagagcaaactcgtctccctcgcgcggcagcgtggggcggcggccgctcgcgccatgttcgacggaatgccgcgccgggacgatgccgtcgcgtacgccgcgatggtcggaatccacctctgggaccgggaccttccccacgcggaggcgctctaccgtgcggcgccaccggattgccgggggatccatcttgacactgtcatgctcgatgggtacgtcaaggcaggccaggtcgaccgtgcccgcaggctgttcgacggaatggcggtgaagaacgtggtcgcctggacatgcatggtctctggatattgccgtgcgggccttgtggacgaagcgcgccgcctgtttgatttgatgccatacaggaatgttttttcgtggacgacaatggtgcagggttatgcacacaatgggatgctacgggaagcgagggagatgtttgataagatgccagagaggaacgtggttgcttggacagtgatggttaaagcctatgttgataatggttgtattcaggaggctttggagttgttcaacaggatgcctcagatgaattcatattcttggaatgccatggcaaccggtcttatgagtgctgggaaagtggatgacgcggttcagttgtttgataagatgccacataagaatgtagtctcttggactataatggtcactggcttggcacagaatggttttgtttctagggcaagagagttctttgacagaatgccaaagaaggatattccggcatggaattcaatgatcactgcttataccaatgatggccaagtgaatgatgcacaaaggttgtttgatattatgccttcaaagaacctggtgacttggaatatcatcattgatgggtattccatgaataatctgaaggacgaagctttgaggttgtttcttcttatgctccgctcagcagtatctcctgacagcactacattaattagtgtcttagtagtatctgagagcacaatggaggttagacaaattcatgggttgtccacaaaactggggtaccagcccgaaactaacttaggaaatactctggtttcaatgtattctagaagtggcgatctgtcatctgcatggcttgctttcaggagattgaacgagaaggatgccataacatggacatcgatgatacaagctttagcaaaccatgggtgtgcaccttgcgccttgcagggctttgcccaaatgttaaggtgtggatataagcccagctcaactacctttactgctgtgttgtcagcttgtaaccatgttggattagtggagaaaggccgaaaaatattcaaatcaattagccatgtttatggactagggccaaccattgagcactactcttgccttgtggatctcctaggtcgagcagggtacgtgagggaagccaaggaagtggttgacggtatgcagcgggatatgtgtgatgaggccattctagggacgcttctgggatcttgcatgacacataatgaggtggaggtaggaagagctgtgggtgaggatcttgtcaaaattgacccctctggttcaggaggctatacgcttttggccaatgtttttgcatctggtgggatgtggaatgaggtggcaagtgtgtggaagattatgaagggaagcaaagtcaagaagactcctggttttagccagattgaagtaaacgcaaggaaccatgttttctactcaagggaccagatgcattcacaacgtacagaaatttatgagatgctaaatagtaggcttgtccctcagatgaagggttcatcaagtctaggaactgatttctactgatcaaaatgatttactatatgctttagagtcaagcccaaaaggctatcagtacaatcctgatattcatcctctggctagtatggaaagaagcaaggcaaaggtgttcgaaaacaggtcgtcttccatgctcacttctgggctacagaagctgcaagcgtggcgagacaaagtggcatggaagttcaaaacttctttgtgaaatattagcctttgatttttttttcctcagagcctgtgtgctgctgtttcaccgcttgggttgggtagctatgtaaccagactttgtttggggacagctctctttctaatgacatgatatgcaagtttttgcatgttatccccgccctcccaacacacacacaccctcccaccacccaaaaaaggttaagtaggttatcgagagttgatctgatcatgtaagaatgatatagactagcccggctgacagatatccaaaggtttatgttaccttgatggggctgttaattattttaggcaggacagaaaaggttaataccatcatattcaggagtctacccgggcatatggcagaaattgatcagcaccaaataccgagggtacaggtcacattcacataaaggcgtctgttctgagatacagaagatggtacattccatgagcctggggttaggcagcagtatatggtttagccatgaccaactatatgcacctgtcgctggatcccagaagttttatggatcaggaggccacacgggatacattttctagcgtgatcatggaatacctttggattatgcccttctgtaagacaaccaaatgagcagtagaagttgttatcgtaagacattcaggattctttctattgcaacgactaaattcagtaagcaagcaaatggtatgcaaacagatctatgaggtcaggcaagcaataattttgttcaaaaaggaggtcagcaagcactaaggtggcgtttaactggaagctgaagtagggtggtgatcaacatcatgctgaactgtttgtgtgaagaagcttgaattcatcatgctcctgtaaattccctccatccttcatgatattcgctttcagcggtgcttctgacctgatggtcttaagaaattgcagatatgaggaggctggaggcgcgtcagaagtcagaacctcctttatgccgccagctgttttcatagcagtgctcatgtatatctgaaaagagaatcgagaatccaaaccttatcttgcttgatgttcagaatgcaatctgtggattccatccatgcagaatgttcatctctactactgtattagatttcg

SEQ ID NO: 26068 - DNA, 2536 bp, Oryza sativa
  ref <308>: DATABASE ACCESSION NUMBER: AK101510
  ref <309>: DATABASE ENTRY DATE: 2002-08-28
gctgggactagctgcatttccttctcttctaatgaccccgttcatggttgattagtttgagattatcatcaattctctgtttgtcggtggagcacctgcagcacctccgacgaatccgccgctgcttcgccgtcgcgtgtgctggagcggctcgccgccagctccatgcctcaggacgatgactggttctgggggcgcccgactcccgtcgtcgtcggcgacggcgagacgacgtcgaagccaaagccgccggtggcgggaaagacgaagaaggtggaggagcagcacccacggcgaccgggggagccggactgcagctactacgtcaagttcgggagctgcaagttcggcatcagctgcgtgtacaaccacccggatccgaggccgcagcatggcgccgacgacaagaagccggccgagcagttcccgcggcggcccggcgagcccgactgcagctactacgtcaagttcgggagctgcaagtttgggatgaattgcaggttcaaccaccctccccgcatgccagtgccaccacaacaagagtatttctctgggaatgcatgccactgccaccatattgaaggcaagagtaaagttgagcaagtaaagctgaacgttcttgggcttccacttcgtcctgggacagggttgtgctcatactacatgaaccggggaatctgcaaatttggcactaactgcaagtttgaccacccagatccaggctcagatcatgagaagtgggtcgtttcaagtaatgccaatcaagtttcctctcaggtgaacatttactcggtgcttgaccatggagaatcgaatgagcatacttttacctccgaagaagtccatcagccagggattccaagttttcaccaacgaatcagttacacaagggaccaacttctccaactttgtcagaatgtcgaagtgcccaaggacatcttaaaattttgtcaagatattaatgttgaactgaatggtgaagataaaatttcgggatttggagcagagaaagatcatgtacaaactccatcatataaacggtttgacgcgacagacagccgtgactggcattcatggtctgcacaaactaattgggaacagaaattttgggacaacttctctgaagcaaaagaaccctattctttaggttggaagcaagagaaatttaacaagcctgaccaatcaagcttccactttgattctaaagatcagtggttaaaatttataaagtgtacaccctgcaaaagcactttaattaaggctgaagtccctttgtcaatccagagaggcattatctctggcaaagatgaagttctgaaaacattgaaaagtatactaaacacattttcaccaaagatgttcgatcttcagaagggccagctaatagaaacaagaatctctagcgctgatattttgaaggatgttattaatcttatatttgaaaaggttgttgctgagccagccttctgttcgacgtatgcgcaactttgcacatatctaaatcaaaacctcacaccattccctcctgaagactgtgattgtgaagaaattacgttcaaacgagcactgtcgaacaaatgtcaagaaatattcgaaagtgctcacaccgtatgttctgagattggcaaattgattggacaagaccgagagatggagcaacgggataaagaaagggtagtgaaacttgaaacactgggaaatattaatttcattcgagccctgctcaagaaaaagttgatcacaaataagataatagatcacattgttcaggcagtgatggattgttgtaagtttcgctttgaaccacttggaaaagttgatttgctaaatataatatttgaaggcatgctggattcagattcagcaggtgatgaatctaatatttgcgtcaatgctatgattggtggcaataaatcttccatagcttcaaatgatgtcgagatgactcgtaagaatgtcaataggcaaaatgaagaggcaatattacaaaaatcttatgatgaagtcccaaataacaaaatggatcctcagaaaaattatgcagatggagcaatcagttatctcattgagaaagagaagccaactaacttagaatcatctgtgaggatctgtcgaggaggatgcagtatttcagagataatggagttagttgttgatgcaggagctgtggaaggcagtgatgagcatttcatggctaccttattatttattaaacctgaatatagggaaatatttcttacccttgatacacgtgaaggaagacttgggtggctgaaaaggatgtacaaggtgaaggaataagtgttggaccttagttcatggattcttgcctattttctactcttatggtgtgcctactcatgaactatttacatgtgatttattgtgtaatgctacctaaatttattaacatcctacatttccatttgagtttgctttaagtgagatgaattcctatgtaattggtagtatgtacagtgtggcctatcgagttgtttcgctagagaatgcaattattaaatggtgttgcttgtcc

SEQ ID NO: 26069 - DNA, 1685 bp, Oryza sativa
  ref <308>: DATABASE ACCESSION NUMBER: AK101511
  ref <309>: DATABASE ENTRY DATE: 2002-08-28
gactcctcatccactccctctcgccgccgcctgcgacctcgccgccgcgcccgcctcacctcacctcgccggagttcccccacgatcggggggcatccggggtgggcgatggcgccgcccgggacgagcaggaggagggggcggcgtggtcgtcgggcggcgggccggtgcgcggggctgcccctcgacgcgctgttcgagatcatgctgcggctgccggcgagggacgtctgccgcctccgcgccgtctgccggtcgtggcgcgccgtggcctccgaccgggccttcgtcgacgcgcacgcctcccgccacccgggcccgtacgtcgccgcgtgcttctccgatgaagccgacggcggcgacggcgacgagtcctgcggcggcgtcgacatcgtcgacctgtcctccggcgacatcgtcaagactatttacaccgaagtcagtggatccagagtgcagcgcacgcgcctcgacctcgtctgcctcgttgaagggcctagccccttggatgtcaccgtgctggatccggtcaccggtgctacctacatcccggcaaagagtatctctgcggataataaggatttgctgagttcaggccgtctcataatggaatcctgtgcttttgggaaggtcccctctacaggagagtacaaggtggtccgtctccttggttctggtaatccatgtgagctatacgagtgcgagatcatgaccgtgaacagtgctggcgctttgcaatggagggcgatacaaggacctcagttgcctgtttgttcaagtaacaatatgagaagtgtggtcatcaatggggttgcgtatttcctgttagattattcgaggctctattgctcaaatgatggcttgcttattcgaccaggtaacatagttccatttgaccttgagacggaggaatgggtgggtattctaaacggaccgaaaccagtcgccaggggacgggatatgattgttatctcctcaaccttggaaattatggagcccctctcgctagccgacttgaatgggtccttagtgatggtgcatgctgtatacggttcccccatggacctgtggtttctgtcagatcttgagcaaggactctgggttaagaagtacagcatagatttcgaatactataataacaatgcttatcctttgctgctgttagacgatgagaagattgtcttcctactgcggggaactaatgttctacaaagttatgatctaaaggatgacacatacactgatatattggtggtgccagatttcagatccgttggcatttatactggagatctattgagcttggagggtggtctgaactgattatgtagaccattgcgcctcttgtattctccaaagacaaagatgttgctgctttcgcttgctgaggctacttgagctacttcgtctcttaatttgctccccagatggagcaaatgatgctatctcattcagttacaataatgaaatactcctatatcagatacctgtttgtattccgacggtacaagctgatgttatcagcctggtttaccgtctttttaaaatgtcgacaaacctgtggtggtgtgatctgtatgcatggtacttgtcctttaagactatgggaaaaccgtgtatcactgtcagtttagcttgggcacatgattaccaatgggaattttctgaacaatttcatcctcgtt

SEQ ID NO: 26070 - DNA, 2260 bp, Oryza sativa
  ref <308>: DATABASE ACCESSION NUMBER: AK101512
  ref <309>: DATABASE ENTRY DATE: 2002-08-28
gggagcctccgcctcctcgccatttacggcagcaaccgcggcggagagagacgaccgaggagagagagagagagagagagagagagagggagagctccagtggtcgccgccggcgaggaggagcagtgaatggtgcggcgcgtggggttagccggcgctcgtggatcgatctgagcgagaggggagctgctggagacagtggtgcgtgcgtccgcggcatggcgttggcggcgaaggagaggaagctgagtaggcttgggagtaagggcagtggcggaggagggggaggtgggagtttcggggcgagggggcagcgggcgccggcggggacgcagcggcggctgttcgcggcgttcttcgcgttcctcttcgccggcgcggtgctcttcggcgccgcgcacgtcattggagcatccttccggcccgtgctcaagaccgcgtggccgtcggccaccctgaacgccgtgtcgtcggagcgcggcgcgcagcaagccggcatggagcgtcgacgccgtgttgccttctgttcatatccagcacgcggttgccttgccggaccatgttctcctgatgctcagagatggctcattgctgccggcttcggggcaatttgagtgcctgtactcccctgtcaactcgtcgcagctgcgtcgccagcccttgtccgtcgctaccttgccggatggacccagcctcgtccattgtcccgccggaccatccagggtcgctgtgtccctctcactggcgcagtcggttccggtggcgccgttgcaatgggatcggctggtgtacactgcacttattgacagcaaggacaactccaccgttgtgtttgcaaaggggatgaacctccgtccgggtcgtctaggtgtgccatcacggtacgagtgtgtctttggccgagacttttcgaagccaaagcttgttgtcacctccccagtggtttctgctgctcaggagatattccggtgtgtgacaccagttcgcattcgccggtacctccggatgactaccggtggcaaaaacagcgtaaacaatgatgacaagcctatgttggtctccatcaggactaagggccggggaagctctacactcccctcaatcgcgcaaccggagccgcttcctcggtacaacaagcattggagacgaaaggcacactcaatgtgtgtctgcaccatgcttcgcaaccaagcacggttcctgcgggaatggatcatctatcactcacgtattggtgtgcagcggtggttcatctatgacaacaacagcgacgatggcattgaggaggtcctcaacaccatggattcatccaggtacaatgtgacacgctatttatggccatggatgaaatctcaggaggctggatttgcacattgtgcactcagggctcgagagagctgtgagtgggtggggttcattgacatagatgagttcctgcacttccctggcaaccaaacactacaagatgtcctccgaaattactctgtcaagccacggatcggtgagctcaggactgcatgccatagttttggtccatcaggccggactaagatcccaaagaaaggtgttacaacaggctacacctgccggctggctgcacctgagcgccataagtcaattgtcaggccagacgcattgaacccatccctcatcaatgtggtgcaccacttccatctgaaggaagggatgaaatatgtgaacattggtcagggtatgatgctgatcaaccactacaaataccaagtctgggaggtgttcaaggataagttctccggacgtgtcgcgacatatgttgctgattggcaggacgaggagaatgttggatcaagggacagggctcctgggcttgggaccaaaccggttgaaccagaggattggccgagacgtttctgtgaagtatatgataacggtttgaaagattttgttcagaaagttttcacagacccacacactggaaatcttccatggtagattggtaaacactgtatttggtcttgcacagcacggcaccacaatacatgacatggagacacagacagggaaagaagaaccaaaaagaaattagatagaagagcgatttgctctttggtatattttttgaattttaaggtcttttgatcttttcttagttcattagaatcatcattttttgttacatatctaagaaggaaatgattcttttgtagataaagataggtagcacaattcattgtaagtttggttggggggagacaatcaatacaatcaatttcttgatttc

SEQ ID NO: 26071 - DNA, 1849 bp, Oryza sativa
  ref <308>: DATABASE ACCESSION NUMBER: AK101513
  ref <309>: DATABASE ENTRY DATE: 2002-08-28
gactcttgagctggtagtacagtatctactaataattggcagctaggttactgtagctgtcgtagattggctcaagctagctgcggccatggcgaccttgctgctgctggccgtggcggcggcggcggcggcgtgggtgtggtgggggcggtacgcgtggcgggcgcgggcgggggcgaggaggctggcggcgcagggggtgcggggcccgcggcgcggcgggttgctgcggggttgcaacgacgaggtgcggcggcggaaggcggaggcggaggcggacggcgtggccatggacgtcggcgaccacgactacctccgccgcgtcgtcccgcacttcgtcgcctggaaggagctgtacggaacgccatttctgtactggtttggccctcaaccccgaatctgcgtctccgattacaacttggttaagcaaatcctttcgaagaaatatggccatttcgtgaagaacgacgcacacccagctattctgtcaatgatcggcaaagggctggtgctggtggaaggcgcagattgggtgcggcatcgtagggtgctcaccccagctttcaccatggacaagctaaaggtgatgacaaaaacaatggccagttgtgctgaatgcttgatccaggggtggttagatcatgcatcgaacagcaagagcatagaaatagaagtggaattcagcaaacagttccaagatttgacggcagatgttatatgccgtacagcatttgggagtaatagtgagaagggaaaagaagtgttccatgcacagaaacaactgcaggccattgccatagcaacaatactcaatctgcaattaccaggattcaagtatctccctaccaaaaggaacagatgcaagtggaagctagaaaacaagttaaggaacacgctcatgcaaattatacagtccagaattacctcagaaggaaatggatacggcgatgatcttcttggcgtgatgctcaatgcttgcttctcaacagagcaaggagaaaaacgagatgagctgatcctgtgcgtggatgagatcatagatgaatgcaagacattcttctttgcagggcatgaaaccacatcgcatttgcttacatggacaatgttcttgctcagtgtgtatccagaatggcaggatcggctgagagaggaggtcctgagagagtgtagaaaggaaaatccaaatgcagacatgcttagcaaactgaaagagatgacaatggtgctacttgagacactgagactctatcccccagttattttcatgtttagaaaacctatcaccgatatgcaactgggaaggctccacttacctagaggcactgcgattgtgatacctattccaattctgcaccgagacaaggaggtttggggtgacgatgccgatgagttcaacccgctgagatttgcaaatggggtcacaagagcagcaaagatcccacatgctcatctgggattctcaataggaccaaggtcatgcatcggtcaaaactttgcaatgttagaagcaaagttggtgatggccatgatcctgcagaagttctcctttgctctttcgccaaagtatgtccacgcacctgcagatctgataacacttcagccaaagtttggtcttcccatactcctgaaggctctggatgcatgagataatagttttgtatgtagctactattagtatgatttataaaatatgtatattacggggttgctagagcttcgggcgttatagttcttatccaccagaaagtacaccataaaactagaagatatgctgaagaaaggctgcagtctacattgttcagtgtattctgcatgtccagtctcttattatctataaaacttgtcaagg

SEQ ID NO: 26072 - DNA, 2305 bp, Oryza sativa
  ref <308>: DATABASE ACCESSION NUMBER: AK101514
  ref <309>: DATABASE ENTRY DATE: 2002-08-28
gactcttcttctccctccaataattctctcccctctcctcctcttcaccaccaccaccaccaccagcagcagcagagagcaccatctccatccaataatccccatgcttgcgcaccactcccggccacatcccgcgcgaggaggaggaggaggaggagggtgtgcttgatccgcgctcccgcctggttggtggtggtggggtgaggggggagggatgggaggggaggcaccggaggcgcggcggttggaccgcgcgatgagcttcggcggcgcgggcagcatcccggaggaggcgctgcacctggtgctggggtacgtggacgacccgcgggacagggaggcggtgtcgctcgtgtgccgccgctggcaccgcatcgacgcgctcacgcggaagcacgtcaccgtgcccttctgctacgccgcgtcgcccgcgcacctgctcgcgcggttcccgcggctggagtcgctcgcggtcaaggggaagccgcgcgccgccatgtacgggctcatcccggaggactggggcgcctacgcgcgcccctgggtcgccgagctcgccgcgccgctcgagtgcctcaaggcgctccacctgcgccgcatggtcgtcaccgacgacgacctcgccgcgctcgtccgcgcccgcggccacatgctgcaggagctcaagctcgacaagtgctccggcttctccaccgacgctctccgcctcgtcgcccgctcctgcagatcactgagaacattatttctggaggaatgctcaattgctgataatggtactgaatggctccacgaccttgctgtcaacaatcctgttctggagacattgaacttccacatgaccgaactcacagtggtgccagctgacctggagcttctcgcaaagaagtgcaagtcactaatttcattgaagatcagtgactgtgacttttcagatttaattggatttttccggatggctgcatcattgcaagagtttgcgggaggggcattcattgagcaaggggagctcactaagtatggaaatgttaaattcccttcaagactgtgctccttaggacttacgtacatggggacaaacgagatgcccattatcttccctttctctgcattactcaagaagctggacttgcagtacacttttctcaccactgaagatcactgccaactcattgcaaaatgtcccaacttactagttcttgcggtgaggaatgtgattggagatagaggattaggggttgttgcagacacatgcaagaagctacaaagactcagagttgagcgaggagatgatgatccaggtttgcaagaagaacaaggaggagtctctcaagtcgggttgacaactgtagccgtaggatgccgtgaactggaatacatagctgcctatgtgtctgatatcacaaatggggccctggagtctattgggactttctgcaaaaatctttgcgacttccgtcttgtcctactcgatagagaagagaggataacagatttgcccttagacaatggtgtccgtgcactgctgaggggctgcacgaaacttcggaggtttgctctatacttgagaccagggggactttcagatacaggccttggctatattggacagtacagtggaattatccaatacatgcttctgggtaatgttggggaaacagatgatggtctgatccggtttgcattggggtgtgagaacctgcggaagcttgagctaaggagttgttgcttcagtgagcaagctttagcccgcgctatacggagtatgccttccctgagatacgtgtgggtacagggctacaaggcttctaagactggtcacgatctcatgctcatggccaggcgcttctggaacatagagtttacacctcccagttctgagaatgcaaatcgaatgagagaagatggtgaaccttgtgtagatagtcaagctcagatacttgcatactactcccttgccgggaagaggtcggactgcccacgatctgtggttcctttgtatcctgcgtgactgtaaataccgatatggtatctctctgcttcgttcttgcctcttgccttttttgggtgatatgttgatatgtggttattgtatgggtctagaactctagatggctagctgctatgtaccgtaataagctactggtagctgagatgtactggaataagcacttctatttcccactctactactatctaatcctaggaagatgtatactaaggaacactctgtgccactactccttgcttgttcatgctcccgtcctggtttgttaccattggaggtataagaatacctggttttggc

SEQ ID NO: 26073 - DNA, 2211 bp, Oryza sativa
  ref <308>: DATABASE ACCESSION NUMBER: AK101515
  ref <309>: DATABASE ENTRY DATE: 2002-08-28
tattttcctcctcctcgcctcggtctcctctcctctcctctcccaaatcgaagccgcctcctcctccgcctccgccgccctcctcgccaccgcgtggatccatctcatcccctcgccgccgaaaccctagacccgcgcttccatggtggtatgaccggttggcctcgcgattggggggtgggaagcggtgcggtggtggtggtggttagggtagcagaggcattcggcgggcgatcgccgtgaagcgggtgtgtgtgggggccagcggtggcgccgggcatggcggcagcggcgaattcctcggcctccgcggcgggggccggcggcggctccgcggcggcggccgggctcaagacctacttcaagacccccgaggggaggtacaagctgcagtacgagaagacgcactccgccgccgtgcttcactacaaccacggcgggaagaccgtctcgcagttgacggtagcgtatctcaaggagaagcctgccggacagggctccacgccttccacgccaagctccagcagcgggatgcgttctgcagcagcgaggcttcttggctctgggaatggtaaccggacgcttagctttgttgggggaaatggtgtaagccgggctgtgtctgggagcagccgcattgggggtggccttggtacatccggaggcattggtagttcacaagctgtggcaaattacgatggcaagggtacatacatcattttcaacaccgctgatacactattcatcagtgacctcaattctcaagacaaggatccaataaagtccatccatttcagcaactcgaacccactatgccatgcattcgacccagaggccaaggagggacatgacctgatcattggtatggggtcaggggatgtctattcaatgtcactgaggcaacaattgcaagattctggaaggaagcctgttgcggcccaacattacaacaagggtgataaagatggaacaagcactggcagccgatgcacttctgttgcatgggtaccggagcgtgaaggaatctttgttgttagccattctgatggaaatctgtatgtgtacgataaatgcaaagatggaaacactgagtgtacattcccagctataaaggatccggctcagttaatgatttcacatgcaaagtccagcaagagcaacccaattgctagatggcatgtttgccaaggttcaatcaacgccatctccttttcaccagatggagcatatttagcaactgttgggcgagatggttatttgagagtgtttgacttttcgaaggagcaactaatatttggtgggaaaagttattatggtgcactattgtgttgcacatggagctcggatggcaaatatctgttgactggtggtgaagatgatcttgtgcaggtatggagcatggatgacagaaagatagtcgcgtggggcgaagggcataattcctgggtcagtggagtttcttttgattcgtattggtctcctccgaattctgatggaacaggagaaaataccgtgtatcgttttggttctgttggtcaggacacacaactgcttctgtggggcctggcattggatgagattgctgtcccactacgacatccttccagtggctcaccaacttttagtagcggcagcccttctgcacattgggacaatgcatgtctcccaacaggtgttcttcaaccttctccaagaatgcgagatgtgccaaagctctcaccccttgttgcccaccgagtacatgtggatccactctcaggtctggtgttcactaacgaatcaattctcactatttgtcgtgagggactgatcaaaatctgggtaagacctgatcagaacgaaaacaatcatcagtcaaactcttcggagttagttttaggtaaccctgtttcaaaggatagggtgatcacaacttcaaataaagcaaccggttccagcttcaagcaatcttcagctgttgtcttcacatgacaaaagtgttctggtgggcacattgctctggtaatctggttaattgatcatcggtggtcatgtttcttactaacaccgtgattttgggaagggggtgggaggaactcttgctggtgatggagccgctcattttgcgtggccagatatgccagtgttgccatttgtgtggctcaatggaataatggggtattctcctgtacagagatacatatagtccaagataaaatgtacaatttcacc

SEQ ID NO: 26074 - DNA, 4213 bp, Oryza sativa
  ref <308>: DATABASE ACCESSION NUMBER: AK101516
  ref <309>: DATABASE ENTRY DATE: 2002-08-28
gatcccaccgcccagcgccgcacctcctctcctcgtgctctctcgccccctcgccgccgtgcgcatccccctcgcgtcctcgccccctcaccgcccggcggcaatcgatgtgctcctcctccgcagtccgcaccaccatcgcgccgcgcgcccctccgtaccgcgaaaaatcgccgcgcctcccctccatcgttgcgcctctcccacatcgccgcgccggcgcccaccatcgtcaccgccgcccatcgctctccaccttgcctccattgcggctacgccctccctctttcaggtagctgcccccgtcgattccctcgcgattcccaaccctaacccccgccgcccctgccgctcaggatctccacacctctcctcctcctcccagtgctgacgctgtccccccgcctttcctccttccgcccacctactaccgatgccgccacccctcgcagtgactcctccccgaccccgacgccgacgccgacgccgtatcccccgccaccaacgccaccgccgtcgacgcctactcctgtggcagtgtggaggactgctgcttccctgtctccatcaggtgtgtgcacgatttgtgtttgttaaaatgcttatgtcaaaaagctgtgggtataaaatgatatgctgcagattatcttttcctgttataggttgatcaataatggtttccctaattcaactttcatattgctgaatcttttggtctacattgatagctgatcctttgggggtgattatacaaatgatttccgttggtaatgatttttccctaccttgcagacagaggaataccggacagttgtttttctttcttttcttctgttagggtgggttcatttcagacatacccaatttgttaggttgaccacgtccccattttgatccgcgacgtcacagacaattctcttgtaatgtatatgtgcattgtttgtcagaaacctgtcgaacgggaggcaccatcatacttgctagatctttcctcttagagcatggacaggggactattatctgcataatctagaccacacaatagaatattttaagcagatttttttcataagtgcgaaccactgcctatgttactatactatagttcctttcgagaatttgcacaaagtctatagaaaatcataatataagtgcgaccacggacttcctgaaagttagaaaaatcttctcaagcatatagtttgatgttcatttcataaaaatatcttgatatgattatataagtgaacaggatcaaattagtttgaatgtacaagctgatatgaaatgaccatcatccctctatctcccacccatttttttcttgaattttcttgcgttaaccatagcttctcttctggatttggaatttttttctccgccgcctctccgacgactgcctgccgccgccgccctcaaccgacatcgccgatccggtctcccgtcgttgtccctcggccgctgaagtctcctcggactgtctcaaccggcatcaccgccgtccctccgccactcaaatcgtcacgcatcgccggtctcctccgacaaactgctttggcgacctcctcctcggcctccgcctcaaccgccgcctatacggagccacgccgccgttcctccgccgccgaaaggttaaactttttaattgcatctcagacttttgcatggtcttcaactggcaataatcttcagacattttttgaggagctgaatacatttcacgtggggctttcatcagaagatgcagtagaacgcttgcagctgtccggtgcaagcagattggagaagtttatctgcctttttctgatcattgtttacctacattcctgttctgaaatcctcatattttttacttccttttggaatagaacaagagcatcaagttcctcagctttatgtggaatcctttgtcctaagtgatttgggcagcaacagtgatggcattggtcttagcaaatggtggtagccaaggtcctgagtggacagattttctgggaattgtttgcctcatgattatcgattcaacaatcaacttcatttaagaagtgtgcaaattgattatgatagtattccagaaatagtggtgcatacctcataagcttaatggtgttgattaggataatattccaggtaattaactgctgatcgttgatttgcaaaatgaataatggtgttgctcctcctaataatatttgggccatgtgaacaagataaaatagaaggaaaattctatttggtgacatatgtataggaatagctatttttttatggtttataagaaaaacgatagtagataatgaactatctaaaatgagatatagattaaacattagatgttgatggatgatttgattttttatgtctatgctttgattctgaaggcgtacattaggaattacttcctttgtatcccactataagacgttttgggttttgaatacatttatcttttttaagaagggctttgtatccccgctaagagacgatttatatatatccaaattcgtatgcatgtcaatggatctagacgagggataaataaatctcataatgtttcgaaacaatgaaacagttgcgatgttatttttactagaatggctttgtaattaaccatataataactcgtgtttaatattaaaccttctattatgtatgtttgagaaaacatatattgtattcttttgattgtttaatttgtattactgaatgctaccgtagcgttaccacgggcaaattactagttagcaaaattgcaacatcttccaggaacaagattgaatcgtgtcgtgtgatgcttcactttgaaaaactgaagcatttctatagcgcatttctatgtttaccttcagatataaacactgaggcgtctcagagttaggcaagacacatattcacattatggcttatgaggactgtaaaaaaagattataaattccagtgacaaaagcacttaatcgggctagaattgaagatatttttacttcaaactgacaacttgagatcacttgcaaaagaacaataaggagcgagtttgcaactctgaggccaatactggaaataaacgcactctacttgcaactcatgagcttaattaggattgtacaacaggttttttttttccaatgcaagttggaaacagctgactacaatgaagttgcaggttgcagtgttaaaactatgagtaatcgtacagggtgatgctcttgtcatctgacacgctggcaagccggcctgcgcggactcctgtcccacccggtggtcggaaggcgacagcccagacctgatcattgtggttgctcatcgtctgcaccgacgccctcgtgttgatgtcccaaagccggaccgtgcggtcactggagcctgtcgctaccgccatgccgtctgggctcacgtcgatgctcagcacccagctcgcatgccctgacatggccccaatgaggctcttctccttggcgtcgtatatgtggatgtggcaatcgtcggaggcagtgaagagcacgtgcgggtccactggagagaacaccattgatctcactggcatgtgatggccctcaaggtggtggaggaacttcatgcgaactgcgtcatacacagcgatggtgccatccatggaaccacaagctaagagcttgccatcaggactccatgcaactgaaaggacaaacttgccgcttcctgttttatcagggcgagctccctctggacgcggaacagcaaggctggtaattggcttccacttctctgtgtcccagagcttcactgatccactgccaccaccagctgcagccagagcactaccctgtgaaggaaagcatttgtgggtgaggtaataatgtcagtagctagaacaagtgaagaccttcagtaaagtgaggctaccataaaaggaggttaattcctggtactgcaggttttagaaaaattagtatatgctgtcaacaaaggtatatagagatagcacagtggaaaacgctgaatgcgtaacacgtctcaactgcaagtgagaagacaagcttgaacaagcatctccgattctcattgaattagacataattgtatcaacacgtttatggaagaaaataaataatgtcttaaggccataggtcaattctagcaaggtttagtacataccaaaatatcatttaagaaaaatagtatgttctggaaattagcaagatgaatcacaacaaggcaatatgaaaatgaattgacc

SEQ ID NO: 26075 - DNA, 1353 bp, Oryza sativa
  ref <308>: DATABASE ACCESSION NUMBER: AK101517
  ref <309>: DATABASE ENTRY DATE: 2002-08-28
gatttaatcgtcacatcactagctcatcagtcatcacctgctctctgcaaacactgtgactttgggtgagtgagtgagtgagtgaagaggaggaagatggggaagggagggaaaggagccgaggcggcggcggcggcggtggccggagccggtgaggaggagaacatggcggcgtggctggtggcgaagaacaccctcaagatcatgcccttcaagctcccgccagttgggccttatgatgtccgtgtccggatgaaggcagtgggcatctgcggcagcgacgtgcactacctcagggagatgcgcattgcgcatttcgtggtgaaggagccgatggtgatcgggcacgagtgcgccggcgtgatagaggaggtcggcagcggcgtgacgcacctcgccgtcggcgaccgcgtggcgctcgagcccggcatcagctgctggcgctgcaggcactgcaagggcggccgctacaacctctgcgaggacatgaagttcttcgccacccctcccgtccacggatccctcgccaaccagatcgtgcaccctggtgatctgtgcttcaagctgccggagaacgtgagcctggaggaaggcgccatgtgcgagccgctgagcgtgggcgtgcacgcgtgccgccgcgccgacgtcgggccggagacgggggtgctgatcatgggcgcggggccgatcggcctggtcaccctgctggcggcgcgcgcgttcggcgcgacgcgcgtcgtgatcgtggacgtggacgaacaccgcctctccgtggcccgatccctcggcgccgacgccgccgtgagggtgtcggcgcgcgcggaggacgtcggcgaggaggtggaacggatcagggcggcgatgggcggggacatcgacgtgagcctggactgcgccgggttcagcaagacggtggcgacggcgctggaggcgacgcgcggcggcgggaaggtgtgcctcgtcgggatggggcacaacgagatgacggtgccgctgacgtcggcggcgatcagggaggtggacgtggtggggatattccggtacaaggacacgtggccgctctgcatcgagttcctccgcagcggcaagatcgacgtgaagccgctcatcacccaccgattcgggttctcgcaggaggacgtggaggaggcgttcgaggtcagcgcccgtggccgcgacgccatcaaggtcatgttcaacctctagatcgatccatccatcgatcgatcgacagcaaaatatgtgacgggtttggaacgtatgtcgatcggacaaaaaaatgtgtgcttgctttgctggttgccgtgtctgtctgtctctacatgaataaaaggcggcaacgttctgtcctcg

SEQ ID NO: 26076 - DNA, 1790 bp, Oryza sativa
  ref <308>: DATABASE ACCESSION NUMBER: AK101518
  ref <309>: DATABASE ENTRY DATE: 2002-08-28
gttggcacaaacagtacaagcggcatcatctcttgttacttcgacttcgaaaacgtgacgtgcaacaattttcacgtatgctcagttcttcgggagcgccgcgccctggtgcagcgcctcggagagcctctgcagcgcggcgtgcgacgagccgccgcccgccgccacggcgctccggcacacggccttcatctccgccgccttctccctcgccttcttcccctcctccgacgcatcgtccatcagcgacctcaccgcgcgctccagctccgccgcctccacgaagttgtcccgctccctgtccaccccgagcggcacggccacgcccatgtcgcgcaccagctcgaacgcgttcaggtgctgctccgcgtacagcggccacggcgccatcggcacgccgtgccacaggctctccagcaccgagttccacccgccgtgcgtcacgaagccgccgatggccgggtgggcgaggatctccttctgcggcgcccacgtcggccacaccatgcccctccccttggtcctctccaggaacccctcggggaggagctcgtcgaggttcgcgtccgtcgggtgctccgacccgtcgggcgcgccggtgcctgactcggcggcgggcggcgggccacgcaggacccagaggaagcggtggccggaacgctccagcgcggcggtgatctccaccacctgcgccgcctcgaaccagcccatgctcccgaagcagaggaacaccaccgacgccggcggctgcccgtcgagccacgcgatgcactcgtgcggcggctcggagctgtccctcttgtcgttgccgccgagcgagagcacggggccgatggggtacactggcggcgcggcgcgccccggcacgcaccggccgtccgcgatggcggcgaggggccccggctcgagctcgtcggcggtgttcgcgatgatgcccgtggcgtccatgaagcggtcgccgaggcgcacgaaccacgtgtagttggggctcttcttgtccaccaccgggcacggcatggacgccggcggcagaggcggcaggccgggcacgtccacctccccgtccacctcgtggaactccacggcgacccggtcgtggagcactgggaggtgcagcatgagcgcgagcatggcgccggtggacgacatgaagacgtaggacggcacgccgaggtcgcgcgccacgtcgaccatgggcgcggcgaacatgtcgagcacgagcgcggcgacggggcgccccatcccggcgacggcgtccctgacgtgcggcgcgtgcaggtggatgtaccgcgcgatgaactcctccacgccggcggcgtcggcgggcgggtcgacggcggggaggcggtgggagcggatgtcgaggcccgacgcggcctcgcggcggacgtgcgcctcgacctcggagcccgcctcgtcggtgggcgggcgcatgacgagcagcgtgatggagaactccctgccgccgccggcgccggcgaggagcacgcgcttgcaggactcgagcatggacatgaggtggccggagccccactccggcaggagcaccagcgccggcgccagcgtcgccatactctcgctctctagctgatcaccgtctgcagcagtagtgttcgttcggcgcaacactctattagttggactagctagctagtagctaataatggataattgaatacaacaactcgtgattgatcacactagctgcctgcgagataaggttaaaattcactacacgaccagtgacacttgtactagaagtatcgcagtagaggtggcgaatttcgacc

SEQ ID NO: 26077 - DNA, 1840 bp, Oryza sativa
  ref <308>: DATABASE ACCESSION NUMBER: AK101519
  ref <309>: DATABASE ENTRY DATE: 2002-08-28
gctctatccacatcccgcgccacgccccaggacgagcgaaaaaaaagatttcgcccccatccgccgggcactcgcgcctcgcgagccgcgtccacctccgcgcgggcgccacgccacgccacgcccacccaaacagcttcgctcgccttcctcctctcggccctcgccgcgtccacccccccccgatcgagccgccctccccctccgcctcccgcctccgcgcgcgtttaggagggggtcgggaggcccgaagctgggccggcgtctccgccccgcagggtccgggaaggagagatagggagaagggtcctcggctcctcgcgccgcgtgctttggactgggagtagctggtgctagaagtaatttttggaaatggttagtgggaggtcagcaaatggggaattggatgcatgcttcagaagcctcatgctttcgatcagcagcgggagggggcaggctgaaggtggtggtgcaatgccaaccttgtcaggctggaaggaccttcctattgagctgcttctgcggatcatgtcgataattggagatgaccggatgcttgtcgtggcatccggtgtttgcactggctggcgcgacgcgctgggatgggggcttactaatctttccctctcacggtgccagcagaacatgaataacttaatgatatcacttgctcacaagttcacgaagcttcaagttctcactcttcgccagaacatacctcagcttgaagacagtgcagtagaggccgtttccaactactgtcatgatctacgtgagttagaccttagcagaagttttaggcttagtgaccgttccttgtatgcattagcccgtggctgtcctcagcttacaaaattaaacattagtggatgttccaacttcagtgacactgccttgacctatcttactttccactgtaaaaattttaagtgcttgaatctatgtggttgtgggaaggcagcaaccgacagagctttgcaggccatagcccgtaattgcggccagctgcaatcattgaacttaggttggtgtgaggatgtcacagataagggagtgaccagcttggcatcagggtgtcctgatctcagggctctggacttgtgtggttgtgttcttataacagatgagagtgtgatcgctcttgccactgggtgtccacacctgcgatctttaggcttgtactactgccagaacatcaccgaccgagccatgtactccctcgcaaacggccgggtcaagagcaaacgcaggaggtgggacagtgtgaggagcagcagctctaaggaagaagacggtctcgcaaacctgaacatcagccagtgcacggccctgacacccccagcggtccaggcggtctgcgactccttcccggccctccacacttgccctgggaggcactccctgatcatcagtggctgcctcagcctgacgtctgtccactgcgcctgcgccctccacccgcaccgtgctggaagaaccatggtgcctagccacgcatactgatggtgttttgggcgcttggtcctggtgaatgccctattgcctggtggatgatgaggtgttccttcctggcctagaggaagaagctgtgtgaataaactcagaactcaaataatgtacagtaggactctatatctgtaggaatgataaccatggagtggagaatggctggagagttgcgtctcccctgccattcaggccactgactgcaaactactacaaagatgtgtgtgtgtgtgctatgtagcggacttctattaagtggcttgtctatttgtgacttgtgagcaggggattcaatgttttgccactctctagaccggagatttgatgatttgct

SEQ ID NO: 26078 - DNA, 2513 bp, Oryza sativa
  ref <308>: DATABASE ACCESSION NUMBER: AK101520
  ref <309>: DATABASE ENTRY DATE: 2002-08-28
aaggctgttcgctgcctacaaatcgcaattccccaatccatattcccttcccttcctttcctcctcctccatctccaccctcccgccgccgccgccgccgccgtcgccgcggcacactccccgggaccagcagaggccgccgccaacgccgcgggggcagctgcggataaggttgcttgaagcagtggaagatttcctggatggcttgtgctgcagcaactgatgattctgctgcgagcacggctgggatgagggacgaggatcgtagcctgtctggcgagtcgttgtccgagtggcggtcctgcgagcaggtggagagcgagagcccttcgacgtccccgcccttttgggacactgacggtgatgacgatgatcctggccccaaaccttcagatttatttgggcggtatacttggagaattgaaaatttttcaaaggagaagaagagagaaatgaaaagcgagccatttgaagctggtggttacaaatggtatattcttgtataccctcaaggatgtgatgtttccaaccacctatcactttttctctgtgttgctaatcatgacaaacttctcccagggtggagtcattttgcgcagttcactatagctgtaggcaatatagatcctaagaaagtaaaatactccgatactttgcataagttctggaagaaggagcatgattggggatggaaaaaatttatggagttgtcgaagattcaggatggctttcttgttgatgatgttcttgaaatcatagctcaagttcaagttatcagggagaaggtggacaaaccatttcgttgcctcgatcgcccttatcgaagagaattgctccgtgtttatacgacaaacatcgagtcaatataccgccgttttgttgaggaacgaagaaataaacttagcaagctgattgaggacaaaatgagatggtccagtttttgtgctttctggtcagcaattgacccaagtactaggcatcggatgtctagagagaagactgatgtcatattaaaagtattagtgaagcatttttttgtggagaaagaggttacttcaacattagtgatggattctctgtatacgggcctgaaggtgcttgaataccagagcaagggcaagaaagggagaacgatagctgatttggatgaactgcctgcacccatgatccatgttggcatggacatgtttgttttggccagtgatgttatagatttgcttgagagagcagccttagaaccactgccttgtcaacctgtgtctccaaaggatgacaaatgttcccagagtcgcatgaaggatggtgcttctggtgaggttaacaaaatttccatggagcgcgaggaaagacgcctaactgagcttggtcggaagatacttgaaacatttgtgctatctcatatattcagtggaattgaagttgcgtaccaagaagctgttgctttgaagagacaagaagagttaattcgagaggaggaggaagaggcatggcttcttggaaatgagatgaaggggaagcgtgggggtggtgctaatgaaaaagataagcgtgcaaagaagaaacaggccaaacaaaagaagaacaatcgtaagattaaagacaaggaaagagacgaaaaatttgaagcaaagattctggaaagacttcatgatgaaactgcgattgatgatagtgatggcttatcatcaaagcaggccgaagaagtgacaacaaaggttgaaaacttggaagaaggtgcttcagataggcaaggtgatctagatagttcagaaattgctcaccgaccagactcaggtgacaagtatcctagacaaatgaatggactgagtgatgttactggcaatgcacaaaaggtaaagaaggcctcctctatggaggctaactcaccagtctttctggctgattctgttgctgcaagcggcactcatagcagaggaaataatttgtcagacagtaagaaccgcatgacaccaaatagagggaaaaatcagcgtaacaagggcataagcattatcagcttttctgaggaaggtgagggtattccctcgagttctactggtggttcggctcgttgtagttctagttgcggcacatctgcaaagttggaccaagataccgttctactcaccttgaaggataaactccgtaagctggggcaacgtctacatgagaaaaatatggaggggcgaaaacttctccaagctcattttgaagccatggaagcaaagacgagtggttcatctccctcatccagtcctttggatgaaacacctgatgttgtgaagagccctgagcagtctgcagaaggtacaacagatgcaaaagctaatggaacaccaaataaggatgaacccgtgacaaattgcgtggcagaggaatctgtttcagtcatgccaggcacaaagagtactgaagctttatctggcatggcccttgccaagacaaaagttgagccagtttcaaataaagatcatgttccaaaaccaacattgcaagccaatagagcatctgct

SEQ ID NO: 26079 - DNA, 2772 bp, Oryza sativa
  ref <308>: DATABASE ACCESSION NUMBER: AK101521
  ref <309>: DATABASE ENTRY DATE: 2002-08-28
ggctgttttcctctcctacccttttctttattttattcggcccactccccctcctttttctcgtctcctccgccccagcgcccggcgcctccccttctcttcaccgccggtcgtcggcgctgccgactgcgccccacgcgccacgacgactcagccccaccgcgccgcctccgactccaccccatcgcgccaccgccgactccgcaccaccgcgccgccgactccgccccaccacccgtcgcctccgctcttcgccgcgccagatccggtgggccgcgccgtcgactcctccccacggcgccgccgacgactccgcccctctccctccgcccttcgccgcctctctctccctccgcacggcgagaggtgcgcgcgagccgagccggagggggaggggagggggggagggagcggcggatgccatgggcagcggcgcgtcacggctgctgaccgcgtgcacgtgctcgcggccggcgccggcgtccgtggacgcggagccgtgcctggacgacgctctcggccactccttctgctacgccgccgccgccacggccaccgcccactcctcgtcgttccgccacggcatctccggcgccgcgctctccgccaactcgtcggtgcccgtcccgctctacaacgcgtccgccgccgccggcggcgtggcgccggggtactcctcggcattccacacctcgtcgtccttttcctccgcgccgctgcagctgtccaacctctcctcgggcccgctgttcctctcgggtcccatcgaccgcgccggccagctctccggcccgctcgaccccgccgtgcccttctctggcccgctccccgcaaagcctcccaagcccgcgtcctcctcatcgagggggttctcgaggaggttccggaagccgtccttcggcagcctgcggcggagcgtgtcggagaagaaccgcccgtgcgccgtgccgctccgccgcgacgacggcgtgcagtgggcgcacggccgcgccggggaggaccgcgtccacgtggtggtctccgaggatcagcggtggctcttcgtcggcatctacgacggcttcaacggccccgaggcccccgacttcctcgtcaccaacctctaccgcttcctcctccgcgagctccgcgggatcttctacaaggaggccgacgcggacaacaagaagctctggcagtttctcgtggacggcgacgacgacgacagcgagctcgacttctcgggctctggccggttcgcgctgtcactcgacaggctcaaggagagtcggtttcacatgtgggcgcacgccgcggccgacgagagcggcagggaatggggttccaggaggttggcaccggcgcctgcggtgagggaccatgcggcggtgctagccgctctcacccgggccctggcctcgacggaagcggcgtacttggacatgaccgaccagtcaatgggaacccatccggagttggcggtcaccggggcgtgcctgctcgtggccctcgtgagggacgacaacgtgtacgtgatgaaccttggggacagccgtgccattgtggcgcagcgtccggacgatggcgacgatggctgtgtgtttggaaccatgcggcggatggaggacgtcggggtgggcttggagatcgagacaaggcccggcggatgcgccattattgggcttaagccactgcagctgtcgactgatcacagcaccagcatcgaagaggaagttcacaggatcaaacgtgaacatcctgatgatgatcagtgtattgtaaatgatagagtgaagggtcgcctaaaagttacccgggcttttggtgcaggctatctcaaacaggcaaaattgaacaatggattgttagagatgttccgcaatgattacattggtgatacaccgtatatatcatgcacaccatcgctttgccatcacaagctcactgcaagggatcagtttttggttctttcttccgatggcttatatcagtacctgagcaacgaggaggtagttttgcatgttgagaatttcatggagaggtttccagaaggtgatcctgcacaaagtttaattgaggagcttctctctcgtgcagcaaagaaggctggtatggatttttatgagttactagatatacctcaaggggaccgaagaaaataccatgatgatgtcactgtcatggttatttctctggaagggagaatctggaagtcgtccggaacatatgtgtgatgatcagttggaacaatgtcgatgtcaatatttatggtgacgcatcaagtgatctcagctggtcagagcctctgagcaactgcatttatgctcatcaggggagaaacacccacagatggctgacagatgatgcactccatacatttgtcaaagcgattggagttggagccagcgttggtctagatcttagcttcagcacaaaacacagtccatgaatgtgctagagagttagttctcggttggaccaagattgcagagagagatgacacatatgaggaatccctttgcaaagcagagttaagaacactttcttttgtgacccgcttagttgattggttacatactcacctgtgacaattccctcacccccctcccccctagctggctagctatgctgcatagagattgacacttctttcatttttggagaaagaacgtctttggaaggcgccgttttcatgttcatgtcaggaatgggaaggaaatgtaatatgattggatattcatggtgaagaaattgaaaatgtgtccctcatgtggtgctcaacatcgttttcgt

SEQ ID NO: 26080 - DNA, 1577 bp, Oryza sativa
  ref <308>: DATABASE ACCESSION NUMBER: AK101522
  ref <309>: DATABASE ENTRY DATE: 2002-08-28
ggtttgccccgtccactgacctctctctctgctctccgcctctcacctccgtcctccaaaggacgaatcggcactctgcccagttcatctccacgatcactgctcgattctcgaagcaggggaggccattgccaccgaccaacaaaagttgaaggggtacacacatctgcatgcaatttctgtcctctggttgctagctgccgcttctttcaagtttcaacactccttgcaaccctccactcgtaggatcatctccatttccaatcctccttcagttttgtaaataatgaagaggcccaccagcagcagccgaaaatccaaaaaacaaggagaggacctggcgttctctgaggagggcagcttgcccgcggtgaccatggagcagaaagatgaagccgagatggaggaggtggacgaggaggaggaggaggaggtcgacgaagacatggccggcgggcacgcggcgcagtcgccgtcgccgtcgtgcgggctgggcgagaagaagcggcggctggcgctggagcaggtgcgcgctctggagcggagcttcgacacggacaacaagctggacccggaccgcaaggcccgcatcgcgcgcgacctcggcctgcagccgcgccaggtcgccgtctggttccagaaccgccgcgcccggtggaagacgaagcagctcgagcgcgacttcgccgccctccgcgcccgccacgacgccctccgcgccgactgcgacgccctgcgccgcgacaaggacgccctcgccgccgagattcgggagctgagggagaagctgcccaccaagccggcggacacggcggcatcggtgaaggtagaagccggcaatgacgcggcggccggcgccgcggccgccacggtgtgcaaggacggctcgtcggacgacagcgactccagcgtggtgttcaacgacgaggcgtcgccgtactccggcgcggccttcattggattcggcccgtcgttcttggtcgacgacgcgtcggcggcaaccgtgggctgctcgtcgtcgctccccgcgctcgagtccaaatggcacggtccgtactccgacgactcgtgcaaaggcggcgtctatggcttcacggaggaatggctcgctgcctgctccggcgagatggccggcaacgacgccgccggcttcttctccgacgagcacgcctccaacctcaacttcggttggtgcgcgagtggtaacgagggttgggaatgagattttgatctccacggttagtgtaaaaaatggcagggttagtagcactgtgcataaccgcattggcgcattgcatgcttggatggagcacgtacttttagtttttttactgtactcatttactaccgcctttggctacctggcgtgcttactgctagtactgtagcaaagtagcaagaagtggaacgagcctagaggacgaaattgatatagggtaattaacgaaggatcaaggatgtaaattttaagccgccaaggggtcgaagaaggatagcacaggacagcaaagcatagctgtctgcgttttactacctgtggtatatatatcatactagtatattataaagcattacat

SEQ ID NO: 26081 - DNA, 2683 bp, Oryza sativa
  ref <308>: DATABASE ACCESSION NUMBER: AK101523
  ref <309>: DATABASE ENTRY DATE: 2002-08-28
gacacatacacacacatatctcatcttgttgtttctgagctgctccaagaagcagagctctgtccatggaggaggagcagagcccgaggctcgccgccggcgagccggagcgcaagctcgaggacggagtcaccgacgccgaggaccccgggtgcacgggcaatgcggccatgagctcgctggagcagccgcttctgaagcggagcaacacgctaacggccagccacctcgccatggttggcgccaaggtctcccacatcgagagcctcgactacgaaattatcgagaatgatctgttcaagcacgactggaggaggcgatcgaacgtggaggtgctgcagtacatcttcctcaagtgggccatggcgttcctcgtcggcctcctcaccggcgtcatcgcgtcgctcatcaacctcgccatcgagaacatctccggcctcaagatgctccacatggtgcagctcgtccgcaagaaaagatactgggccggtttcttgtatttcgccggcgtcaacttcggcctgacgttcatcgccgccatgctctgcgtcgtcttcgccccgaccgccgccggccccggcatcccggagatcaaggcctacctcaacggcgtcgacacgcccaacatgttcggcgcgccgcagctcattgtcaagatcatcggtagcatctgcgcggtgtcgtcggggctggatctcgggaaggaagggccactggtgcacatcggcgcgtgcctggcgaacttgctgagccagggcggctccggccggcaccgcctccggttgcggtggctgcgctacttcgacaacgaccgcgaccggcgcgacctgatcacctgcggcgcgtcatcgggcgtgtgcgcggcgttccgggcgcccgtcggcggcgtgctgttcgcgctggaggaggtggcgacgtggtggcggagcgcgctgctgtggcgcaccttcttcagcacggccaccgtcgtcgtcgtcctccgcgggttcatcgaggtgtgcaggaacgggcggtgcggtctgttcggcgagggcgggctcatcctgttcgacgtcggcgacgtcgccgtccggtaccacgccggcgacctcctcccggtgaccatcgtcggcgtgcttggcggcgtcctcggcgcgctgtacaaccacgtcctccacaaggtgctccgcgtgtacaacctcatcaacgagaagggccgcgccgcgaagctcgccctggcgctcgccgtgtgcgcgctcacgtcggcgctgctgtacgtgacgccgttcgccgtgccgtgcacgccgtgcgacccggcgttcggcggcgcgtgcccgacgctggggaagagcggcaacttcaagcggttcaactgccccgagggccactacaacgacctcgccaccctcctccacgccaccaacgtcgacgcgacgcggaacatcttctccacgggcaccgccggcgagttcaggctcgactcgctgctcatcttcttcgccgtctactgcgtcctgggcctcttcaccttcggcatcgccgtcccctcggggctcttcctccccatcatcctcatgggctccgcctacggccgcgtcacggcgctcgtgctgtcgcggttcgcccgcatcgaccacggcctatacgccgtgctcggcgcggcggcgctcatgtcggggtccatgcggatgaccgtgtcgctcgtcgtcatcttcctcgagctcaccaacaacctcctcctcctcccaatcaccatgttcgtcctcctcatcgccaagaccgtcggcgacgcgttcaaccccagcatctacgagatcatcctcgacctcaagggcctcccgttcctggaggcgaagccggagccgtggatgaaggacctcaccgtcggcgagctcgccgccgccaagccccgcgccgtggcgctccaggtggtggagcgcgtgtccacggtggtggaggcgctccgggcgacgcggcacaacgggttcccggtgctggaccggccgcggcccggggtatcggagctgcacgggctggtgctccggtcgcacctcgtcgccgcgctgaggaagcggtggttcctgccggagaggaggaggacggaggagtgggaggcccgcgagatgttcagctcggcggagctcgcggacaagtgcggcggcgtggacgagctggagatctcgccggaggagatggggatgtacgtggacctccacccgctgacgaacacgacgccgtacaccgtggtggagaccatgtcggtggcgaaggccgtcgtgctgttccgctccgtcgcgctccgccacatgctcatcatgcccaagttccaaggacccgagatatctccaattgtggggatcttgacaaggcaggacctgatagcacacaacatcctcggtgcatttccacaccttgcaagcaagaggaaaacacattgagaggaaccatttttgagagttaatccatctttattgtcttgaagccaaatatcagagtcacctgcatatacagcttttatgaggctttgagttttttttcttttttttttcagttatcctcttctctgtaagtagattcaggattattatttgctgctcttctgagagtgcttgaataattgctgccaatgtaaaatcacacatgtaactatgccagatgtaatcaaaagggacacaaccatgatgcaatagagcaattctttttt

SEQ ID NO: 26082 - DNA, 1349 bp, Oryza sativa
  ref <308>: DATABASE ACCESSION NUMBER: AK101524
  ref <309>: DATABASE ENTRY DATE: 2002-08-28
gtgaaaggcagaagaaatcaagaaaccaaccaccaactagctactgtagttgactgacagtgatagtggcagtcatgcaggtcgtgggaaccgtgcgtgtcagtggctgcggcgcggtggtggcgccctcgcgccggcagtgccgcgtgtccgcggcggtgctgacggccgcggagacggcgacggcgacgcggcgccgcgtgacgcactcgatgccgccggagaaggcggaggtgttccggtcgctggaagggtgggcgaggtcgtcgctgctgccgctgctcaagcccgtggaggagtgctggcagccgacggacttcctgccggactcgtcgtcggagatgttcgagcaccaggtccacgagctccgcgcgcgcgccgcggggctccccgacgagtacttcgtcgtgctggtcggggacatgattaccgaggaggcgctgccgacgtaccagaccatgatcaacacgctcgacggcgtccgcgacgagaccggcgccagcgcctgcccctgggccgtctggacgcgcacctggaccgccgaggagaaccgccacggcgacatcctcggcaagtacatgtacctctccggccgcgtcgacatgcgcatggtcgagaagaccgtccagtacctcatcggctccggcatggatccggggacggagaacaacccgtacctggggttcgtgtacaccagcttccaggagcgcgcgacggccgtgtcgcacgggaacacggcgcgcctcgccagggcgcacggggacgacgtcctggcgcgcacctgcggcaccatcgccgccgacgagaagcggcacgagacggcgtacgggcgcatcgtggagcagctgctgcggctcgacccggacggcgccatgctcgccatcgccgacatgatgcacaagcggatcaccatgcccgcgcacctcatgcacgacggccgcgacatgaacctgttcgaccacttcgccgccgtggcgcagcgcctcaacgtctacaccgcgcgcgactacgccgacatcgtcgagttcctcgtcaagcggtggaagctggagaccctggagactgggctctccggcgagggccggagggcccgggacttcgtgtgcgggctcgcgaagaggatgcggcgggccgcggagcgggctgaggacagggctaagaaggatgagcagaggaaggtcaagttcagctggatctatgatagggaagtgattgtctagtttaacttgtcttggttgaattctgaattcccagtcctagatgatcatgccatttcgttatcatctctgttcttgtgttctctttgcaatgcagtaaattggtaatagttaatggtgctttgatcttgg

SEQ ID NO: 26083 - DNA, 3140 bp, Oryza sativa
  ref <308>: DATABASE ACCESSION NUMBER: AK101525
  ref <309>: DATABASE ENTRY DATE: 2002-08-28
ggaggagagaagccgctcgaggaggcagctcccccccaaaaaccctagcttaggcttcggcaccgcctctccccccctcgccttcctccccccaccaggcgcctccaagatgaagctcgtcaggttcttgatgaagctgaacaacgagacggtaacgatcgagcttaagaacggcaccaccgtccatggcaccatcactggtacgatgtcttggcgaccttttttttttgttgttgttgttctttttggcggcgcgttactagggtttgcgagcggcgtctgtgttgtctatgtggcgcgggatttgattgattggcgctgtggttgcatttcaatggcggattcggtagaaacactaggaggcctttgtgctgaagcttttgttttcgtgacgatgcggagcaaatctagggtgtttgactagcacagttgcattttattatattgtagctcaaagggaaaacctttgtggttcaaattgattcaacagcagcctctcactcaatctcatgaaaaagtgccatcactacaactgaaaagaccatatgcttccaacagatcatgaccagctatgataggtatgtcatgtagtacaggtagaacttcctttgactcctaagaatcatcatcccttgaagcaattggattgaacatttgctgccttctccttttggcaccagcaccatcttttccttttggcatcagcaccagacaccagtttggcttcttgtggtcaatgtcttagagaaggggtttaacgttctactctgctgacatcctcggtgccaatttctctgtgttcctagcagcatatctagttggatgacttggcaatacacaataattatgtaaccccaaatgtgaccattttaaacgttttgctagctggcagctgcatcctagttttcctgctaattaaagagatcgctgacagaggataagtactaagcttcaaacgagtttaggaattcataagataacaccatgctaaaggaagtctgctatgatttacttattttatccaagctatgatatgtgtggaacaataactgaataatgtggcatctgcatttgccttcacatatggtctcactgacagtggtagcctattcttggccagcctgatcaagtctactatttgctggcatcttgcttatgttagagtagtgtttatcaaagtcttactactgaaacaatttatcttctttgatatcaatattacacgtgccatgaacatttttagcatcagcagcttatacttgaggttttcaacttttcatccttattgggcataaccaccttattgtagtatgcaacaattgtatgcagaatctcttttagaaaacaatcatttgctgcaaagcttcatccatgctttccatcaaaacaattaacctttaacaggttatcccttttccataccctgcaccaaaaaaatcagaaaagggaattagaaagcatgtcattgaagtaaaagatggcatatacttgatgttgttaaccaacattgaaaatctgaaacaaatcatacataaatttggatgcaagaatggactgatatatatgcgtatatcatgttcataaatttatatcattatttggcttctagtgtattatgaagagtatttgatttgatctatcattgttatgttacactaggttgccaatattttgacttcatgataagtacatgaacatatgcaatgcttaagttcaatgaacatagtttagcacttgtgctgcagttattcagaggccataggtaggttatgcattgatttctactgcagaaggattaagaagcagtgctctcccatttttcagtgctccagcgtcaaggcttaccttgaacctaatgcgccactcttaatcttaataaccaaatttgatcaggagaagtcactctaaggtcacatgtgcataggtggtaatagtctgttgatctgttcaaaacatcacttgtgatacacatgaaacatgctacaggttgaagcaacaggtgcatttaaatttatctgcaaagaagatttaatccaatgcatttaccaatacaatagatcatctcagctctaacatatctatagtagctatttccttggatcttgtaatgctgcattcagatagtcagaaattgacctaacaaataaaatatacacaatatcgacagtgaacattttgttggatcatcaaagtatatcccaaactaatagtctgtatgctgcaatcggacagacagaaattgatcgactctgatcaaataggcataatatcaatactaatattctgatgattctagattagcggaacagaatagcctagtaaatatatcagttagcacagaaatcacaaacaatattagtccgggtctggaaactatcagaaaaagtttttggacccttctttttcataaattagtctctgaacactgtatcaacaatacaagcagaataggcaatctattccagcccttctactttctcttatctatctcaatttatactttttacaactctttacattttcctcaaacccaccataagtctttcatgcacttgttataattaatttgcattgccttttgtttcagcagagctattctcatgcggtcatgcctataatcacctccataagtgactccattatactccatatgcacatcctaacttccaggtctattttgtaggtgttgatatcagcatgaacacgcacctgaaaactgtgaaactcacattgaaagggaaaaatcctgttacctttgatcacctcagtgtgaggggaaacaacattcgctattacattcttcctgacagcttaaacctggagacattgctggttgaggatacaccgagggtcaaggctaagaagccaactgcagggaagcctttggggcgtgggcgcggccgtggtcgtgggcgcggtcgtggcaggggacgctgagcttcactccagttccctatcttggaaacttttgcatccgtgcaaatgtaatctctgctctcgtgttagcttgtacggagtagtgttctgattatggcaaagacgttgatgtaagcactcggcacctctttatcgatgtggattttttcccggttggtatttgaccagatgttcttgttcaagaatatgctacgttacattgc

SEQ ID NO: 26084 - DNA, 1897 bp, Oryza sativa
  ref <308>: DATABASE ACCESSION NUMBER: AK101526
  ref <309>: DATABASE ENTRY DATE: 2002-08-28
gaattctctcctttctcccacgcccaaatcgcgcacttcccctgttgaggagggaggcgacgtcgcccgtctctccgcgtcggctccggcgccgacccactcccctcctccgccgccatccatctattcgcgccgcaccgcccgctcaactcttccttcgcgcaggcggcggcggtggcgcaggcggcgtcttcctccacctgatccacctccacttcctccggaccgcacaagaataagaagaagaagaagtgcaggtacggtgcaggtgcagatccaattgcgagctcacctgctctgccctgcccactaccaagtagtagcctcctcctcctcccctttctccccaacatcccatcccaaatcaaaggctactagactagtgttgggggagatccaagagatggcgcggagcccctgcgacctccgcatcctcctcgtcgccgccgctgcagccttcatctacatccaagtccgccttttttctactcagtcccactacgccgaccgcctcgcacaagcagaaaaatccgaaaaccaatgcaccagtcaactccgctccttgatcgatcaagtcagctctcagcaggagaagattgtcgcgttggaagagatgaagatacgccaagacgaagaacgtgtacacctcaagattttaatccaagatctcgaaaaaaggagcgtgcagaccttagtaaacaacaatgtggctcctgttgctgctgttgttgtaatggcttgcaatcgaccagactatttgcaaaggacagttgaatctatcctgaagtatcagacatcagtggcttcaaagtttccactatttatatctcaggatggaataaatggagaagtgaagaaaaaagctttgagttataatgaaataacatatatgcagcatttagatcttgaacctgtgcgcactgaaaggccaggagagttgatagcatattacaagatagccaaacattacaaatgggccttggatgagctattcatcaaacacaactttgcgcgagtaataattctggaagatgatatggagatcgcccctgatttttttgactacttcgaggctgcagctaaattacttgataacgataagacaatcatggccgtttcttcctggaatgacaatggacaaaagcaatttgtttacgacccaaaagctctttaccggtcggatttctttcctggacttggatggatgttaacaaagcctacatggattgagctgtcacctaagtggcccaaagcttattgggatgactgggtgaggctaaaagaggtacacagagaccggcaatttattcgcccggaagtctgcagaacatacaattttggcgaacatgggtcaagcatggggcaattcttcagacagtacttggaaccaatcaagctaaatgatgcccatatcaagtggaattctgaggacctgagctacctcaaggaggacaagttcctgatccaatttgggaaagacgtcgctagtgccacccctctccatggatctgatgccgcgttgaaagcccacaatatggatgcggatgtaaggatccagtataacgatcaggaagactttgagcggatagctcgtcaatttggaatatttgaagaatggaaggatggcattccaagaacagcttataaaggagtagtagtcttccggtacaagagtagtcgaagacgaatatacctcgttggtccggattccctcagtcagcttagggtatagtgttgttgaggtgtggagatagtttctcattgtttcagatacaagcggcagcacctcacctgaccactgagcagagctgacctgcctgacattttgctgtatatgtgattcatcacgtgagattcatacatagacgacttccattgcaccgaaagcttaaacatc

SEQ ID NO: 26085 - DNA, 1822 bp, Oryza sativa
  ref <308>: DATABASE ACCESSION NUMBER: AK101527
  ref <309>: DATABASE ENTRY DATE: 2002-08-28
gggaggtggaatcctcccgccggcgacgagaggccgctctagatcgacatggacgcgcaaatggcggccgcggcggcgcaccacccgctgccgcatcagcagaaggcggccaacctggcccgcaccttcaccaagctgctccgccgcaagcgcgcagacgctgtcgccgccgccaccgcggtgggagagcccggtgtgcccgatgcggccgcggcgtctgtggttggagatgagtacgagtgctccgtcgaggcggcggcggcgggtgtgccgtcgttgagcaagctgaagctgtccggtaaccttggcgcggcgtattcgctcgacgcgttcttccgcaatgcggccgagaagaaggcggcgggggtggccggggtggcggtggcgcagacgtcgccgcaggtggcgccggatgtggcgaaggattcgttgctggctaacctgttcgctggcgtctcggcggtgaaggcggcgtacgcgcagctgcagctcgcgcagttcccctacgacgcggaggcgattcaggccgcggacgccgcgctggtggcggagctcaccaggctgtccgacaccaagcggcggtatctccgggaccccgccgcggcggccaagaacgcggcggcggcggggcacaccgcgctgtacgcgcacgccgaggagcagcggcatctcctcaagacgtaccagatcacggcgaggaagctggagggcgagctccgcgccaaggaggcggaggccgaccgcgccaggagctccctcaccgccgagctccgcgccgagcgcgccatggaggcgcgcctccaccccgggcgcaccctcgcgtcgctcgacgagctccacctctccggcctcaaccccacccacttcctcaccgccctccgccacaccgttaagtcgatccgctccttctccaagtcaatgctcaactcgatgcagtccgccggttgggatctcgccgccgcggcggccgccgtgcacccgggcgtccagctgcgccgcgccggggacaccaagttcgtcttcgagtcctacgtcgccatgaagatgttcgccaatttccaccggagggacttcaacctcagcttcttggacgagcgggagttctacgaccgccgccgcttcttcgaggagttcacggagctcaaggcggcgccggcgagcgccttcctcgacgcgaggaacgcgcggtggggcgggttcggcaagttcctgcgcgccaagtacctgtcactggtgcacgcgaggatggagacggccttcttcgggaggctggagcagcgcggcatcgtgagcgccgggccgggcttcccggagagctcgtggttcgccgacttcgccgagatggcgcgccgcgtctggctgctgcattgcctcttctacgcgttcgacggcggcgccgaggaggacggcgcctccatcttccaagtccgcaccggtgcgcgcttctccgaagtgtacatggagagtgtcagcgacgggcgctccgacgaggccgccgccgccgccgccgaggaacgcgtcgtcgggttcaccgtggtgccggggtttagagttggccggacaatgatccaatgccgggtctacctgtcgcggccgggacggcggccatgatgggttgtgacaaagccgtcttgtttcaggtgtccggcggatgataaagggggaggaatgtccattttggggcggccgtcgaggtctcccgccggcagccggctgcggcggcggcggcggtgttggtgatgatgatcagtgggtggttatgtatctattaagggatgtagtggtggtgatcataatataaatggcattttaagtttggatt

SEQ ID NO: 26086 - DNA, 1606 bp, Oryza sativa
  ref <308>: DATABASE ACCESSION NUMBER: AK101528
  ref <309>: DATABASE ENTRY DATE: 2002-08-28
gaaccgcaaccagataggtaggcaggcagacatgcgtgtcgccgcggcggcggcggcggcggccatccgccccactgccgcgctcctcctcctcttcccgcctcaccgccgcaccacctctctgcgccgctcctcgctccccttcgctcgcccgcggcgccactctaccaccaccaccaccgcggagtcacacccgaagcccaacgaaagcaacgccgcccgccgccgccgcgcccgcgactcgcccgagggcctcctcaaggccaagctcgacatgtgctcccgcgacaacgacctccccaccgcactcgccctctacgaagccgccatctcccccgattccctcatcccgctctccctcggtcactacaactgcctcctctacctctgcgccaacgccgccgccgcagactcctcgtcccccgatgccgcccagcgtggcttcgacatcttctccaggatggaggctgacggcgtccaacccaacgaggccaccctcaccatcctcgcccgcctcgccgccgcccgccgcgaccccgccatggccttctccatcgtccgccgcatggccaccgccggcaccgcgccgcacctccgctcctacggccccgccctcttcgcctactgcgacgctggagacgccgacggcgccacggaggtggaggctcacatggacgcctccggggtggtgcccgaggaggccgagctcgccgcgctgctccgcgtcaacactgcccgtgggagacccgaccaggtgtacaggctcctgcacagggcgcgcgtccttcttcgccaggtggccgacgcaaccgcccagctactcgagtcctggttcgcctcccacgccgcctcagaggccggtctggaccactgggacgccaccaaggtgaagcaaggcctgcgcaatggcggcggcggctggcatggccagggctggctcggcaagggccaatggaccgttgcccgaaccgacatggacaaggatggcacctgccaccgctgcggggagaagcttgtctgcattgacatcgatccatcagagacacacagctttgctgagtctgtcgctcagatagccatcaatcgtgacgccaatttcgtcaagtttcagaaatggctcgagtgccacggaccattcgatgccgttattgacgctgctaatgttggcctttacaatcgtaacagtttcagtttttatgaggtgaaccgggttgtaaatggcatacagagaataactaaatcaaagaaattgccactgataattttgcataagaaccgagtaaatggtggacctgcaaaacttccgcagaatcaaaagcttcttgagagttggcagagggctggagcactatatgctacacctcctggttctaatgatgattggtattggctgtacgctgctgttatataccggtcattgcttgttacaaatgatgagatgcgggaccacttgtttcaactacttggcactagtttttttccaagatggaaggagaaccatcaggtttgtctctcattgcagaagtgaaccacacaaatctgtgttcttttgtagaatgctgcacagtacaacccattgagtaagagatatttcaagttcttttgc

SEQ ID NO: 26087 - DNA, 2235 bp, Oryza sativa
  ref <308>: DATABASE ACCESSION NUMBER: AK101529
  ref <309>: DATABASE ENTRY DATE: 2002-08-28
gagcagcaggagcgaggcggagcggagctactcctactagcttccctttcgcggccatccatgcgcgcacgcgcgagcgaggcgtgaaatccgagcaatgccgatggtgatggcgcgcggcctgccccgatccgctcatctgtagtagaggtgggagtggggttggtggtggtggtggtgtggtggcgcgagatgggatctggaagcagcaaggccggcgcctcgtcggcgtcatcttcgtcgtcggcgtcggcgtcggcgtcggcgtccggcggcgacgaggcgagtaaggggaatgggaaggggcagcggagggggagggggagggggagaggcctgctgcagcggctgccgagctcctcctcctcctgcttccgcggccacggcacgccgtcgcgcgacgacgcttcctcggcgtcttcgccaccgccaccgccacggccgccgcggcggccgttcgagtctagcaagggagaggagaatggaagcctgccttcaatcgctcaaatggacaaatcagaagaggatgctcccacaatccctaaatctcatccaggtgaaggggcaacattgccttcatcacatataaacagggatcaggatgttgatgtattgcagaatgccactgccgtcaacaacagggtggaggtcaaccagtcaccaaatcattctgacagttcacggccacgttttggtgtcaacttcgggttgagtagagctgtcagcttgggatcatcggtagcctgctccattctctcatcggacctctccacttcagctaatcctgatggaggccatggaaatgtggacaattcttctgatgcaaacatctcccagcaaggtggtgcatcaactgctgggattgattcgactctggatatgcttagagatagtgtaaccgcacaagctagagcagcccatcaggctaggagaaatttgctagaatccgacaatgctaacttgagatattccaacagaaggatgggacctcaggaaccttttgaaggcagtgttcgattcagccgaacgttgagtgttggacgtcttcgtgacagagttcttaggaggactccattctcagatgggttattcaccccttcacttctttacgatagggcaatatggccatcaggaaatgctagtgccaggcaaaattcagcaatcatgcaaaggactaattcagagagaaattctgaactgcaattggattcttcaaccgactctgcaactctaagagaggccaataatcgggatctactggagcgcagatcagcttttcttgagaggaggaggatacgatctcaggtccgagctctccaaagattgggcagcaggtatgaaaatctatcaggactatcaggacatgagagatcatgcatactatctggtcagcatagaacgggaaattgtaattgcagaacgagcagtcgaccaggaaattctgatgaagaaacaaacacaagagctagcatatcaagaatcgttatgttagcagaagcactttttgaggttctggatgagatccaccaacagtctgctgccttatcctcaaggccatcgttttcttcaattgggtccgttcctgctccaaaggaggttgtcgagcgtcttcctgtaaaagtatacaggagatcattaaaacaccaaactgaggaggctgcacaatgctacatttgccttgttgaatatgccgagggagactgtgtccgtattcttccatgcaatcatgaatttcatctaacatgcgtagataaatggttgaaagagatacacagggtttgtccactttgtcgtggtgatgtctgcagatccaatgcatcaggcattggaaaaaccacatgatcttctcttctgtgagaaaaatggagcttctgacattgtttctgatccaatcccaacagaatttgtaatacacgtgtttcaggtgtaatttcacatattctttccctccttcgatcaggacaactcagagtgctccttcatgtggtggcaaatttgcatcgcagtcatccctgttataaaatcgatgaactgccatgtgaatttggaattcttgtatggcaagggaagtttgttgatattaggatttcattatacgttttctttgagtgttgtttgaacttgttgagacgatgactgtctttttagatgcatcagccaacgacaactttcaaaattgtgttgtcatgctgaagcaatcaatagatttttcatgctatatgggtttgatgaggc

SEQ ID NO: 26088 - DNA, 1496 bp, Oryza sativa
  ref <308>: DATABASE ACCESSION NUMBER: AK101530
  ref <309>: DATABASE ENTRY DATE: 2002-08-28
ggccgcaaaacccttctcccgccgccgccatcgccgccgccatggacccctcgcagccgtccgggagctccgccgacgcctcggcgtcctcctcctcctcctcctcctcctccgccgtggagaatctcgccgcggggatggcggccatgagcctccaggatcggttcgagttgctgcgggggatcggcgaggagtgcatccaggaggacgagctcatgaacctgctgcagaagaagcccgtccccatctgctacgacggtttcgagccctccggccgcatgcacattgctcagggcattgtgaagacaatcaatgttaacaagatggtcagagctggatgcaaagtgaaaatttggatagcagactggtttgctcagctaaacaacaagatggggggtgatataaaaaaatacagactgtgggacgctacatgattgagatttggagagcggctggtatgaatcttgatggtgtggaattcttgtggtcctcagaggaaatcaataagcgtgcaaatgaatattggccacttgtaatggacattgctcgtaaaaataatgtcaaaagaataatgagatgttgtcagattatgggtcggaatgattcggatgagttgactgctgcccagatcttctatccttgcatgcagtgtgctgatatatttttcttaaaggcagacatttgccagttgggcatggaccaaaggaaggtcaatatgctagccagggagtactgtgatgacatcaaaaggagaaacaaaccaattattctgtcacatcatatgctccctggttttaaggagggccaagaaaagatgtcaaagagtgatccatcctcagccatttttatggaagatgacgaggctcaggtaaatttgaagataaaacaagcattttgccctcccaacattgttgatggcaatccatgcttggagtacatcaagtacattgttttcccttggtttgaaacgtttgaggtggttcggaaggaagaaaatggcggtaacaagacatttgccaacatgaatgaactcatcgctgattatgagagtggtgctttgcatcctgctgatgttaaaccagctcttgcaaaagcgataaaccaaatattgcagcctatccgtgaccacttcaaaaacaacagtgaagcaaaagttctgctcaacactgttaagaattacaaagtaaaaacggaggatactagttcaagccctcaagcatcttaagagttcatgatggtctacatggatatcttttaactttgtttacattatgcagttgtgtgatacacattctcttttggttagtgttatgtactttaaatgttcatgatcaccttataccgttatagtatgagaaaaaaggcaaaagttttgagtgcagacagtggaaatgccttgttgataccaaacatttgttctgctctgcatctgcacaaccactaaggtcttacctttgtggaaagaaatattaactggtgaagccctgtttggaatc

SEQ ID NO: 26089 - DNA, 2378 bp, Oryza sativa
  ref <308>: DATABASE ACCESSION NUMBER: AK101531
  ref <309>: DATABASE ENTRY DATE: 2002-08-28
gaccggcgccggagccggccgctggatccgccaaaccaccggcgccagagcctcggcggcctcgcttcctatcttcctcctcccatggctccactggattccggcggcgtcaccgcctcatcgcccctcccccccgatccccaaagccacccgtcgaatcgagtccgaatagtatgagcagctgcggcctcggtgcgattccggttcggattccagctgcggcccgcggcggatgctatctagtcgcggccgcggggacgccattgcgatctcagggcatcagatgcgcgcgccaaaccccacgccgccgcgcgactccgccatggctaggaggaggaaaggttcgtcctatcgccgccgccgccgccgccgccggcgggcgcccgcggcttgcggcgacaaccgcatcgacgacctgacggacgatctgctgctgatcatcctgcggaggctcgacacccgctccgcgctcgccaccgcggcgctctccaggcgctggtccggcctcgcgcgcgcgggcctcgaggctctcgatttcatggtcggcgacatcctcccgccgcgctaccaccggtgcatccagctccacgagtccgccagtggtgtgttcgatggcgccgacgagctcagaaccatcgttgctagcatcaggcggcacgagcgcctcgccatgcgaaacatggtcgcctccatcaacaacttcctcgacgccgatgatggttttgcccatggcgacggcggcggcggagctccacggaggaggatcagtaggctgcgggtggagttcatcgccacacactaccacgactgcatcaaccgcttggtcgccaaggctgttgatacttggggagttgaggatctagaggttcttggtaggacaacgtattggcggcatcattttcaggatgcccacatcttccgtcgccatggtctctgcaatgacccgcacagatcccgtttgcgaagcctgaagctggtggactgtgtgattcccccattgcaggggttccaagctctcaccaagctggtcctgcaagacttgcgggactccacacccgcggcagcctacgaagcagtgtgttcagctcatgcctacagttgcaagaggtgcacctcaagtcctgcccctgcaagcgcggcagtagtgttttcgttgatgcccccaggtcaatgatcaggcagcttgttctggagtgttgtggcgtccctgggtttgagctgcacgctctgccaatgcttgagagtatagttgtcatgcagacctgggtacggtacaagcttggatccttcccgcgcctcgtgcgcctgaacctcaaacgcgatggtctcaggcataaacttaacttttgcttgcctgcgaacttggatctcaagccgcatcttggattcactccagacataactgaccaggttatacgattcaccggatatgaaagatggtttcggccttcgtgcccttcgttgctgttaccaaagcttaccaggcttctgattgccgatgtgccttcatcatgggatatctcttggccccgactcctcctagaagcagcgccatgtctggagagccttcatatccatattaccccttgggaaggagagacttgcaatgatattttgtggcagccatccaagttgcagcacaaacggctaaaggagttggtgatcattggttttgaaggaacagagagacagatttactttgttaactttgtcattgaagtgtcaatggtactggagcttgtttccttgagtatggccgtgttcaggaaataggttactgggactggaacattgtgaggcaacaacaccgttggtgtgatgaggagagagcaaaaatactggatcagcttgctgataaaatttcttgctcagcaactccagttcaagtatttcttgagtgatctctcatgttttgtatccaaagcttaagttatcagacctagtaacctcaggaggcttttgaccgctgctgtgtctttttaccatggatgcctagagagtctcttgaatccatattgcccccttgaagttggcatgctcagctaatagagttgatgatagtaggatctgagggaacagaaagactgttttagtttgttaattttgtagtagaagtatcgatggtactgtagcttgttgctttgttaaaaagtgagcatgtatacatggttcatagagcctgggagatgactactgatgcagcaataccagatttctgatagaatttagtgctcaattactctaattcaagtagttttgggaaagccttctcatctatactttgttagttacatgtgaaagatgtcgaaaagcgactgtatattacatgcatgatgtggatatagttttgcctttaataaattgaaatgttgcgactg

SEQ ID NO: 26090 - DNA, 1609 bp, Oryza sativa
  ref <308>: DATABASE ACCESSION NUMBER: AK101532
  ref <309>: DATABASE ENTRY DATE: 2002-08-28
ggggtccccgtaggcagccaccaatggagggctcgccagcgacgcgcctcccggaggccgactcgctccccgacggcttcgtggagagctccgccgccgaccaggcgccccctcctcccgccgacgccggcgatcccgcgagccgctccctcggcctcgatcaagccgacgcaaccgtgggcggcggcggcggcgacgaaaccctaggggctcctccctcgaccctcgcctccgtcgctcaggacaccctggacgcctattcggccgccgacgcgctgcagagcctcaccgtgggcggctccgctgcggagccggagcgtgctctcggcgaacccgccgtcgacgcaggagctgttcctgttgttgcagatgctaaagagtcctcgaaggagagcagtgtggtggagcaggtggaatctatggccgatcagaaggttgtcattgctgaggggagtggtgagcagaagcgcaaggtcgtgaaaaagagcaaggtagagaaggacagagagctgtttgaacttgcgcaggcgtaccacaaggtggtagcagagagggatgcagctattgcagttaaagagaaactagagtctctttgtagggagtttcagcgtcaaaataaaatgctaaaggaagagtgccgaagggtgtcaacagaggggcagaatatgcggatggagttatccgacaaattcaataatgctataaaggatgtgagcgtcaagcttgacgagcagaaaaatgaatgcattgctcagttagaagagaacaacttgctgagaagtaaactcaaagaccttgcagatcaatataatatcacacagcagaaatatgctcatcagttgaaagaaaagatgctggaacttgagctcgccgatctgaaaatgcaacaacatcaagagaaaacagctcaggaacaaacccagatgcagctatatgctgatcaagtttctcaacttatgtctaccgagaagaatttaaggttgcagctagctgctgatggagaaagatttcagcagtttcaggatgccctcacaaaaagcaatgaagtctttgagacatacaagaaggagatggaaaagatggtgaagcttataaaggatctaaagaaggataatgaattcatgaagagtaaatgtgagaattcagatgttgctctagtgaagttgattgaggagcgtgagttaatgaagaagcaagttgataagttcaagaatcaaaaagagaagctggaatctctatgtcgatcattacaggcagaaaggaaacaaagcccgtccggtggtactcctgatgccacttctaacgaaacaaatctggcaactatagaatcatagtcctaccgtgcttcacggtgttctttgtggattgccaggatttgaagacagggaaatggatatgtatgatgtttatcattttatattttccttgcgattttgtaagtcctgaatgagagtatcacacatccggctacgcggcttacatgcctcgccatttgagccatctgagagattttctaaggcctcgcatggaatgggaagcaattcaattttagcatattggggggaaattgtgttttgaatgttaatttgttttatgacaccgaaatctg

SEQ ID NO: 26091 - DNA, 1924 bp, Oryza sativa
  ref <308>: DATABASE ACCESSION NUMBER: AK101533
  ref <309>: DATABASE ENTRY DATE: 2002-08-28
gggagaggttctcgcggcggcgaatgattggggcgcatgtgtgggacaaccagatcctagctgctcatcgcgatacaaatcccatccccgtctcccccccaattccatcgctgtcctccaatctctcctctctcccaatcatcgtctcatctgcgcgccgtctctccccccgattcggcttcgtccccgccgccgtactgcgccgccgccggtgccgacctgctgctgctgcgggggagatctgtccgggtgtgcggctgattcgctttccgtcgctgcagctctacaggtttcttcggcagcaactgtagtagaaaagaaagaggggaagattcgcagttcatatggcaaaacctgctaatagcattggccgtagcacgccaagatcaaatgaggggatgaggctcatattctcggcagttgttggtgttatgttgggatacttgtttggggtttccttccctacagtaaatataaccaagcttcacttcccttccagtattatctcctatatagaagataggaactctggcatcacaacccagacattgttaaatcatgcgtgggcatctgcaaatcgtcataacaaaaacaattccgattcaacctctgaagaagttcctaagatttatgttcccacaaaccctaaaggtgctgaaaggctcccaccaggcattgttgtttctgaaacagatctttttccacggagattgtggggtgatcctagtgaggacctgagtagcgaaccacggtaccttgttacttttacagttggaattacacagaaggctaatattgatgctgctgtcaaaaagttttcagataaattcactatcatgctattccattatgatggccggactactgaatgggatgaatttgagtggtctaaaagagctatccatgtgagtgtcaggaagcagactaagtggtggtatgcaaagcggtttttgcatcctgatgttgttgcccgatatgactacatattcatctgggatgaggacctaggtgttgagcatttcaatgcagagaagtatattgaacttgttaggaagcatgggctagatatctctcagcctggtttgcaacctgacaagggactgacatggcaaatgacaaaacggcgaggtgatcaagaagttcacaaagttactgaggagaggccaggctggtgcactgatccccatctgccaccatgtgcagcatttgttgaaatcatggcaaccgtgttctctagggatgcatggcgctgtgtctggcatatgattcagaatgacttggtccatggatggggtcttgatttcgctctaaggaaatgtgtggagcctgctcatgagaagattggagtcgtcgatgctcaatggattgttcatcaagctgtgccatcacttggaaaccagggcaacgcagagaatggaaaagcaccatgggaaggggtaagagcacgctgtaggaaagaatgggagatatttcaaacgaggctggccgatgccgagaaggcatactacttatcacaaggaatcacaccacccaactcgaccctagtttagaagaacacacgaacacgacacgacctcacctgtgatggcaagggttctatttcggcaacctagctggaccttccatattattcagtacgttcatcaaagcaggtgcctctatatagagctacagttcctttgccagatttgtacatggaaagctctcgtggatcccacgactactgtttaatcctagctttggttcagttggttctagtctcattttgtttttgggtagtgtgactagctgcgatgtaagtaggcgatgtagcatggattctgagggccgagcactttgtttatacaatctgttgtatcattgactggatgcaatgttggcgttgcattgattcccattacttgtttcatcatgtaaattattc

SEQ ID NO: 26092 - DNA, 1492 bp, Oryza sativa
  ref <308>: DATABASE ACCESSION NUMBER: AK101534
  ref <309>: DATABASE ENTRY DATE: 2002-08-28
ggcgagaggtatcatccagttgcacaccgaaaatggcggcggcggcggagagcaaggcggggaaatcgccggaggagctcctctgcgcggcggcggagtccggtgacgcggaggccatcaccgggctcctcgccgaaggcgccgacccgacccacttcgatgcctccgggttgaccccgctgatgcacgcggccaccggtggccacgccgccgtcgtgcagcttctcctcgacgccggcgcgccatggaacgcgctctcccccacggggatctccgcgggagacctcgcctccgattccgccaccttcgacctcctcctcgaccacgccctccgctccgagctcgtcctcggcaccgtcgctcgccgccaagcggggcccgcggactcccccgccgagagctacctcgaatccagggtttcattcagcgaggagagggtgatggacgcggatagcaaggccgtgatgatggagtgggagcggccgctgatggaggcgcacgcgcgggcggtgtgctccggcggcaaggtgctcaacgtgggattcgggatggggctcgtggacacggcgatccagaggtacgagcccgaggagcacaccatcgtcgaggcccacccggaggtgtacgcccggatgctcaagctcggctggggcgagaagaagaatgtcaaggtcgtgttcggacggtggcaggacgtgctcccgcagctcggctcttatgatggtatattcttcgacacctatggagaatactacgaggatatgagagagttccaccaacatcttcctaagctattgaagcctggagggatctactcgtatttcaatggcctctgtggcgataatgccttcttccacgttgtgtattgccagctcgtagcgttagagttggcaaatcttggctactcgacacagttcatcccgctcccagtcaaagattgtctttcagaggaaatatggaatggggtgaagcagaaatactggcaattggatacttaccacctcccagtttgccaagcagaatcagaaccggagcaataatccaatggattgtcagcaaattgtgctaagcgtcaatggccagcaaattgtgctaagcgtcaatggctggctgctttggctgctgctacgtttgttcaagcgtgtttctgaattccatacaccatctccggagctggaacttccatcgggcatgtgacgtttccactgcaatcgactactaatctactcctgtagatgcttatcggctgtggcctgtagccaatgaaagagaactttcaccgaaactttgttttcttggcagtgatgttacaattttgttaggtctgcgaatgctgctgtttttttttctttttttcgttccaagccgcccgtgtcgttgttctggaaaggcgggaacaacacctagctttcccagttttttttctcaatgttctggacgcggttctcttcttttctgcagcaaacaaggatagttcgaactcgttactcct

SEQ ID NO: 26093 - DNA, 2002 bp, Oryza sativa
  ref <308>: DATABASE ACCESSION NUMBER: AK101535
  ref <309>: DATABASE ENTRY DATE: 2002-08-28
gcacgcctcggcaatccaaagccctcctcgtcctcgcagagcatccattgcctcgattttctattccaaattcccccacgcgaagaacagccagcgccctcctcctcctcctccttcgccttcctcctggtttcttgccatctttccagggaaggaggaaccgcggcccggccgcattcttggacaagaattgttggcataaaggaacattttgttgatgttctaatggagtcaaaaggtggcaaaaagaagtctagcagtagtagttccatgtacgaagctcccctaggctacaagattgaggacgttcgcccagccggaggaatcaagaagttccagtctgctgcttactccaactgcgctcgcaagccatcctgatattccttcacatgcctttccccgtagagtaggaatttcctgcaatttttcctttgttttgttgcaataaatctcccttggctggctgctttctcaatctcttcccttgtcttctccgatctcttctttcctgtcttgtccactgctccttgcaacacttgatcaaatgtcgatgtccttggctgattcttggggctctgcccctgcctcgcccattgggtttgaaggctatgagaagcgccttgagataacattgtctgatgcgcccgtctttgtggacccctgtggtcgcggccttcgtgccctctcacgtgagcagatcgactcgttcttggatcttgcaaagtgtaccattgtatcccatctttcgaacaagcacttcgactcatatgtgctttcagagtcgagcctttttgtttatccccacaaggttgttctgaagacctgtggtacaacaaagcttctgctctccattcctcgcatccttgagcttgctgcagagttgtcactgcctgttctatcagtgaagtactctcgtgggatgttcatcttccctggagcgcagccatcaccgcatcgcagcttcttggaggaggtttctgtgctcaacagcttctttggtggcctcaagtcaggtggcaatgcttatgtcattggtgatgcattcaagcccaagaagaagtggcatgtctactatgccacagaagagcctgagcagcccatggttacactcgagatgtgcatgactgggctggatgctaagaaagctgaggtgttcttcaaggattccactgatggctcctgctcatcagctaaggagatgactatgttctctgggatttctgaaatcatccctgagatggagatttgtgactttgagtttgacccgtgtgggtactcaatgaatggcatttatggtcccgccgtctccacgatccatgtcactcctgaggaaggtttcagctatgcaagctatgaagcaatgaacttcaatcctagctccttggtctacgatgatttgatcaagaaggtcctggcttgtttctgcccttcagacttttcggtcgctgttaccatcttcggtgggcatggttttgccaaatcatgggcaaaaggtgcagaggttgattcctacatgtgcgatgatcttgttgagcaagagcttcctggtggcggtgtgctgatgtatcagagttttactgctgttactcctggtgctgtgtcaccgaggtcgaccttggatggctggaacagcgatggagcagagatggttgcgaagagcaaagagatgagtgtctgctgggaaggagagaaggcggcgaagaagaaagatgcagatgcctgagaaatcggcagttcttcaacctcaagttgcaagtttgattcatctgaagtttctgagacgccttatttggttctgctcttgcagtttcggttaagcagctggctgggctaccggcaaagcatatgttacttgttcattgttcttttatatctgtctgcccaaataagtgctctagatggtttgctgcgtctgccatagtgagcaattcagattgtagtagaattcttatctgttgccgatgctctttaagggagaatgatatgtaactcgattattttc

SEQ ID NO: 26094 - DNA, 1828 bp, Oryza sativa
  ref <308>: DATABASE ACCESSION NUMBER: AK101536
  ref <309>: DATABASE ENTRY DATE: 2002-08-28
gagtgaaccggaataggccacacttgtcgcgatattatcctttgctcttctcttcttctcttcccccgcacgcatcgcacccgacctcgtcgccgtcgccgacgccgccagccatgccggaggacgtcgagatgaacgactcccagccccagcccgccgccgcgccaccgcccgcggcctccaccttgcagcatctgaaggagatcgcgtcggtgatcgaggccgggtcgctgaccaaggaggttcgccggatctcccgcgccgtgcgcctcaccgtcgcgctccgccgccgcctcgccgcccgtgacgtcgccgccttcctcgccttcgcgctgccgcattcctcggaagccttcgcccgcctttcctccctcctgcccaaggaagatgggagtgaaatggatgttgatttggcagctccagcggctcaagtgtcaattaagcatggtctcccagagattgaaatatactgttacttgcttgtgctgattttccttattgataataagaaatatgatgaggctaaagcatgtgcttctgcaagcattactcgtttgaagaatcttaacaggagaacagtcgatgttttagcttctagggttttcacctattactcttatgtccacgaactcaccagcagccttgctgaaattcgtggaactcttctggcattgcacagaatggcaactttacatcgtgatgagcttggtcaggaaactctactcaacctgcttcttcgcaactacctgcactacaacttgtatgaccaagcagaaaagcttaggtccaaggcaccgcgttttgaagcacattctaatcagcagttctgcaggtatctgttctacttgggaaaaattaggacaattcagttggagtacactgatgcaaaggaaagcctactgcaagctgctcgaaaggcacccactacagctcgtgggttccgagttcagtgcaacaagtgggctatcatagtgagattacttttaggagaaataccagagagaactgtttttatgcagaaaggaatgaaggctgctttggcaccatattttgagcttacaaatgctgttcgagttggggaccttgaattgttcagagcagtggcagaaaaatttgctagcactttcagcgcggataggacgcgcaatttgatagtgaggctgcgcccacaatgtcattcggactggattgcgcaacataagcatttcatactcacggatctcccttgctgacattgccaagaagctgaggttggactcagagaaccctgttgctgatgctgaaagtattgtagccaaagcaatcagggatggggcaattgatgccaccattgatcatgccaatggttggatggtgtcaaaagagactggtgatgtctactcaacgaatgagccacagattgctttcaattcaaggattgcattttgcttgaacatgcacaacgaagcggtcaaagcactgaggttccctccgaattctcacaaggaaaaggagagtgctgagaagaggcgcgagaggctccaacaggaggaagaactagcaaaacacatggctgaggaggacgatgacgacttttagattggtgatttcttttcatgctttcagttgctgcctcaagggtttcattttgaagcatgggcatccattcagttttaagagacggaagatctcgaaatgccaaccctgcttttctgggatagttgaaaccatggaaccgttgacatttaattcagtgtgttttatgtttttaacaatttttttatcactcaaaccgcttagaaggcaatgtattctttcctgaaatactgtaccgttcaatccttggggc

SEQ ID NO: 26095 - DNA, 2154 bp, Oryza sativa
  ref <308>: DATABASE ACCESSION NUMBER: AK101537
  ref <309>: DATABASE ENTRY DATE: 2002-08-28
gggcgatctttgcttaaaccctaatctcagacgctgcctttgagagaggagaggggggagatcttcttcttcgcttacggcgggtgcagacaatatggcctcagcattcgggagcacctcagcatgtggcatcaagatcactcctaccgcttttgccaccaagaaacatctttgcctggttccacccccagtcgtttcacttccccagaaaaataggcctcagaggaagtgtaatttcagagtaaatgctgccaaagagttatatttcaacaaggatgggttggctatcaagaagctgcaaaatggagtcaataagcttgctgatctcgttggagtcacccttggtccaaaaggacggaatgttgtccttgagagcaagtatggatcacctaaaattgtcaatgatggtgttaccgttgcaaaggaggttgagctggaggaccctgttgaaaatattggagccaaattagtccggcaagctgcagccaagacaaatgatttggctggtgatgggacaacgacttctgttgtccttgctcaagggatgatcacagagggtgttaaggttgtggctgctggtgctaatccagtacagattacccgtggtatagagaaaacggccaaagcacttgtgagtgaactccaaaaaatgtccaaggaggttgaagacagcgaacttgctgatgttgctgcggtaagtgctggaaataactacgaaattggcaacatgatagctgaagctatgaacaaggttggacgacagggggtggtcacacttgaagaaggaaagagtgctgaaaataatctctatgttgttgagggaatgcaatttgatcgcggctatatttctccctactttgtaactgacagtgaaaaaatgtcagtggagtatgagaattgcaagttgctccttgtggacaagaaaatcaacaatgccagagatcttataacaattctggaggatgctattaggggtgggtacccaatcctaatagttacggaggatattgagcaggaagctcttgcaactcttgtggtcaacaggcttaggggtgcattgaagattgctgctattaaagctcctggttttggagaacgcaagagtcaataccttgatgatattgctactcttactggaggtactgtcatcagggaagaagttggcttgtccctagacaaagctgatagagatgttctaggaacggccgccaaggttgtagttaccaaggattcaacaacaatagttggggatggtactacccaggacgaagtaaacaaaagggtgacacaaatcaagaaccagattgaggttgctgaacaggaatatgagaaagaaaaactgaatgagagaatagctaagctctctggtggtgttgctgtcatccaggtaggagcacagacagaaactgagcttaaggaaaagaaactgagggttgaagatgcactgaatgcaaccaaggcggctgttgaggaaggtattgttgttggaggtggctgtacgcttttgcggcttgcatcaaaagttgatgccattatagaaacacttgagaatgatgaacagaaggttggggctgaaatcgtaaggaagtccttgagttacccacttaaattaatagcaaaaaatgctggtgttaacggcagtgttgttactgagaaggtccttgccaatgataacttcaggtatggttacaatgccgctacaggaaaatatgaggatttgatggctgctggtattattgatcccaccaaggtggtgagatgttgcttggagcatgctgcgtcggtggcgaaaacattcatcacatcagatgctgttgtggtggacatcaaggagcctgagaaagcagctgctgctgggaacccaatgggtggatcaggttttggattttagtttagaagaagaggagtaccctttttggcagttggcaaccatttttacactggaggcaggcagaatttcacagttgcatctgagacgttttttcttttcctgtgtgtaattgttgcgtacgtcaatgtggcagatgagaggagtagtaggttatgaatggccagcattatgacagtttattgttgctcgaccttacagaagagctgaaacagtgcaacataatgtttttaaggttgagaattatgcaagctgaagtagttggt

SEQ ID NO: 26096 - DNA, 2176 bp, Oryza sativa
  ref <308>: DATABASE ACCESSION NUMBER: AK101538
  ref <309>: DATABASE ENTRY DATE: 2002-08-28
ggtcacttctcttccattcctgaggaggaagaacccaactgcatcttgcctggatactcctagcttgcagagtcttctgttctgcaactctgaagaccctgatcgatcggtgccattcttttttgctttccttcgtcagttcaatcgtagctctctgtgatacaaaaaaaaaatggctgggggtggaacgagcatcaggaagtatgttggagccctaaaggacacaacaaccgtaagcatagcaaaagtgaacagcgattataaggatttggatattgctattgtgaaggccacaaaccatgtcgagaatctaccaaaggagaagtacataagagatatcttttatcatctctctgctggaagggctcgagcagatgtagcatactgcatccgtgctcttggtaggcgtctttcaaagacacgcaactgggcggttgcacttaagaccttaatcgtcatacaccgtgccctacgggaagttgatcccactttccgtgatgagctcattagctatggaagatccagtacacatatgcttcatttgtcctactttaaggatgattcaagtgcagaagcttgggattattctgcatgggttcgcaattatgcattgtacttagaagagagactagaatctttccgtgtactgaaatatgacgttgaaaaagatccaccgagaactcgagacctcgacacggttggtttgcttgaacaactgccagcactacagcagcttctttttcggctactcggttgccagccacaagggtcatcatcttataacaacataatccagcatgcactttcaatggttgctctagagagtgttaggatccatacagctatcaacgatgggatactgaatctggttgacaagttctttgagatgcaaagggatgatgctcttagagcccttgacttattcaaaagagcaattaaccaggcgggacaactttctgaattttatgaaatgtgtaaaaccatacatattgggcgtggcgagaggttcttaaaaattgaactgcctccgacctcattcctgcaagctatggaggagtatgtgagagatgcaccccttgcttcaataaaccaaagaaatcaggctgtactagcaatagagtacaaaagaaaaccagaggatgaagaatcatcaagttcagctcctctgccgccgcctccagtatcaacttcagaatctgaacctgaacctgagcctgagccagttaaagaagtctcacccgtacatgagccaaccgatttgctgggaatgaatgaaccgacccctgacgtgtcaaaaatcgaccaaaagaattctttggctttagcaattgttcaaccagacaatacaccaaaagccgctgctcctactactgaaaacgttgccactagctgggagttggcacttgtcgccgcgccaagttcaaatggcaatgctgccacctcgaacaaactggctggtgggctggacttgctcacccttgacagcctatacaacgaggcgcaccgacaagcgcaacagaacgcaagctacaacccctgggaggcagcagccccagcatcatctggcccaatgatgcagcagccaatgcagaacccgttctacgcctcgaacgccattgctccgcccttaaacgtgcagatggccgccatggcgcagcagcagcagcatatgttcatgctccagcagcagcaacaacagtatgatcagcagcagcagcagatgatgatgatgatgggaaggcaaccgtatgatcagcagcaaggctcttcttccaatccgtttgctagtccatacatgtctgcaggagttcacccgtacggtccggggatgcagctccatgccggcaattcgtacacatactctgggacaggcatgatgtagagtgacacaccatctgctgcttgtttggcagttttttttttttcattttatcgcatttttttgggcggtttatcaaatgtgattttaggaggattagatcggtagatgggacctggtatagagtcaagatgagcattgccgtcgaagttttttccctgctctttgctgacaaagagggcactggagttctctaaaaaaagaaagcagttgtgaagggttgtatacattgaaatctaatgtaacaactgctgctatttctgaaacataagatgtaaatgaacattatgtttcatg

SEQ ID NO: 26097 - DNA, 2259 bp, Oryza sativa
  ref <308>: DATABASE ACCESSION NUMBER: AK101539
  ref <309>: DATABASE ENTRY DATE: 2002-08-28
gtgcactaccactctcttcgcgttctctctcgctgcaatggaggcgtagtgttgggaggagggagggagagagagagggagagagggagctagggtttttgggccgccgctgcctccttgagttcgtcgtccctccggctccgaacccttgggcgtgcggcagtgtaggctccaatggggaagtctccggcgaagtggatcaaatccgtgctcttcgggaagaagtcatcgaggtccggctctaccaaggcgaaagatttatcgaagggctcgaacaacaaagggtatgctgctgctgggaaggatgctgggtttgagagctccccggtgatatcggagccggtgctcgttacacctcataacaatgaggctgtccaggaggttgggaggggtgagaattccagcttacaaggtgaagtggtggtgcgcgatgtcagtcaagacctggagaagcagaatactgtcgtttccgatgcgtccaacgaccccgagaggttgagagaggaacaagcggccgtcaaggcacaagctgccttccgaggctatctggcacgtcgggcattccgtgcgttgaaaggaatcataagactccaagccctgattcgtgggcatctcgtaaggaggcaagccgttgcaactcttcgtgcaacatggttgattgtgaagtttcaagctctagtccgtggtaggaatgtcagactttctactaataccattcaagtcaactggaagcttgttcaacaacagtcggggagtggtaagcgggatgcatggaaggagaaattgtcttcaaatgcatttgctcgtaagcttttagcttcaccaattctggtagaggctctccattttcaatatgatgagagggatccaaattcagccttcaactggttggagagatggaccataggtcgtgtctggaggcccatttcacatccaaagagagctgctgttactgatgccaagccacacacaaggaaggccagttatgcaatggaaacagagtcagggaagttgaagcgcaattctcggagaagttctgctgcaccagttgagtcctctcagacgaacatagccatggaaactgaaaaatcaaggcgaaacccaaggaaattcactagctctactgctgattcagtgcccgaaagtcagttaactgaacttgagaaggtcaaacgtaaccttaggaaggtaactaattctatggctgaggcttcaaaggtatctactcctgcaactgagatccctgaacgccaagaggtccaatgtgagaaaccacagcgaactgcagaagaagttccaaattatcctgagatccaagaacctcagaatggtaatctgttggaaaatgataagacggatatcctggtacctgatcttcaacctgaaccggaggttccttcttatcaagttgaaactgaagaaaaagttgctgaactgactgttgctgaccctacggtagaaactatgccgctgcaagatatccacaatgaagaaaatgctttagtaaatgatatggaacagagatccaaagaagaacctctttctactgagagccttaaaagcagcaagaggaggtcttcattctcaaccaagacagagtatccagaaaatggttcaaagaattcgcctgctgttcccagctacatggctgcaacacaatctgcgaaggcgaaactgcggggacagaattcacccagacttagttctgactctgcggagaaaaatggcttcaccaggcgccattccctcccatcctctaatggtaagttgaactcgcactcgccgcgtacacaaaggccaacccatgctggtggcaaagagggagtgaaggctgacaagtctatgctatcatcaagagacgcaagtgaaagacctgccaaagctgaatggaaacgctgaagagttcatcgatcgagcaccaaatcctcctgttgggttgcgcaacattcgggtggatgacgacgatgatggcgtctgcagtttgatccaattgttttgcttccgatgtaaaaaagatgttctccccatccgtgacagtgaaccagctgctttgttgtggtttgtatctggtgcgatttgacttatttctatagggtttttgcgtcctttcctctgccatgttcatgtatagctgaagcgtttccggtttgcttttgatttccctgcctccccgagacaccctgcttttgttgagcaagagagctgctgatgttagagagaacttgttggattgaacaatcttatcccatttggacatct

SEQ ID NO: 26098 - DNA, 1211 bp, Oryza sativa
  ref <308>: DATABASE ACCESSION NUMBER: AK101540
  ref <309>: DATABASE ENTRY DATE: 2002-08-28
gtctgcttcctcccggcgaccaccgcccgccgcgcgatgggcggcgccgccgtctccagcctgcttgccaccccaacaccgacctctcgacctcgacccgtctccaccaccaccgcccccttctccgtcaacctctccaccgcagctgcccgcgcacctcgcctcctcctactctcgcgccgccctcgccctcgccccgccgccgcggttctcggggtgtctgatgatacaggggtcaagatggctggctccgacattgttggcaagaacgatttgctgattgttggccctggagtgcttggtcgactggtagctgagaaatggcaggagggacatccaggatgcaaagtttttggccagaccgcaagcacagatcaccacaacgaattgtcgaatattggcatcattccctccttgaagggatccacttttcctcagaaggttccatatgttattttctgtgctcccccatctcgttcggatgattaccctggggatgtgagagtagctgcctcaaattggactggtgaaggctctttcgtttttacatcaagtactgctctgtacgattgtagtgacaacgaattgtgcaatgaggattgcccatctgtgccaattggcagaagccctcgtactgacgtccttctaaaagcagagaatgttgttcttgaggcaggaggctgtgtcctcaggctagcaggactctataaaatagatagaggtgctcattttttttggttgaggaaaggaactttggacacacgaccagatcatattatcaatcaaattcattatgaggatgctgctccccttgcaattgccataatgaaaaagggacacaggggtcgaatctttttgggctgtgacaataagcctctttccaggcaagaaataatggactctgttaacagaagtggaaaatttgacacgaagttccaaggttttactggtacagatggtccactgggtaagaagatggagaattcgagaactcgttctgagattggttgggagcccaagtatccaagcttcacagaattccttggtcttgacagttgacatgcttgtgtatgcttgcaaaaatcttcaactctaaatgaacagcaacacgttgtgaaccagttattttgttttgtttccattgcgttttttttaaaagacgtaaatactgtatatcttgttctgctatgtgcttatatcagttagcgtcc

SEQ ID NO: 26099 - DNA, 1697 bp, Oryza sativa
  ref <308>: DATABASE ACCESSION NUMBER: AK101541
  ref <309>: DATABASE ENTRY DATE: 2002-08-28
gagacggccgccatggccttctcctcctcgcctcctcggtgactccgcccgccgccgctggctgccggcgcagcgccaccctacaagtcaccgccccaccgcgagaggagggcgggcatggccttgccctgctcctatggctcccactgcgccgccctgcccttccccgccgtggtctccagggcggcctcctcgccgccaccgcgctcccgggggagaaggcccagcctaccacccgccggatgcttccacgccgcgccaagggacgccgctctggtgtccggctccgctgctggtggcgtgagcaggaggaggtgtgagttatttgacctccatcagcacatcgttccatttgcggaatcttgggcttggcagcagtccattgtgacaaggaggaaagggttggtaggcacggatgaagatcactccgacaccttaatcgcgctgcagcatccaccagtttatacgctaggcactgacagcaccgaggactacctccatttcgatgttaaagatgctccttttgaggttcaccgtattgaccgtggtggggaggtgacatatcatggtcctggacagcttgtaatgtacccgattatcaacttgcgatatcatcaaatggaccttcattggtactttagatcacttgaagaggtgatcattcgtgcccttcagtccgcattttccatcaaggcatctagggtagaaggtctaaccggtgtctgggttggagataagaaagttgcagcaataggaattcatgtctcacgatggatagcatatcatggtctagcactcaacgtaaccactgacttaacaccatttcaactcattgttccctgcggcataaaagatcgtggcgttgggagcatcaaagagatattgcaaatagcatctgatggaaaagagatagacgaaacagcattgatcgataaagcctacagaaccctgcttaaagagtttgctgaagttttccagctctctttatatcacaaccctaactgggatcttcaggaaagcaaaaattttagttaactgcagaatattttattggattcttgaaattcaacttgcattgaagtcagaaaccagtacaggtggatagagaggcaaacataattagatcaaagtgaagtctccttcactctaatatcaccaaaactgcagaactagtcatccatgtgcgcaagctcaaacttttgcttcacctgccaatcagataacgctatcagttttgaagatgatggtaatatgtaggagaggtgagaagttcagccaagccaattaaccttctgttaggagccatgtgggctgcaatatgggctggatcagctactttccaaagaagtccaagcaagcccaagaggcaaccatatataagtagcagtagcacttctaggaggggacgaacagattgattggccaaggcgtcgaacggcggcggcggcgacctggaggctggctggcctctttgtcgatctctcctctatctcccttcttctctactagtctagaagctactagaaccttctagcccttgtatccttccatcttccacctcaaaaccactccactattgtaacagacttggttgttccctgtgttggatttggcactgctatttctgaaattacattgttgagtgggtctctaacaccttctttggggttcgaagtggatccatctgcctttgtgtc

SEQ ID NO: 26100 - DNA, 1211 bp, Oryza sativa; identical to SEQ ID NO: 26098
  ref <308>: DATABASE ACCESSION NUMBER: AK101542
  ref <309>: DATABASE ENTRY DATE: 2002-08-28

SEQ ID NO: 26101 - DNA, 2262 bp, Oryza sativa
  ref <308>: DATABASE ACCESSION NUMBER: AK101543
  ref <309>: DATABASE ENTRY DATE: 2002-08-28
gattttcgcatctctctcagcctcaccgtcgtcgcctcccttaatctctcatgcttatgctcatggcagccgacgtctccatccccacgccgcctctctgctctctgctctccctccacacctactgattcttcttccccttcccttctccgctttccctgccttgcaaatccgccaaaggacttttagctgatcgatgaattgctgttcaagtgaagcggttttaagttccaaagtggcgcttctgaattcactcttctgtactatagtattgccaaaggagaattgctctaataagatgaactgtacaaaaggagggggatttccccttttgttttgcgcagtcatttgtctcatggcccaacagggggcttgcaatgtggtgctaatagcgaataacactaccttgtcatttgatgatgtcgaggcaacttttactccagaagtgaaagattcaggtgtaaatggtgcaatttacgctgtggaacctctggatgcatgtagtccattgagaaagaaagcagccaatggtcctgtttcaccatttgcactggtcatacgaggtggttgccaatttgacgataaagttagaaatgcacagaatgccggatttaaggctgtgatagtatatgatgatgaagacagtggtgtcctggtttcaatggctgggagctcgtccgggatctacatatatgcggtattcctctctaaggcttcaggagaggttttgaagaaatattcaggtcaaagtgatgtagaggtgtggatactaccagtatatgaaaactcagcttggtctatcatggcaatttctttcacatcactgcttgctatggctgctgttctagctacttgtttctttgtgaggagacaccagataaggcgggacaggggaaggattcctgtaacccgggaatttcatggaatgagcagtcaattggttaaagcaatgccaagtcttatttttacaaaagtgcaagaagacaatagtacatcatcatcttgtgccatttgcttggaagactacagttttggagaaaagctaagagtgttgccttgtcgtcacaagttccatgcgacttgtgtggacatgtggttgacctcgtggaagacattctgccctgtgtgcaagcgagatgcaagtgctggaacctcaaaaccccctgcatcggagtccacccctttgctttcttctgttattcatctgtctgctgaatcaacagctttgtcttcttttcggtcaacggtggcagtatctccccctaggccaataagacgtcatccttcatcacagtccacatcccgcgcttactccatttccagtgccccccgcaattataaccttcaaagatattacactaactcaccttatattagtacgagtagaagcaatgtagatcttgcaaatatgtcatcacaatggtctcacactccgcaccaagcatccatgcattctctaagaagtggccatttgtctctaccgatcaacatcaggtatacaataccacatgtttctcgttctgactatggatctgccagcctgggtttatcccatgattcctgttctcaccatggatctccgagttattatcatagctctttgggccagcaacgttcttacctgatgcaccgcaccgagtcagggccaagcctgtctactatggtgctccagtcgccacaatagagtcagtagcagtacaatggcgaatcaggagaagtctatcagctgcggtttaactcgatcattacgtcaggcctatgtacagcattgtcttgattctgatggaagcttgtctgctgtgacatcggatcagtcgctaccaagatgctgattgatcttacgaagttcactgtttcatgagcatttgtgcaagcccctgctagatttgttcctgggagatgcaaataaaacagaaaaatcctatgcgacacaaaactggcaggttcatgcaaagttaattcatggaactatttcgtgccagccaccattgtgattcaacaaggttacttacattgtctgtacggaggggaaattggtgatcttaatcgaagaaagacttgctgagttttgctgaagaagcaaatatccatcagtctacaaggaatggtttgactttgcgtattgtttgaggcttgtattataggtgatgactttagagttggtgtaatggtgtgtttcttttacattagttattttgtcatgcgtataaatgttacagcttagcaataatctgttagtcggtgaatgttttgtagctctct

SEQ ID NO: 26102 - DNA, 782 bp, Oryza sativa
  ref <308>: DATABASE ACCESSION NUMBER: AK101544
  ref <309>: DATABASE ENTRY DATE: 2002-08-28
gatcctctcttctctctgcctcctctcttctctttgctcctcccctctcttagctctctctcccgttccctctctctccactgcaccacccgacggcgacctagcggcgggaggggaggtggtagcggcgccctcccctacggtccatccagctgtccagctgcggcggcggcggcccagcagcgggaggggagatggtggcggtgccctaccctatgctccatccggccgtccagcagctgcggcggcaccctcacctctgctagatctggcgggaaagggaggtagcggggccctcccctacgctccatccggcgtccaactgctgcggcggcggccggcccggcagcgggaacggagatggtggcagcgtcctcccctatgctccatcaggccgtccagcagttgcggcagcaccctcatctccgccagatctggagggaagggaggcggtggggccctcccctccgctagatctggcgggaagggaggcggcggtggcctggtgatgacggcttcccacggcaacgacagcggtggtggtggggggggcagcggcaccctcctcctctccatccgacggcaacggcaataatggagaaggcgcgtggggcgaggagacagttatgtgttcttgagtaatgttcttgatgtgttcttgatgaatgtgattttgatgtgttcttgatgaatgtgatgttgatgtattcttgatgaatgatgaacgatgttcttgaagtgctcgggtccggcttgattcgagccgagccggtttttctttt

SEQ ID NO: 26103 - DNA, 1903 bp, Oryza sativa
  ref <308>: DATABASE ACCESSION NUMBER: AK101545
  ref <309>: DATABASE ENTRY DATE: 2002-08-28
gctcaacaatatcggctatacggtttcgcggatcacctgtggtcctgtgcagccgtaccgtacgcctctgctttcctctcaccccaccgcgccaccggcgagcggcccgcgagggaggaggcgctgccgccgcctctgctgatgctgatgatgctaggggcggcctcccagtggatcctggccgccgccgcggcggcggccgtggcggcgctgctgtggctggccgtgtcgacgctggagtgggcctggtggacgccgcggcggctggagcgcgccctccgggcgcagggcatccggggcaaccggtaccgcctcttcaccggcgacgtgccggagaacgtccggctcaaccgggaggcccggaagaagccgctgccgctcggctgccacgacatcatcccgcgcgtgctgccgatgttcagcaaagccgttgaggagcacgggaaaccatcattcacttggtttggcccaacgccaagagtgatgatttcagaccctgaatcaataagggaagttatgtctaataagtttggccactatggcaaaccaaagcctacccgtctcggaaagttgctagcctccggagttgtaagctatgaaggcgagaaatgggcaaagcaccggagaattctgaatcctgcctttcaccacgagaaaataaagcggatgctgccagttttttctaactgctgcacggaaatggttacaagatgggagaattcaatgtctattgaaggaatgtcagaggtagatgtttggcctgagttccaaaatcttacaggagatgtcatatcaaagacagcattcggtagcagctatgaggaaggaaggagaatttttcagctgcaagcagagtcagccgaacgcataatacaagcctttcggacaatttttataccaggatattggttcttaccaactaaaaacaacagaaggttgagagaaattgaaagagaggtcagcaaacttctacgaggaataattggaaagagagagcgggctattaaaaatggtgaaaccagtaatggtgacttgttgggcttattggtggagtcaaatatgagggagtcaaatgggaaagcagaactaggaatgactacggacgaaattattgaggaatgcaagctattttattttgcaggaatggagacaacatcagtattgctcacttggacattaattgtgctaagtatgcacccagagtggcaagagcgagcaagagaagaagtgctacaccactttggaagaaccacaccagactatgatagcttaagtcgtctgaagattgtaacaatgattctgtacgaggttcttaggttgtatccgccagtggtgttcttgaccagacgaacatacaaggaaatggagctcggcggcatcaaatatcccgctgaagtgacccttatgttgcccattttatttattcaccatgatcccgatatttggggaaaagatgcaggtgaattcaatccagggaggtttgctgatggcatctccaacgcaacgaagtatcagacctctttctttccatttggatggggtccccgaatctgcatcggccagaactttgcactattggaagccaagatggctatctgtacaatccttcagcggttctcctttgagctttcaccatcgtacatccacgcaccattcactgtgataactctccacccacagcatggtgcacaaattaagctgaagaaaatctaaccatgctgctcacttgctcggattggtcaaggagaaacaagtcagtttgataagttatatatctttctcttttgtaaacagaggtagtctacaggtttcgtattcgaactagaaagattttacttattgatatactagcttttatgcagataaaaacatggtgagtgaaataatattccgagtttttaat

SEQ ID NO: 26104 - DNA, 1177 bp, Oryza sativa
  ref <308>: DATABASE ACCESSION NUMBER: AK101546
  ref <309>: DATABASE ENTRY DATE: 2002-08-28
gatcctcccctacctggaggctgcagctcctggcctcccgggcaactagggttcggcaaatcccccgcaaggagggtgaaacccttccccaaaactccccaatccccacccgaccttcttcgaaatcggaggcaaaaccctaatcgcaaacagctcgtcctcgcgcggccgccgctccgcagcaatggcgtccctcttcaaggacccgaccaagctgtccgcgtaccgggacaggcggttcaccgggacgcaggaggagtacgaggcggcgctgcaggcgtcggtgacggtgtacgtcgggaacatgtccttctacaccacggaggagcaggcctatgagctcttctcccgcgccggcgagatcaggaagatcatcatgggactcgacaagaactccaagaccccctgcggcttctgcttcatactgtactactccagggaggatgctgaagatgcggtcaaatatattagtggaacaatgcttgatgatcgcccaattcgtgttgattttgattggggctttgaagaaggcagacaatggggtcgtggacggagtggtggacaagtaagggatgagtaccgcacggactacgatcctggaagaggtggctatggtaagatggttcagaaagagctagaagcacaacgtgagttagttgactatggaggtgcttttcaacctaatgcaccacctcaatatgacagaggtgacaggaagagagggtatggagattcttaccggaacgacagagattaccaacggaaacgttaccggaacgatgagcgatcgtcgcaaagagcacctgactctgagttcaagagagatgcgattgattcggagaagaatcctaggtttcgtgagaaaggtgattctgatgaagaagacgatgattatgataagagacgccggcgctgaactgaaagaaacaattgctgataaatgcaaatgggcagttgcagtgactacactagtaaagcccgtcgagcttatgttttttaccctgttgtgtaccatatgacttatatatctgtcgtcagctcatttctatgttgcggttcatcaccacatgcttgcataggtctcgcatgcgactgggaatggattttgtgtttattgacacttcagcttatgtattgacctgttatttaggttggcaactaattgattttggtcggt

SEQ ID NO: 26105 - DNA, 1641 bp, Oryza sativa
  ref <308>: DATABASE ACCESSION NUMBER: AK101547
  ref <309>: DATABASE ENTRY DATE: 2002-08-28
ggcatcagctccacccccgaaaaatttctccccaatctcgcgaggctctcgtcgtcgaatcgaatcctctcgcgtcctcaagatgcagatctttgtgaagacattgaccggcaagactatcaccctcgaggtggagtcctctgacaccatcgataatgtcaaggctaagatccaagataaggagggcatccccccggaccagcagcgtctcatcttcgctggcaagcagctggaggatggcaggacccttgctgactacaacatccagaaggagtcgacccttcaccttgtcctccgcctccgtggtggcatgcagatctttgtcaagactctgaccggcaagactatcacccttgaggtggagtcttctgacaccatcgacaacgtcaaggccaagatccaggacaaagagggcatccccccagaccagcagcgtctcatcttcgccggcaagcagctggaggatggcaggacccttgctgactacaacatccagaaggagtccaccctccaccttgtcctccgcctccgtggtggcatgcagatctttgtcaagacactgaccggcaagaccatcaccctcgaggtggaatcttctgacaccatcgacaacgtcaaggccaagatccaggacaaggagggcattcccccggaccagcagcgtctcatctttgccggcaagcagcttgaggacggcaggacccttgctgactacaacatccagaaggagtcaacgcttcaccttgtcctccgtctcaggggaggcatgcaaatcttcgtgaagactctgaccggcagaccatcaccctcgaggtggagtcttctgataccatcgacaatgtcaaggccaagatccaggacaaggagggcattcccccggaccagcagcgcctcatctttgctggcaagcagctggaggatggcaggacccttgctgactacaacatccagaaggagtccaccctccaccttgtgctccgccttcgtggtggtatgcagatctttgtcaagaccctcacaggcaagaccatcaccctggaggttgagagctcggacaccatcgacaacgtcaaggccaagatccaggacaaggagggcatccccccagaccagcagcgtctcatcttcgccggcaagcagctcgaggatggccgcaccctcgccgactacaacatccagaaggagtctaccctccacctggtgcttcgtctccgtggtggtatgcagatcttcgtgaagaccttgactgggaagaccatcactttggaggttgagagctccgacaccattgataatgtgaaggccaagatccaggacaaggaggggattcccccagaccagcagcgtctgatcttcgctggcaagcagctggaggatggacgcaccctcgccgactacaacatccagaaggagtccaccctccacctggtgctccgcctccgtggtggtcagtaatcagccagtttggtggagctgccgatgtgcctggtcgtcccgagcctctgttcgtcaagtatttgtggtgctgatgtctacttgtgtctggtttaatggaccatcgagtccgtatgatatgttagttttatgaaacagtttcctgtgggacagcagtatgctttatgaataagttggatttgaacc

SEQ ID NO: 26106 - DNA, 2870 bp, Oryza sativa
  ref <308>: DATABASE ACCESSION NUMBER: AK101548
  ref <309>: DATABASE ENTRY DATE: 2002-08-28
ggcggcgctttcaccgctctctctctctctctctctctctctctctctctcctccgcttcttcctacaaagccgtgggcgctgctcgccgcggcgggtctctctcgcgcgcgcaacaacagcagcctcaaaaccctagctgccctcgcgaccgggtcagggccttcgattggatcggccattcggttcgttcctccaggatattgttggtacttgcattcctccgtctgttattcaagaaagccagtttacactgagagaaccttgctttatttggttcattggccttttgttttgcctgagtgaatgcaattggaaccttctgggtagaagctgaagcttagtttggaacttcatcatactgatttcatactcagaaagtggcgagaaatggatcgtgatgatatagctggtttcgtaagtggaggttgcaaggccttctgagttttctgacgaagcagatgataatagagttatgatatacagaagtcaggcaactggttcttttcatttactatttggttgacgtttgaagtttgttaactggaatggacaaagcatcatgtagccttgggtttggtgatagtatcaactccttagacacgtcccgtcattggagcactgttcagcatacttctgggcttaaagctactacaattgactattcaacgtattccagtttttctattgcaagctcaaaaacactaaaaaggaagcgaagtgctatggcaggaccagaaggtactggaaacccattacttactttgggtttagggcactcaccaagttcatctgacaatagcaaagttagttctgccacagcttatgcaatgtctccatcttcattgaaagaggctgatgaggagtcatcagctgatcttggcctgaattttgagctttgccttggcaatgatatggtacattgtcaaaagaaatcccctgttggtgctgagaattcaccattgacaaactctcataaattggatcttcagctgagtttgtctactggatcacctgaatcagctgtcaccaacacaaatatggtgtcaccgattattcacggtggcttggagatacctgttaccaactgttcaccagctattataggggaaggatctgtaccctgtacttgggttttcgagaagtcagtgatttcatcttcgtatgcctctgaagcaacatataccttcccattttcgaaggtacccaaaacaggggatgctgctatgtcttctccagtcatatcgtcaaccttggtaacaagtatgaaaagcccagttgcctgtacttctgggtcaattaatccccaacaacgcaacagtatcactaaaaactgtcagtttccaggatgtgttaaaggagccagaggggcatcggggcattgcatagcccatggcggtggtaggagatgccaaaaacctggttgtcagaagggtgctgaaggaaggaccatatattgcaaggcccatggtggaggaaggagatgccaatttcttggatgcacaaagagtgccgaagggcgcacagaccactgtatagctcatggtggtggtcgccgctgcagtcatgatggttgttcccgggctgcacgtggcaaatctggcttgtgcatcaggcatggaggtggcaaaagatgtcagaaggagaactgtatcaggagcgccgaaggtcattcaggcttctgcatctctcatgggggtgggaggcgttgccaatttccagaatgcacgaagggtgcacagggaagcacaaagttctgcaaggcgcatggtggaggaaagcgatgcacattctcgggttgcaacaaaggagctgaaggcagcactctcttttgcaagggccacggtggaggcaagcgatgcttatttcagggtggtggtgtgtgcccgaagagcgtgcatggcggaactcaatactgtgttgctcatggtggtgggaagaggtgtgctatttctggttgcaccaagagtgctagagggcgtacagagtactgcgtgcgccatggaggtggcaagaggtgcaagtttgagggctgcgcgaagagtgcgcaggggagcaccgatttctgcaaggctcatggtggaggtaagcgctgctcatggggccaggttgacttgaacttcggtgtcggcgcaccacagtgtgataagtttgctcggagcaagactggtctctgttcagctcactgtgctttagtccaggaccattgtgtccgtggtggtacattaggcgctgcaaccttccagttcgcaactgatgccaaattcgacgagatggaagtcaccccagtgaagggagatcctcacgcgcaggcaagcagcgacgaccagtctcatctcggtggtgctcatcctcctgctgtaccggcgatcacctcggatcgattttctgaaggaagagtgcatggtggtgggctactggccttactttcacggggtggaaaccatgcgaatgcaggtaactcaaagaatggcgcccttctaccatgatgacatgggagtgagattctcttcaagaaattggtggctcgcagttttgatctgtttccaagagtttgtgctgtgacggacgggaaaaactagtgttttcacatttcaccagatgttcttgtgatgcttggatttgttgttatggccctctcccgtgtgctatatataaataaggagctcgtagagcgtggagtaccgggctttctgtcttccgtgctattgtagttgatgtcgttgaactgcccttctgtcagaattcatgtaatcttggtacttcgtgtttatttgtattgtcagtgatttgccttgctgctttgctgttggaaaattgtcgtgtatttttgttgatagattatatatattgccttttcgttgcaagcct

SEQ ID NO: 26107 - DNA, 2236 bp, Oryza sativa
  ref <308>: DATABASE ACCESSION NUMBER: AK101549
  ref <309>: DATABASE ENTRY DATE: 2002-08-28
gagtccagtacagtgactcactctcactccagactcctccctctctctctcgtctctctcctgccggcggcgccgtggcggcgagcggcggagcactaggggaggagggggctagtgctcgtctgtcgctgggtgtgtcgggggcgccgcggatcactctgcctcgagctgcgcgctcgcattccgctccttcgatctgggttcatctgttctgagatggctggcgacattacgtgtggatccttgctgcagaaactgcagttgatatgggatgaagttggtgagagcgacgaggaccgcgacaaggtcctgtaccagttagatcaggagtgcctggatgtttacaagaggaaagttgaccaggccaccgactctagggatctccttatccaggcgctggatgactcgaagattgagctggccagacttttatctgctctaggagagaaggccatagcaagaactcctgagaagacgtctgggacaatcaagcaacaacttgctgctatagcgccaacactcgagaagttgaacaagcagaaaaacgaaagagtgcgggaatttgttaatgttcagtcacaaattgatcaaatatgtggtgagattgctggcactacggaggtgggtgagaaggtggcaacgccacaagttaatgaggatgatttgacacttgagaggcttgaagaatttcgttcacaactacaggagctcgaaaaagagaagagcaataggttggagaaggttcttgattatgtgagcatgatacataatctctgtactgtcttagggatggattttcttagcacagtgactgaagttcatcccagtttggatgactctattggtgacaactgcaagagcattagcaatgatacactgtcaaaacttgacaagactgtagccacacttaatgaagacaaaaagtcaagactaagcaagcttcaagagcttgctggtcaactctacgatctttgggatctcatggatgcccccatgcaagaaaggagcatgtttgatcatgtcacctgcaacagatcagcctctgtagacaaagtcactgcacctggagctcttgccctggatctcattgagcaagctgaggtagaggttcaaaggctagaccagctaaaatacagcaagatgaaggaaatagctttcaagaagcaaactgagttggaagacatctatgctggtgctcacatggtaatagatacagctgctgcccatgaaaaaatattggcgctgattgaggcagggaacatagaaccatcagaattgattgcagatatggaaagccagatatcaaaagcaaaggaagaagcattgagtagaaaagaaatattagacaaagttgaaagatggatgtctgcttgtgaagaagaaagctggcttgaagattataaccgggatgacaacagatataactcaagccgaggtgcccacctgaatctcaaacgtgctgaaaaggctcggattcttgtcaacaagattccagcacttgttgaaactctggtggcaaagaccagggcatgggaggagagccgtggtctgtcctttatgtatgatggtgtacctcttctagctatgttggatgaatatgtcatgctaaggcaggaaagggaagaagataagaaaagaatgagggaacaaaagcgctacatcgagcaacaactgaacaccgaccatgaagggccatttggttcacgtgtgagccctaacagaccagtcagtgcaaagaaggtacctggtgcaaaatcaaatggcagtgctaatggcactcctccgaataggagactttcggtcagcggtcaccagaacggaaggtctggaggaaaggatggcaagagggactctgccaagacagcttcccccgggaatgtagcagctgctaaggaagatgcatcctcacacatttctggcaccgatccggttccgagcacaccatgatctttaaccttatggtatattagataaagagaggacagtttctgatgtttccattgatttgtggctatataatgtattgtgtttgtagcgaggagtaattatataacgtccatccttcaggcaggatcttttgcttctgtggagtaagtggagttcaacttttgattagttccctcagctgtactatttccccttctcatcagactctgtagtatagcctttgctggtatgtattactattcgttaacctgtttgctacatgtacaagttcttggaatgcctttccccc

SEQ ID NO: 26108 - DNA, 2267 bp, Oryza sativa
  ref <308>: DATABASE ACCESSION NUMBER: AK101550
  ref <309>: DATABASE ENTRY DATE: 2002-08-28
gtgttcaaagcgttccccctgttcatttcgacctctctcttcctctcccgtcgtcgtctcccccgtctccggctagggtttcggccgctcgccgccctcgcctccgcctccgcctccgccgccgccgctcgccagggggagcccttctcacctcaccgctcccgtctctctctccccgtcgaccccgacgggctacggctctacaccctccccgcctcggctcgtgtctgttcgcccgcggggacgctgtttccggcgggcggaggcgcggccgcggcgtcgcggctcctcctcggaggcacggtgcgggcgacggccctcctcctctccttccccgaccctctctctctatctcactctctctgccctagccttctacgctgtgtggaggcgtcgtcgcgcgcgcgcgcccggacggcgagcatctggatttgagcctaattgaagctgaacccccatggcccagtttaggtctgcgcctgtggaaagcgaggcggagccaggcgccgatggccctgtggatgaagccaatgctgtggaagaggagaaatctggtaagggtgaggatggcattgaggaggctgccgataccgttgattccgtgaaggattcagcaaagcctgaaggcatggatgcaaaggaggaggcggtggagcaggggggtggggccgcagcggataaggcaaaggatattcctgtgactagtaacggtaagacggatgctggcggaaatgaggtggctgaaatgaaggttgaaaaattggagaatggtgatgggcatttgaaggcggacggcgatagcaatggtgataacaagggtgctgatggtgagaaacagcttatgttagcgtcagctggggaggacgtggaggacccggtgctgtccaagcttgcaagcaactccttcatgtttgattacagctgtggtggtgatgactcggggactgaggaggagcaggctgctttcatgaaggaacttgagcggttttacagggagaagcttatggaattcaagcccccgaagttctatggtgaagggttgaattgcctcaagttgtggagacaagtgactgggttgggtggctatgatcaggtaatgtgcactgcatgcttgcttactagttgcatcaacaggtgacatcgtgcaaactgtggcggcaagtgggagagtctttcaaacctccgaagacatgcacaactgtttcatggaccttccgtaacttctatgagaaggcactccttgaatatgagaaacacaaaatcgaaacgggcgagtttcaagttgctgcatctaatttaacagagaggattacttctgaaagtcaggttggcatccatgcttctggttctggaagagctagaagagaatctgcaacccgagctatgcaaggctggcactctcagcgcttgcttggcaatggtgaaattgctgatccaataattaaagataaagggacggtgtctgtcttaaaaaaggataaaactcctaaaagcagcggttctgccaagaggaaaaggacaccgaccttggaagatgacaggattgtaccatataaacctgacaagctacaaaatgactcaatggttcttgaccttggccctccagctgattgggtaaagataaacgttcggagaaccaaagattgctatgaagtctatgcattggttcctggccttctgcgtgaggaggtacatgttcagtcagatcctgctggccgtttgatagttactggagagcctgagcaactagacaatccttggggtgttactccattcaagaaggttattagtttgccctcccgcattgatcctcatcaaacttcggcagttgtcactctccatggacagctatttgtccgtgcaccattcgagcagtcaaagtaaatggtgctctacaagatgaagcgcaacatgcaaggttgcttttgtaggtgggggtttatgtgattgacttgggcctgttcatcctgatcttcgttgcaaactagttactttctgcttcattactcctgccatgttgtctattctgtattgattaattctagttaactagatggtctagttatgtatcttgtagttcgttaattgtgatatgtagcttaagttcagctctattagtttagaatgttaatagcctgatgctaaacatgttcatggtttctttcttccttttttttttctcaactaaagaaaaggtgataatttgtagcatgtagcttgtgaggttattcctaatactcagttctcatactactcagaacatgaag

SEQ ID NO: 26109 - DNA, 1127 bp, Oryza sativa; identical to SEQ ID NO: 23520
  ref <308>: DATABASE ACCESSION NUMBER: AK101551
  ref <309>: DATABASE ENTRY DATE: 2002-08-28

SEQ ID NO: 26110 - DNA, 1742 bp, Oryza sativa
  ref <308>: DATABASE ACCESSION NUMBER: AK101552
  ref <309>: DATABASE ENTRY DATE: 2002-08-28
gaccactaacgagaagctaccctcgagtccgacggagaaggggagggctaccgccttctgcgccgccgccgccgccgccgcggcaggttggccgcctccgatcgagtcccgctggggtgagcttgccccggcgcccgccgcttgttcgacaaaatggctgaccggaagaagtgcaaggcggcggcggtcgccaccacggatggcggtggcgaggaccgcatcagcgcccttccggacgaggtcctccagcgggcgctctccttcctgccctcccgcgacgtggtgcggacgtgcgtgctctcccgccgctggcgccaccagtggaagtccgtgcccgccctgcgcatctacgcgttcgatgattgccgggacgtccagcacctgagtgatttcgtcaccaactttctgctccggcgcaaccggttggctctacatgaatgcgacatcacatgctttgacgagggagacggttgtgaggtgttcggggagaacgccagacagtggatccggtatgctgtatcgtgccaagttcgggtgcttcgtgtttctgttgaagcgcacacccgtctatttggtgcgcctctcaaagcccagcgtttgaagagattagaacttttcagcgtggagttgggggccttctcccttgatttctctagctgcagggagttggaggagttggagctgggaggttgcatcatcaaagacaaagtaaagcagatcttatcagaatcattaagacgtctgagaatcgaaggatgtgattttttccgaaatcgcactcgcatttcttgcccaaatctcatttccttggagattaccgattttaccttgtacactccagtgctcatgagcatgccttccttggcatcggcatttatcaggtttggtgaacactgtgctgattcttgtgactgctactattacggcgaatttggtcccgattatactggatgccatcacagtacagttaagggcaatggcactgtgcttctcaatggtttatcagatgccatccaattagagttgataagtggtgccggagtgttcattttcagaagggattttagatgttgccctacatttaacaagctgaaaacactgttgctcaatgaatggtgtatggctgctgactccagcgcactaatttacttcctccaacactcaccggttctagagaaacttactcttcaacttcggaagagccaacgtactatggtcaaaagaggtagcacgaacaaaaatcagaatgaaaaattcttggtgtcaaagcatctcaagttagttgaaattaaatactgtgaggatgagatggttcaacaagttttacatgtcctaagtgcttgtggcataccatccgagaaaattatcatccaacggataagctcatgggcttctggaggttttagtttcgagcagaggaaataggctcgttgattgttgagaattgtgcccctgaatctggcgccacgaagctgctggcttccacgtctgtctatcaagatcatgggtagagtgacattcttaggaactagtagtagtagaatgagcagcctgacttgcttgttgggactagtatgtttcgtgtgaatatctgatggcacatggcatgtttcttgtgcttccttctgattaaactcattcatgttcggtaatgcctggagaaattgtgttaatatgtgctgttcttgagtagaagctgaaactgcagcctgaactgaaacactgctgaaacttgtgtgtcc

SEQ ID NO: 26111 - DNA, 1780 bp, Oryza sativa
  ref <308>: DATABASE ACCESSION NUMBER: AK101553
  ref <309>: DATABASE ENTRY DATE: 2002-08-28
gagctctccgagctgcaggattcgcttcccacgtttccggatgaagaggcatttgcatgtatcgagagggagcttggctttcctcttgattcaatctactcaacaatatcaccttccccaattgctgctgcaagtttaggtcaagtttataaggcacggttaaaatactctgggcaactggtagctgtcaaggtgcaaaggcctggtattgaggatattatagggcttgatttttatctactgaggggccttggatatctaataaataaatatgtcgactttatatccagtgatgttgttgctctcatgggtgaatttgctcgaagagtttaccaagagcttaattatgtccaggaaggccaaaatgcaagaaggtttaagaagttatatgctgacaagcaagatgtgctggtccctgatatattttgggactacacaagtgcaaaggttctgacaatggagtggattgagggtgtagagttaaaccagcaagcagctattgaaaaacaaggtttgaaggttctggatttggtgaacattggtattcagtgcagcttaaggcaactattggagtacggttactttcatgctgatcctcatcctggtaacatattggcaacacctgaagggaagcttgcctttcttgattttggtatgatgagtgagaccccagaggatgcaagagtagccatcataggccatgttgttcacatggtcaatagggactatgaagcgatggctcgtgattattatgctctcgattttttggaacctgatgtagatgtctccccaattgtccctgctcttaagagtttctttgatgatgctctgaactcaacagtaagtgagctaaacttcaaaaccatagttgatggcttaggcgctgttctctaccagtacccatttaatgtaccggcatactacgcattgatactgcgatcgctcactgtactggaaggtttagcactctatgctgatcccaattttaaggtgctcgctgcctcgtacccttactttgcgaaaaggctactcactgatcccaatccatatctcagagatgctttaattgagctactattcaaggatggaaaattcagatggaataggcttgaaaatcttcttgttcaagggagccaagatagagagtttgcagcaaaagatgctttgcaaccagttctaaagcttctacttggtcctgatggggaggaattgcgagtcctagttgtgaaagaagcggttcgtgtcacagaagccatcacttttggaacgctgattgattcgtataatgcagctccagaatttcttaaaccattaatatccagtggtaatccagccggaccgttcaagataagcgacactgaaagggaacaaatgattgagctgcgggacagggttttcagaatatggggccttctgagatcctcggatggctttgacccaaccatcttgcaaccaattgtgcaggtgctacaagagccagaggcccgcgttcttggctcccgggttgcaggaggtgttacgcagcgcctcgcggcccgcctgttgcagcagctgctgagaactccacctgctccaggatctccttagcagataagacatgtaaattcacacggtactttccacaggaaagagaaaaggaaatgtaattcggaaatcaagtataaagttgatttcttcattcatgccggataaaaagatcccctagatgtttgtagattgttctcaaagcctgaaaaattttgggtctacgaaaatcaggaactcttctccacttgaagcc

SEQ ID NO: 26112 - DNA, 3443 bp, Oryza sativa
  ref <308>: DATABASE ACCESSION NUMBER: AK101554
  ref <309>: DATABASE ENTRY DATE: 2002-08-28
ggctccgctccaccgcgtgtcccactcccaccacccccgctctcccgtccgtccgcgcgcttccccccatgcgagatcaccgtctcctccgcctcctcctcgttggctcgtcctcttcccccatccgcctctctctctctctctctttctctctctctccagtctcctccactctcctctcttcgagagccgctcgcgacgcgagcctcttggagcgcgcgccctataactaggcacccgtgtccccgtcccggatctcccccccacccgtcgctccgccccgtccccattttggatggattccattggtataaatcgcgccccgctgggttcctcctcctccgccgccgccgtgacagctcgtcgaggcatcgcgctccgcccggctcgccgctccgtcgcgagtacgaaccgtgtgggtgtggcgacgatcggcttcggggacgcgtctgggctcagagcgtgttctgagaaggttaggcgatttgattctgtacgaagcaccacggcgagagctcagaacgggaacgctgggagaagcatgaccgaggaaagaggatgtacaatgtctgatactgaaatgccatttaaatattcctctggtaaagccttcccattaggagtgtctcaagttgaaggcgggctgaacttcgcacttttctctcagcatgcttcttctgtcattctctgcttaaagcttcctgggaggggaactgaagatgagaaaggtgcagatgttgtcgagtttgttttagaccagcagaagaacaaaactggggatatatggcatgtgatagtggagggcttgcctgcttctggtgttctttatgggtatcgtgttggtggccctcaaggatgggaccaaggccatagatttgatagcagcactgttcttctggacccttatgcaaaattagtttctggtcgaaagtactttggggttgctgaagagaagtcaagccagcattttggaacatatgattttgatagctctccttttgattggggtgatgactacaggcttccgaatttgcctgaggcagatctagtcatatatgaaatgaacgtccgtgctttcaccgcggatgagtcaagtggccttgattcgacttctcgtggaagctatcttggtctcattgataaaatccctcatttgctggaacttggcgttaatgcagtggaactacttcctgtttttgagtatgatgagctggaattcaagaggtaccccaacccaagggaccacatggtcaatacatggggctattctacgataaacttttttgcacccatgagccgttatgctagtgccggtggtggaccagtggctgcttccaaagagctcaagcagatggtcaaagaattgcataaagctggcatagaggttattctggatgttgtttacaaccatacaaatgaggcggatgatgctcacccgtatatgacttctttccgtggcattgataacaaggtctattacatgttagacctgaacaaaaatgctgaactactgaacttctcaggctgcggtaaaaccatggttcctgtactcgtatactaatttatttgggactttactctatatcaataactgtttttactgcaatctaatactaattctgcttttgcttaagaccttaaaggatgtaatatatctcagttttacctatggacatccaaataccaaattattaattatattttctgttaagcctttatttatacagctttacagctggttacttttaagaaaaatgctatgatttatttctgaaattactgcttgtgtatcttgctgatctaacatgtttaatgactagatacttacatatcacatgatttgttcaaaattttgaaagtgtaattgtttcacttttaagtcttaacggtatgttttggttcaacctagggaatacactgaactgcaaccatcctgttgtcaaggagctcattcttgacagcttgagacactgggttgaggagtatcacatagatggatttcgatttgaccttgcaagtgttctttgtcgtggaccagatggttgtcctcttgatgcacctccactcatcaaggaaattgccaaagatgctgtattatctagatgtaagatcattgctgaaccttgggattgcggcggcctttatctcgtagggcgtttccctaactgggacaggtgggctgaatggaacggcaaatacagagatgatcttcgaagatttattaagggtgaccctggtatgaagggggtgtttgcgactcgtgtgtctggatctgctgatctctatcaggtgaacgagcggaagccttaccatggtgtaaattttgtgattgcacatgatggatttactttatgtgaccttgtttcttacaacttaaagcacaatgatgctaatggagaaggtggctgtgatggatgcaatgacaactttagctggaactgtggtgttgaaggagaaacaaatgatctgaatgtgttaagtctgcgttcaagacaaatgaaaaacttccatgtagctttaatgatttctcagggcaccccaatgatgttgatgggcgatgaatatggtcatacacgttatgggaacaacaatagctatggacatgatacttgcattaataatttccaatgggaacagttggaacaaagaagagatggccatttcaggtttttctcagagatgataaagtttcgtcacagcaacccaatattaagacgagacaggtttcttaataaaaacgatgtcacctggcacgaggattgttgggagaaccaggaaagcaaatttttggcattcacagtacatgatcacaactctggtggagatatctatttggcattcaatgcacatgactattttgtggacgctgtaattcccccaccaccacaccataaatgttggaaccgtgtggtggataccaacctggaatcaccaaatgatattgtaccagaaggggtgccatttacaggaccaaaatacagaattgctccatactcttccattctgctcaaggcaaagccttagaaaagttagtagttgagagcataaaaataatgccaccaatgctggcttggttggttaataacaggttgatcacattagcagtctgcacttcaaaaaggcaacaggtatagagaatgtctaataacaactgccgaatcatagttggctttggcagatgaggccacttttggcattcaggaatttcttccagttattactgtaggaatgaatgggctagggcttagggccctctgggggcagcaaagctcgaggtgtcgtctcggtttcatgtgagcgtgacctggctatggtcaccctatcatttatcaaggtcctgtttcgtaataatgtgtcatcaaacactcaactcccatgagaatgtatgccagcatctattttgctggaaattcatgaaaaaaaggaacaatgctattagtccc

SEQ ID NO: 26113 - DNA, 2348 bp, Oryza sativa
  ref <308>: DATABASE ACCESSION NUMBER: AK101555
  ref <309>: DATABASE ENTRY DATE: 2002-08-28
ggctgttttctttttcttcttctcgctgagctctactactgcactacactaccactctcttcgcgttctctctcgctgcaatggaggcgtagtgttgggaggagggagggagagagagagggagagagggagctagggtttttgggccgccgctgcctccttgagttcgtcgtccctccggctccgaacccttgggcgtgcggcagtgtaggctccaatggggaagtctccggcgaagtggatcaaatccgtgctcttcgggaagaagtcatcgaggtccggctctaccaaggcgaaagatttatcgaagggctcgaacaacaaagggtatgctgctgctgggaaggatgctgggtttgagagctccccggtgatatcggagccggtgctcgttacacctcataacaatgaggctgtccaggaggttgggaggggtgagaattccagcttacaaggtgaagtggtggtgcgcgatgtcagtcaagacctggagaagcagaatactgtcgtttccgatgcgtccaacgaccccgagaggttgagagaggaacaagcggccgtcaaggcacaagctgccttccgaggctatctggcacgtcgggcattccgtgcgttgaaaggaatcataagactccaagccctgattcgtgggcatctcgtaaggaggcaagccgttgcaactcttcgtgcaacatggttgattgtgaagtttcaagctctagtccgtggtaggaatgtcagactttctactaataccattcaagtcaactggaagcttgttcaacaacagtcggggagtggtaagcgggatgcatggaaggagaaattgtcttcaaatgcatttgctcgtaagcttttcgcttcaccaattctggtagaggctctccattttcaatatgatgagagggatacaaattcagccttcaactggttggagagatggaccataggtcgtgtctggaggcccatttcacatccaaagagagctgctgttactgatgccaagccacacacaaggaaggccagttatgcaatggaaacagagtcagggaagttgaagcgcaattctcggagaagttctgctgcaccagttgagtcctctcagacgaacatagccatggaaactgaaaaatcaaggcgaaacccaaggaaattcactagctctactgctgattcagtgcccgaaagtcagttaactgaacttgagaaggtcaaacgtaaccttaggaaggtaactaattctatggctgaggcttcaaaggtatctactcctgcaactgagatccctgaacgccaagaggtccaatgtgagaaaccacagcgaactgcagaagaagttccaaattatcctgagatccaagaacctcagaatggtaatctgttggaaaatgctaagacggatatcctggtacctgatcttcaacctgaaccggaggttccttcttatcaagttgaaactgaagaaaaagttgctgaactgactgttgctgaccctacggtagaaactatgccgctgcaagatatccacaatgaagaaaatgctttagtaaatgatatggaacagagatccaaagaagaacctctttctactgagagccttaaaagcagcaagaggaggtcttcattctcaaccaagacagagtatccagaaaatggttcaaagaattcgcctgctgttcccagctacatggctgcaacacaatctgcgaaggcgaaactgcggggacagaattcacccagacttagttctgactctgcggagaaaaatggcttcaccaggcgccattccctcccatcctctaatggtaagttgaactcgcactcgccgcgtacacaaaggccaacccatgctggtggcaaagagggagtgaaggctgacaagtctatgctatcatcaagagacgcaagtgaaagacctgccaaagctgaatggaaacgctgaagagttcatcgatcgagcaccaaatcctcctgttgggttgcgcaacattcgggtggatgacgacgatgatggcgtctgcagtttgatccaattgttttgcttccgatgtaaaaaagatgttctccccatccgtgacagtgaaccagctgctttgttgtggtttgtatctggtgcgatttgacttatttctatagggtttttgcgtcctttcctctgccatgttcatgtatagctgaagcgtttccggtttgctttcgatttccctgcctccccgagacaccctgcttttgttgagcaagagagctgctgatgttagagagaacttgttggattgaacaatcttatcccatttggacatctcttctgcgttttcttcttataactgactagcgagttgtgccattcc

SEQ ID NO: 26114 - DNA, 2370 bp, Oryza sativa
  ref <308>: DATABASE ACCESSION NUMBER: AK101556
  ref <309>: DATABASE ENTRY DATE: 2002-08-28
gagcagcagcagaagcggcagcgtactcgtcgatcggtgcaggtccgtgcaagtgcaagagagtgcagtgcggtacagcgcgcgtgtggttgctgagcacttgtgctgcgcgggctacctacctgtttcgagccaggtttggttcagctagcgtattatagtacagagactccacttcgatccacaaaattaaggccagacttagcaagctgctgacgtcgtgataagcggagcgagcgcctcgctgcctctgagagaggccggtataagtacgggcgcgtctggctctctgcttggctgtgagcaccgcgagcacgtacagctccgcctcagacaagagcagaacacgtacgtttccccgcccggcaccggcatggctggtctgaagaagatggaggaggtcacagcagctgctgctgctgttgcagcgagcagtacggccgagaagcgtgcggccgccgtcgtcgtccccgacgcggcgctgacgatgaacggtgccgccggcgcggaggagaagacggcggcggctgcggcggcgccggaggatctgccggcgccagccgcattgtccggctggccgaggagggtggggctctacctcttcgtcatgaacatcaggagcgtgttcaagcttgacgagctcggatcagaggtgttgcgcattgccgtgccggcgtcgctggctctggcggcggatccgcttgcttccttggtagacacagcgttcatcggccgcttaggttcggtggagatagctgctgttggtgtttcaattgccatatttaaccaagtatccaaagtctgtatttacccccttgttagcgttacaacatcatttgtggctgaagaagacgctatcatcagtaaatgtatagaagaaaacagcagccaagatctggagaaagcttctcctgtggattcagaaaccaacaatctgcctgtatctggtcctgataaggtagaatgtgtcaattcatgtattcccaccgagtgtacaaatccctccgatcaagggtgcaagagaaagtacataccttctgtgacatcagcagtaatagttggctcatttcttgggctacttcaggctgtcttcctggtcttttcagcaaaatttgtattgaatatcatgggtgtcaagaatgattcaccaatgctaaggcctgcagttcgctacctaacaatcagatcacttggtgctcccgccgtattactgtctctggccatgcagggtgttttccgtggtttcaaagacacaaagacaccattgtatgccactgtggttggagatgcagcaaacatcatactagacccaattttgatgtttgtttgtcacatgggtgtcactggcgcagcagttgcccatgtcatttctcagtacctgataacgatgatactgctgtgtcggctcatccggcaagttgatgttatcccacctagccttaaatccctcaaatttgggcggtttcttggatgcgggttcctgctgcttgcaagggttgtggcagtgactttctgcgtcacgctggcgtcgtcgttagccgctcgccatggacctaccatcatggcggccttccagatctgctgccagctctggctcgccacatctcttcttgctgatggacttgccgtcgctgggcaggcagttcttgcaagcgcattcgccaagaatgataaaggcaaggttgttgttgcgacatctcgtgtactacagctgagcattgttcttggcatgggtctcactgttgtgcttggggttggcatgaagtttggggctggaattttcacaaaggacatcgacgtgatcgatgtcattcacaaaggcattccttttgtcgctggcacacagacgataaattcactagccttcgtgttcgatggcatcaacttcggagcatcagactacacatactcagcttactccatggttggtgtggctgctatctccataccctgcctagtatacctttctgctcataacggattcatcggtatatggatcgcattaacgatctacatgagcctgaggaccatagctagcacttggagaatgggggcagcaagggggccatgggtgttcctccggaagtgatgggttttcaacttctcatggcgattattattaatcctcagcgttttgctggtagatagccatgcatactagtactagctctcatgtaattaaaaataagtacagttcttagcgcatgtcgtggtgtcgagtttattgcttcgtgaatcgggatcgtatctgactcattgtgggggagaggatacaccgttctttggtgtttgttgtgtgccggcgatggcaattgtttctgtgatatatgatattgaagtattatacattaattagtagtacattggatc

SEQ ID NO: 26115 - DNA, 2087 bp, Oryza sativa
  ref <308>: DATABASE ACCESSION NUMBER: AK101557
  ref <309>: DATABASE ENTRY DATE: 2002-08-28
gacctttcctcctcctccccccattgcttcgtctcgcgccggatcgatccagctgccgccgcgttccgatcccctctgctctggcttgctgatagatcgatcgatcgatgaagcccgccggtgggaggagcaaggacggcggcggcggcggggcggcattgctcggcggcggcggcgtcacctgcttcgacgtcaagtccttcgtcgcctccctcgcgctcctcaccctcatcatggcgctctggcagctccacccctaccagcccctcgtcctcctccccgccgccctctcctcctccccatgccccctcccccccgctcacccacctctggtattgccgtttccttcctctccaccgccgctgccaccaactcgactgacaccgccacggtcccaaccaccaccgccgccgcgagggtggcggcgacgacgaggccgaccctgcacgcggcagcgggagcgggacccaaacaagcgggagctccgtccgtacggcacggcggcggcgctgttcgtccagatgggcgcgtaccggggcggcccgcgcacgttcgccgtcgtcgggctggcatccaagccagcgcacgtcttcagcaacccttacttcaagtgcgagtggctgcccaacgctcccgccggcgcgccgccggtccggaccaaggcctacaagatgctcccggactggggctacggccgcgtctacaccgtcgtcgtcgtcaactgcaccttcccctccaaccccaacgccgacaacctcggcggtaagctcctcgtccacgcctactactccaccgcctcccgccgctacgagcgcttcgtcgccctcgaggaggcaccgggctcctacgacgacgcccgattccggccacccttcgcttacgactacctctactgcggctcatccctctacggcaacctaagctccgcccgcatgcgggagtggctcgcctaccacgcccgcttcttcgggccgaggtcccacttcgtcctccacgacgccggcggcgtgacaccggaggtgagggcggtgctggatccgtgggtcagcgccggccgcgtcaccgtccaggacatcagggcgcaggaggattacgatggctactactacaaccagttcctcgtcgtcaacgactgcctccaccgctaccggcacgccgcgaactggaccttcttcttcgacgtcgacgagtacatctacctccccgacggccgcgcgctggaggacgtgctcgcccagctccagccctacacgcagttcaccatcgagcagaaccccatgtccagcaagctctgcatcgatgatccgaccgaggactactcgagggaatggggctttgagaaacttgtcttccgcaattcaattaccggagtgaggcgtgatcggaaatatgcaatccaagcacggaatgcatactccactggtgtgcacatgtcgcaaaatgtgtatgggaggacaactcacaagacagaaagcttgataagatactaccactatcataattctatcaatgtcatgggggagccctgccggaaattcgtgccgaaacccgccaatggcagtaaggtaatgttcgaggggataccctacgtctacgatgataacatgaagcgcttggcaggggagatcagacgctttgagaagcagacgattggggatgtccatacatagcatctggatgcaaaactttgctggtacatatatgattttattctttcggacgccgtcggcggtgtccacctgttgccgtctgttctgtgcttcaagccgcaactctgagaatcagagggagaggatctaactccagtgtccaagcagcgctgtaaagttatggttctcttcagcattctcctcttcgtgcagggggcaacacgcctttgtggctcaatatcctttctttcctttgttcctttcccttcttctccctagtgttgtgctccaatctctttatagatttgtgcttattagactgacagtgtgccttcatcagattcttctcatctcttattgggggcattgtaaagtttgtctcattgtctgctaacttaatggaaggttggatcttatatagtactagtatatgtgtgc

SEQ ID NO: 26116 - DNA, 2213 bp, Oryza sativa
  ref <308>: DATABASE ACCESSION NUMBER: AK101558
  ref <309>: DATABASE ENTRY DATE: 2002-08-28
atggtgtccctaaaccccatgcccacaaggaaactccactgagtgaatttttcaatgtcgaagttgtggccctatctagttatgaggaaaaggaggagttattcaaagagcaggttgccagtttaagagataggttccaacagtctattgctcctggtggacttgctggagatcggcggggcgttgtccctgcatctggtttctctttcagttcacaacaattttggaaggtcattaaggagaataaagaccttgatctaccagctcataaagttatggtcgctactgtacgctgtgaggaaatcggtaatgagaaaattgccagttttacagctgatgaggagtggcaacaatttgaggaagctgttcaacatgattacgtgcctgggtttgggaagaagatcagcaaccttcttgacagatgcttatcagagtatgacatggaggctatttattttgatgaaggtgtcagaacttcgaaaaggcaccaacttgagtctaaacttttgcagcttgtcaaccctgcataccaaaatattttggatcatttacggactagaactttagaagtatttaaggagtcctttgacaagtccctagaaaaggagggttttgctgttgctgctcgtgactgtactaaggttttcttggagaagtttgacaaaggatccgaagatgctgctatccaacaagtgaaatgggacccatcaaaaattaaggataagcttaagcgtgacattgaggcgcatgtggcatcagttcgtgccaaaaaactatctgaactttgttccaaatacgagggacaacttaccaaggcactggcagaaccagttgaagctcttctagattcagccagtgaagaaacctggccagcaattaggaagcttcttcaacgcgagacaaaatctgctgtttcgggttttgaatctgccatggcatcttttgagcttgatgaggtgactcagaaagaattactttcaaagctggagagtcacggaaagagcgttgttgaatcaaaggcaaaagaggaagctgcaagggtcttgattcggatgaaggacaggttctcaacactattcagccgtgatgctgactcaatgccaagagtgtggaccggaaaggaggacataaaggccattactaaaactgctcgttcagcttctatgaagttgctttctacaatggctgcaattcgattggatgaggatggtgacaacattgagaacaccctgtcccttgctctagttgacacagcaaggccagggactacagataggagcatccaatcgttcgatccacttgcctctagctcatgggaaagggttccagaggagaaaactttaattacacctgtccagtgcaaatctttatggaggcaatttaaggctgaaactgaatatactgtcacacaggccatagctgctcaggaggcaaataagaggaacaacaactggctgccacctccatgggcacttgccgcaatggctatccttggattcaacgagttcatgacattgttaaagaatcccctttacctgggagtcatatttgttgttttccttgttggaaaagccatgtgggtacagctagacattgccaaggagttccaaaatggatttcttccagccgtcctatcactttcgacgaaattcgttcccacgataatgaacatcctgaagagattagctgatgaggggcagagacctgcagccccagagaggcaaagagagatggaactccaaccaaaatccacaaggaatggttcacacagcaacgtgacatcggcagggtcatccagcataacctcttcggagagtggacccgaatattcaagcccgattgcacactgatcagttcatctatagcttttagctgaaaaccccagcagttgtagtttcaacgggtgagcctttggagaccgaagcgccttgcagtttttgtaagcttgcccttccccatctgatgtacggagattcaatggccccagccagaggttatttatgggattttgggcccagggagtttgtttgtaagaaacgctgtagaatatgttttatttcattttttttttgtaacagcttatatgatggttgtatagaagatttgcggttttatcatctcaacccaaggaggccaggggagcacagcagtgcattctacactactaaatacagttgattgcatggacacgaaaaatgtatgtacatgtcttg

SEQ ID NO: 26117 - DNA, 1635 bp, Oryza sativa
  ref <308>: DATABASE ACCESSION NUMBER: AK101559
  ref <309>: DATABASE ENTRY DATE: 2002-08-28
gcgtccaccaccatctctagaactttccatctcgcctccgcctccgcctccgcctccccccacctcctaagctccaaacccaagaaaccctcctcctccgccgcccgccgcccaatccgacccgccggagcgcgaagggagaaacagggcagccagaagaagaagaagaagaagaagaagaagaagaagaagaagaagaagggaggatgccgccgaagaaggcagcgccatcgaaggcggacctggccaagaagcagaaggtcgtggaggacaagacgttcgggctcaagaacaagaacaagagcaagaacgtccagaagtacgtccagtccctgcatcaggccgtccagcccaagcccgacccgaccaaggccgccgccaagaagaagaaggaggaggagaaggcgcgcgagaaggaactcaatgatctattcaaggtcgccgtcagccagcccaaggtcccagttggtgtcgatcccaagtccatagtgtgtgaattctttaaggttggccagtgccagaagggttttaagtgcaagttctcacatgaccttaatgtccaaagaaagggtgaaaagattgatatttacactgacaagcgtgatgcagaaaccatggaagactgggaccaggagactcttgagaaggttgttgcgtcaaaaggagcagagtaccagcagaataaacctactgatattgtttgcaagtactttcttgatgccgtggagaagaaacagtacggttggttttgggtttgcccaaatgggggcaaagattgccactacaggcatgcacttccacctggctatgtactgaagtcccaaatgaaggccttattggaggaagagagtgaaaagattgctatcgaagatgagattgaagatcagcgtaaaaaggtaaaaacaacaactcctatgaccacagatttattcatggaatggaaaaggaagaaggcagaagaaagagaagctggtctggctgccttgagggcagagagggctaagaatgatcgcatgagtggccgtgagctgttcatggctgattcaagtgtgttcgttgatgatgctgaagcatatgatgtatatgaaagacaggaagaatcagaggctaatgaagaaccgagcaataaaaaccaggatgaggggccaagttcatcaacttctaatggcaaggaggtggaagagtccgatgatgaagatataaatattgatgatgacctggacattgatgagttaaacgagcttgaagcaagcctgtcaagaacttccattcagattcgagaacctggcgagggaacatcatcttgagcagtaacactctggactggaaggccattgagaagtagaacaccatttttgcgccttaaattgcctacttgctttagaaacaaaaaaggtggaaggtggagcatagatgcaagtgcaatttgtttcaaccagactgatcatctatccatgattagtgaatgatgctcagtgctgttatgacatgacaattgattttttgacgcatctgccctttatattatctttgcgggagttacgttgctacttgtgaataacatgactactttttggcctcgtgcacactataaccgatttttgatgtgaaacattgccataagttcatcaggct

SEQ ID NO: 26118 - DNA, 1750 bp, Oryza sativa
  ref <308>: DATABASE ACCESSION NUMBER: AK101560
  ref <309>: DATABASE ENTRY DATE: 2002-08-28
ggtcaccatctaacggacgaatcccccctcccagccgtttccgctcgtcgtctccacctacgcgagcgactcgctcgagctctctcgcctccccgctataacacgcgcctcccctttcccccccaccactcctctcccttttccctctccccccttcctcgcttcccccttcgcggcgcgcgcttgcgtggctggcttggcaggtatgggtgacctgggaggagcctggcatgaggcggccgcggcggaggaggaggaggcacaggcaccgggcggcggcgtcgggcccgagcccgaccacctggtggtcatggtccacgggatcgtcgggagtgcagctgattggaagtttggagctgagcaatttgaaaagttgctgtcagacaaagttatagttcatcgtagcaatcgcaacatgtacaagctaactttagatggcgttgatgtgatgggtgagcggttggcacaagagaaaggcagattgttgaagaaaccaacaaaagaccacagatcagaaagatctcttttgttgcacattctgttggaggattggttgcaagatatgctattggaagactctataggccacctaaacaaacatcccaaagttctcagaatctgaacaacactaataagggtactatacatgggcttgaggcagtgaacttcataactgttgcgtcaccgcatcttggttctagaggaaacaaacaggttcctttcctttttggatttactgcaatagaaacttttgccagctacatcattcatttgatattcggaaaaactggcaagcatctatttcttatggacaatgatgatgggaagcctccattgttgctacgcatggtggatgattgggggggcgtacagttcatgtatgttttcccccatcatttggatctatatgcttggatcatgaatcatttgactgttaagtttattaacttcttgttttaggtctgctctgaaagtattcaaacgaagagttgcatactccaatgttggtcatgatcgtatccttttcttttactactaaaagactaaatatacatttagtactaagtattgtttaaaatatcattccataacttgatgttgactaagatattgttgggtggagaacatcatccatcaggcgaaattctgagctaccgaagtggactgattcaggaagcaagatttacccacatattgtatatgaagaactatccaaagcagaaacaatgaatcaatgtactgatgttgccgatgtggacagctgcatgttagaagaacggcttttaagaggtctgaagcttgtgtcgtgggaaaaggtggatgtcagcttccacaacagcaaagtaagatctgcagcacatagtgtgattcaggtcaaagatcccgttatgcatagcgaaggtgccgatgtcataaaccatatgatcgaccatttcgtcctatagtaaaacagctccgatatctagaagcaagcttgagcgaggaacgtcagttgctaactgctgatttgccgagcctggtgagcaagtttatcgcaaaatccaggtttcggttgtgtgataaatggcactaaaaaggagaaactgataggcaagtacatatatacaggagaaatagaaaactcgctgcagatgcctcgtcattcattatgtattatgatcatgttcgttgttcgttgtaactggaatataaccggtatgtcattgtaaatgttcatcattgatttatttaaatcttgagtgttgacgcc

SEQ ID NO: 26119 - DNA, 1833 bp, Oryza sativa
  ref <308>: DATABASE ACCESSION NUMBER: AK101561
  ref <309>: DATABASE ENTRY DATE: 2002-08-28
gccaatggcagaggaaacgaaaattaacgcgatcaaccatcaccacctgatcgacatctcaccggagttgggtggcgcgaccgccatcgatggcccaaaggagatgaaggagttgggcatcgtcgatggcgcagtggagatgaaggaattgggcgtcgctgccgccgtccatggcgcaggggagatgaaggagttgggcggcacggcctccatcgatggcgccgcggacaagaaggagctgggcggcgcggtcgccggcgccggcggcgcagcggagacaaagtggctgcgcaagctgacgtcgtcgagcgtcaacaccgccgtgctgagagacctcatcgcgcggacgcccatgctgtggtacctcggcgagcgctccggcaccatcctccggccgcgctcccggcgcgccggcgtcgacgctctgcacgcggtgcgcgccgtggccatcggcccgttccaccgtcgtgaccactggctccccttccccgacgacgccaagctgccgttcctgcgctacctgcaggaccagtgcggcctcgacgtcgaacactacgtcgcggcgctcgccgacgagagcgaccgcctccgcgatgagttcgccgacgacgacgtcggggacgatgtcgccgcggagatacttggggacgaggagaagttcctgcagatggttcttcttgacagctgcttcatcctcgtggtcagcatgatgctcagcaaggtctgcaccgacggcgacaaggccagctgcgtgtcgcgggcggcgtccatcagccgggagtacttcatacttcacatggccgtgtcgcagcacgccgaggacatcaagctggacatgctggtgctcgagaaccaggtacccttcgccgccgtcaagctgcttgccgcctcgtgcagcaagctcaagctcctgcgccccgtcgaagagctcgtgctcggctgcttcgacgacatcttgccgaagcgagcgagccccgccgccggcgacaccgagccgttccagcacgtgctacacctctttcactggtcgcgcgtgccgacgagcaagtactgcatcctgtcgacgccacggaagcttctcaagatcaagaaggagtcggagcggctgttcccgagctccatggagctctgccggtcggcggtgtggttccggagcgcggcggcgagctgcggcgacctcgacatgtggttctggggccggacggcgagccccgtggcggtgatgaccatcccctgcctcgacgtgcacgagtacagcgccaccgtgctgcacaacatgatcgccttcgagaagcacttccactgggcgcacggcgcgtgcgtgacggctcacgtggcgaggatggagggcctcgtccggtgcccgcaggacgcggcgttcctccggcggcgaggcgtgctgtcgagcatgcgcaagacggacgcggagctggtggccttcttccgcgagctcggggaggagaccgtcggcgcgcgcctccccgacgagtacgcggagatggtggatgccgtggcgtgccaccggagcaggaaggtgagctggtggtgtggcggctttgtgcttcactttttcccgtcgccatgggtggtcgtgtcgctcgtggcggctgcggcggtcatcgttgtgccatcgctgctgcagacagtctatactattcttagctacgtgaaaactacctaggttatgccgaaataagtgtacaatttccaacctctatcccaaaaattatacgggattttgcccatgtaagggcacccgcaatggtaaagtaaggtgctctctataaaatatgtacatctcagcaatagattagattaatagtaaaccatctc

SEQ ID NO: 26120 - DNA, 2394 bp, Oryza sativa
  ref <308>: DATABASE ACCESSION NUMBER: AK101562
  ref <309>: DATABASE ENTRY DATE: 2002-08-28
ggccgatcccctcccctcccctctctgcgatcccctcgccttcccgctcctatcctctctcgcagaaaaaacatcccatccctaaaataacgccgtccgcgctcatcgctctccatcgcgtcgccattgtccccttcgtcagcctccccctcgccatccatccgccccccaggtcccctcaaccctaaccgcgctgcctcaaccggtcgccgccgccgcctcaccctgtgccctcgccagatcgattccgcgatgccctgcctccttgccttgctcgccttggagcatctcgcgctggatcccgcaggtcgcgcccctattcacggccaccgtggaccgatctgcgactgacgattgcgatttgtttttttttatgcgtcggactcgtgaattttgtacgggtgacccaatttcggtgtctgatgttattcccctttgcatcttttaggaaattttgtggaatgctaatgaccaccgcaatcagcaaggaggcaatcgcccagtgcttctttgtggattccttcctttaatctgaacaaaaaggactcagagctgctatgttgagttcatcagaggtatatgtatggcaaactccactctctatatttctctaatcattttctaggtaagctgtaagtaatctgctacgatgaagtcatgctcacaatgaacaatcattactatgtagttaggctcactaaaattgatggcttgcatctgcaatatttcaatccttatgctcatgcaaattaacctttttcagatcagtgcagtacaatccaacttttgattattgatacgtagtcttcagttttcaactgatcaatacaagaaccttaattgtaagtctcatcttttgtacttgactttgtgtatacattatatattgacaaggaacatggaaagtttcaaattgctgtcagatatatgtttcctaagtttgattatttgtttaatcttgcagctaataatcgccattgatctcagctaaacaccccttatataattgtttagcggctatttatctagaatgtaagaagaaaaaaaagggggccttgtttaatggcactaactgcacattggtaatatatcatactattaggtaaatatttactgatgtactttacactcctattatgcaaatgctaagttacaatatgtactttacactcctattatgcaaacgctctaggcatatatcttttttgaacacatatatttttcacaagaggtagtagttagcaggtgataaactgataacaagatagcagcaaggcatggattgagcgattaagcttcatttaagactgtacagcaccttcgccacacacaaccgtcgttcaagcaagcgtcgtcatcgtcttagagcgagcaagtgaacggtgggttcagggtcatcgctcagtgggttcagggtcagtgccgagacggctcgtgctgaccaacggtgtcgccgctgccgtcatcatcaccatcaccgacctcttctctcagagacataagaaatgtgtttataaatatagcgccgaggcggctcatgctaaccaacggcgtcgccgccgctgccatcatcaccgtgactgacctctcctctcaggtggggttcatgtaccttcttactcggtcggcagtaaaaatccatattattttactctccctgttcttgcctggaatcgcagcttggtttgtgatatgaagctttatctctgttaatttgtctcagtggcataagatgtgtatttatctcatgttcaattatgctaggggcctttgatctgtcactaacctgagtcatggcctatattttattgccacacatcaaatcgcactgggaatttatctgcaaatttgttttgctatattgatgtcatgagataggtactgccattaagtacttggcgtttatttcttttgttgatgggggataaaatatgcgttatttcttttgttgatgggggataattgatgtcataagattagttgatgatcttcaatacaataattgcttcagtataagactactgtcttctttgccttgagcagaattcctttgactatcctgttcaggtgatgtgagagcgttttgattcgtagagtatcttcattgctctgccagaagttatacttctgctcaacaaaagagtttggtaagatttgaacggttggttgtacagaacatgccagttgattgacgggatgtacccagtttggagcccatataacttgtgtatttcttatttgcaattaatcccaacatttaaaggtggtgttgaaatggtcatgtttggcgtttgaggttataaattagtggcgttgtattatgctttcatgctgctattgacaaatcaaattgatgtaggttatttcaaaactttgaatataaaatcgcattgt

SEQ ID NO: 26121 - DNA, 2264 bp, Oryza sativa
  ref <308>: DATABASE ACCESSION NUMBER: AK101563
  ref <309>: DATABASE ENTRY DATE: 2002-08-28
gcggccccgccgccctcggcgagatgtccttcgacgagcaccacctccgcatcgagaacgcccgcctccgcgaagagatcgataggatatcggcgatcgcggcgaagtacgtggggaagccaatggtgccgttcccggtgctgtcgaacccgatggcggcggcggcgtcgcgggcgccgctggacctccccgtggcgccgtacggcgtgccgggcgacatgttcggcggcggtggcgccggggagctgctgcgcggggtgcagtcggaggtcgacaagccgatgatcgtggagctcgccgtggcggcaatggaggagctggtccgcatggcgcagctggacgagccgctctggagcgtcgcgccgccgctcgacgccacggcggcggcgatggagacgctcagcgaggaggagtacgcgcgcatgttcccccgagggctcggccccaagcagtacgggctcaggtcggaggcgtcccgcgacagcgccgtcgtcatcatgacgcacgccaacctcgtcgagatcctcatggacgcgaatcagtacgcggcagtgttctcgaacatcgtgtcgagggccatcacgctggaggtgctgtccaccggcgtcgcggggaactacaacggtgcattgcaagtgatgtcagtggagtttcaggtgccatcgccactggtgccaacgagagagagctacttcgtgagatactgcaagcagaacgcagacgggacatgggccgtcgtcgacgtctcgctggacagcctccgccctagccccgtcctcaaatgtcgccgccgtccgtcaggctgcctcatccaagaaatgcccaatggctactccaaggtgacgtgggtggagcatgtggaggtggacgacaggtcggtgcacaacatctacaagctgctggtgaactccgggctggcgttcggcgcgcggcggtgggtcggcacgctggaccgccagtgcgagcgcctcgccagcgtcatggccagcaacatccccaccagcgacatcggcgtgattacgagctcggaggggaggaagagcatgctgaagctggcggagaggatggtggtgagcttctgcggcggcgtgacggcgtcggtggcgcatcagtggacgacgctgtccggcagcggcgccgaggacgtccgcgtcatgacgaggaagagcgtcgacgaccccgggaggccccccggcatcgtcctcaacgccgccacctccttctggctccccgtccctcccaagcgcgtcttcgacttcctccgcgacgaatcctctcgcagtgagtgggacatcctctccaatggcggtatcgttcaagaaatggcccacatcgccaatggccgggatcagggcaactgcgtctcacttcttcgcgtcaacagctcgaactcgaaccagagcaacatgctgatcctgcaggagagctgcacggacgcgtcggggtcgtacgtcatctacgcgccggtggacgtggttgcgatgaacgtcgtgctaaacggcggcgacccggactacgtcgcgctgctgccatcgggcttcgccatcctgcccgatgggccggcgcacgacggtggcgacggcgacggcggcgtcggcgtcggctccggcgggtcgctgctgacggtggcgttccagatactggtggactccgtcccgacggcgaagctctcgctggggtcggtggcgacggtgaacagcctcatcgcctgcacggtggagcgcatcaaggcggccgtctccggcgagagcaatccgcagtagcttcgtccttgaatcaaacaaaagcttcttgtgctttcaatttcaggagcagcaaaattttggagctttcatcagtgggaagtcaagaacgcacctcagactgtccttgccatgtggtgcccatatatagtttggattatttttcgctagtttttccgcaaattcgggaaatttcaaaaaaaatgtgtcaccactacgcaagggcggttggttcgggtattgacttcctcttcatgttcgcctctcggatgctgctaccttatgaatttagggttcttctggagtacaaaaaaaaccccttaatttgatctgtaatttctgttgttcagacttcccagtacctagctagctagtaggagttgcagaatagagatctgtgtccctgtcttatacttttagttcacttcagtgtttgatcagtgctgtttcaatccaaaattgtgtgtgctgtgcttgttattagttcttccttgctgcttcaatgaaggcgatgttaattcc

SEQ ID NO: 26122 - DNA, 1962 bp, Oryza sativa
  ref <308>: DATABASE ACCESSION NUMBER: AK101564
  ref <309>: DATABASE ENTRY DATE: 2002-08-28
gtctcctcccccaaatcccaatcgcgctccctcgcccgtcgcccgtcgccgcgccttcctctaccccgtaccaccgccgaaaccctagaccctcgtcgcatccgtcctcggcggctagatcggcgcacgcattcatctccggcccggctgacgcttcttccctggctcgattcgcgacccagttgggccgatttggatcagcagcggcccggccctcttcttagcccaattccaacaaacccccactcgccgccagcctcgtcggccgccagcggcggagctctcccccctccggatactctttcgagctttcttggtgaatacaatcttgtttctagtcatggcgaagcaggcctacgcgacgagcagcctcgtgataggatatgcactctgctcgagcttgctcgcgatcatcaacaagtatgccatcaccaagttcagctaccctggcctcctcactgccctgcagtacttgacatcagtggctggtgtctggaccctcggaaagctcggactcctctaccatgatcccttcaacctccagaccgcaaagaagtttgcgccggctgcacttgtgttctaccttgccatcttcaccaacacccatctcctgaagcatgccaatgtggataccttcatagtgttcagatcgttgaccccgcttttggtcgccatcgctgatactgccttcaggaagcagccatgtccttccaagctcacatttgtgtcccttgtcactattttgggaggcgctgttggttacgtgatgacagattcggggttcagcctcacagcctactcatgggcagtcgcttatctggtgactataacaactgagatggtgtacatcaagcacatggttacaaagttgggcctgaatacatggggtttcgtgctctacaacaatcttctctcgctgataattgctcctgtattttggtttttgactggagagcacttgtcagtcttcagagccattgaatcaaggggccagagttggtttgaacttgatgcctttgtggcagtttccttgtcctgtgtgtttgggctgctcattagcttctttggtttcgcagcaaggaaagcaatctccgccacggcttttacagtaacaggtgttgtcaacaagtttctcacagttgcaatcaatgttatgatctgggataagcatgcgagttcatttggtctggtttgcttgctcttcactctggctggcggggtactctatcagcaatcagttacattaaaagggaattcttcagtgcagcgtgaggctgtagctaagcaagggaaggctgataatgatacagctgagttagatgaggagaagcaaagcttggtatcatctccaaaggactctaatgtctgaaggctgaactacaatatttccagcatatatgcagttttgttcttttgtttggatatgcatcggatgcttcaagattatcataatcatatcccataggaaattcaagaggtagtattgttgttgtagcatggtacctgcactcacattacagttacacttttacttcaaaacttagatgtgttcatgttccctgttgttctctaaattactcatgtggtttttataggataacatgttttcttcatgaaagtgtcatacctttttctgtttttctaggtgttctattgcttatgggatagcttagtgctccctcatcaacatacagctgtaatggttaatcatttccatcttagaaaaatctcaagctaatagaagagtgagttaggtacttaggtttatggtattactttgaaaacgcaaacatgaatacaacattagcttgtcaatgataatgcaagaagacaccatctcctttctgacattgtatacctattggagtgatgatgcttttcggacaattttaattgttcagcactactttgtatggttatatactgtttcaaagttcaaatgccaatgatctagtgcttcgc

SEQ ID NO: 26123 - DNA, 1998 bp, Oryza sativa
  ref <308>: DATABASE ACCESSION NUMBER: AK101565
  ref <309>: DATABASE ENTRY DATE: 2002-08-28
ggcggggcgggttggcgaagcggagacggcacgcgcggagtccgtacggccgcagcgaggcgacgtggtggcgtcgagtcggcggcgatgataagggttgtgtctccgccgcctccgtccaccgtgcagctgcgcggcggcggcggcaccccggggccctcctcctcctccgcggtctgccgtttctggggttcccgaagaggaagtagagttgcggcggcgagtagttggggttgggggaggagtaggaggaggaggcgcgccgccatctcatgctgctctgctgaggaaggggaggggccccgggtcgccacgccgtcggctccgcaggcgccgtccgagggatcgatacagctctactcgcagatcgagagggtgatcacggaggcggcgaagcagtcccgggagggctggggttcgaccggagattggaccgagatcgagggagcgtgggtgctgaagcctaaatcacaggagccctcgttcgttgttcacttcgttggtgggatttttgttggagctgctcctcagatcacttatcgtttcttccttgaacgacttgcagacaagggagctttggtgatcgcaacgccatatgctagcggctttgatcatttcttcatcgcagatgaagttcaatttaagtttgacaggtgcttaagaaacatggttgaacctgtaaatgaccttcccacatttggtgttgggcattctttgggatctgtgatccaccttctcattggatcaagatacgctgtgcagcgaagtggaaatatattgatggcctttaacaataaggaagcaagcttggcagttccattattttcgcctgtaattgttcccatggcacagagttttgggccaatattttcccagttgacatcatatccaacacttcgttttggggcggaagcagccattaagcaacttgagaatcttagccctcctgttgttaagcagctcctgccattagttcagcaacttcctccactgtatatggatttagtaaaaggccgagaagaattcgttccaaagccagaagagacacgtcggctggtaaaatcctactatgggatttctcgaaacctcttgataaagttcaaagatgatcaaattgatgaaacatctattcttgcgcaagtactaagctccgaatctgccattagctcactgcttgacatgtcaattcggtcacttcctggagatcatggactaccgttacagcaggtacttcctgatgttccaccagcaatggccgatgcagtaaacagaggaggtgaactcctgacaaatctagcaacagggacaccatgggaggctgttgctaaggaggtaggtagcactttaggtgcggattcgggcgttctacgagcacaaatctcaaaggatgtcaatacacttgttgacgtaattgtttcatggattgagtcaaattctggtccaagattacttcgttcatgatgacacccccacaaaggtttagcaggttgggaatgccagtaccaaacgtcaagaggattcaactgacgagtattgcaaactgtagattgcatttcaaccccgacatgctagtggtgtatatatatgctgtacatcgtagcgcatgacttgttgaatgtaatctatcttgatggagtattatgaatgtacatttccattaaaaaaatgtacatttggaaggactagaatagagcgatgagtttatgggtttgtggctgctctgatcctgacaggcactgggggtgcacagtactgcacagtcctgtccgcaaatctacagttcagttttacaagaaatgttcatttggtagcaacggaaggtctatagttctccgaggaaactggccgaggtatgcacccgtgcttatcattcttcgtaaaactgtaattatttgttaaaactatccttttacttcagatgggtatttcataagactgctgcaacaacaacagcaacaacagttgattttatcacatatgggctcgacttaccctgat

SEQ ID NO: 26124 - DNA, 1901 bp, Oryza sativa
  ref <308>: DATABASE ACCESSION NUMBER: AK101566
  ref <309>: DATABASE ENTRY DATE: 2002-08-28
gaggagtgcggatcatttttcggccctacgcgcggcctccctcccgggacgaatgaacgcgctcgccaacgcccggcgatcgaagcggcggcggttcgatggattataaaactagtatatctctcgcttctctctatcattctccgttgccacgctaatcgctcagcgcggcaactgttcgacggaatgccgccccggattaggagggcgccggcgaggcgagcggcgccggaggaagtgcccgaccgcgtcagcgctctgccggacgaggcgctccacgccgtgctatcgctgctcccggcgcacgacgcggtgcggacgtgcgtgctcgcccggcgctggcgccacctctgggagcacgcgccggcgctccgcgtcaccgacgtcgaggggtggaatccgcggctgcggggcgacggcctcggcaggttcatccgcttcgtggacggcctcttcgtcagccgccgccgccgcgacgcgcctctggagctgtgcgacctggacttcgatttcccggaggacaaggggaaggattggcatgtcaaccgctggatcatgctagccctgttgcgccaccatgcccgggtgctacggatctctttgcccgcgtacatcacgctgcctgatgtgcctctcatctctcagcgcctcaccaggttagagcttgatggtgttcttggcaacgataacattcttgatttctcctgctgcccggcgctgattgctctgaagatgaagtgctgccgtatcaatgccgagaagatgtcatctccatccgttaaaatcttgagccttgcctcctgtgaattttatccagctacccgtactcagatgtcttttccaagtgttgtttcattggagctagatggatgttctggtagcgttcctttccttgaaagcatgccatccttggtagctgcaattgttatatttgatgacgattatgcagacagatgtgacaatagtgtccttggtgactgtggcgacgattcttgcgttgattgctgcaattattctgaccgcagcaaatgcgtttgtctcaatggtttattggaagctacacacttggagttgtcagctgaacctgcaatgtatgttttcaggagggatttaaatttgctcttggcatgtcatacatttgccaagttgaagactttggcacttggtgaatggtgcatgactcatgacctcagtgcattgattcggtttctacagcaatcaccaattttggagaagcttactattaaaatcccagaggaacccaaatgttctatggatgcaggacaacaaaagataccagaagagccgtttgtatccaaccatcttaagattgttgaaattaaatgcaaaggcaaagaggtcatgtgggtttgcaaattcttgaagaccctgggtacctttggcatacccctcgagaaaattaacatcaaactgactagtgaacactgtcgatctgaatgttttaattttgtctgtactggtttcagctgctcctagagccttctggatcaagaggaggtcggaagaattgggccgttggtggatgagatatctcttgagatattattcagacgtatccgtggtgttgcagtcctcttattatattgattaagtagtctcatcggatttggttccatatttactatattagcgatattagaagtactcttacatatttggctaaagtgtagccttgcagtatgagtcatagctctactgcttatgatgctaaagaactcgtatcggtaccatatctagttctgtatgtacgacattataagtagccttatatattatgctagtatagccttgcaggatgagtggtatagctctgttgcgtatgatgctaaagaactcgccttctaaatctgatgcaatttagatataaattcggttgctgc

SEQ ID NO: 26125 - DNA, 3056 bp, Oryza sativa
  ref <308>: DATABASE ACCESSION NUMBER: AK101567
  ref <309>: DATABASE ENTRY DATE: 2002-08-28
ggattttgcgggcctcccggcttccttctcctgctcctgccacccagaccgtcccagcccttgccatgggcgactagggtttccttccaccccccctccttctccccaccccccgcgggacccgctctcccctcctccccccctgccgccgccgccgcccccgccctccccgagccggcagggacggcgccggcccagatccgggcgccgccggacccgcccccagatccagtcgccgccccgccggaggaacgctgccgcggccaccacgacctgggttcgcttcagttgagtagagatggattacatatcccctgatagaagtctggaaggggcttgtggagatcccggacctttatttggagatcatgatgggagcttgttagagcacatgggttttcacggggatccacaacatgtatctccacagctaaatgaagggcttttagttgattcaactgaccaaatttcatatttggctgctgattctccgtccttcatgaatgatcaaatcccatgcaatacaatgaagtctgcctcaactagtccagcatctcccctgaagcaagcagatgaccatcatgtgcatatagattctgatatggaaaatgatgcagctgaacaaaatcttcacgatagttactctgaagcacagactacttctctgggttacggcatacatcggagaacagaagtggctgatgctgcgcagcccacagagcttcatgaaagtaatggtaataatgatacatcgaactttcaagaagaaaccacacaatctgacacctatcttggcgatgctatgctaaatgaaaatggcagtagggattaccaacttaacaatagtggtgctgatgatgatgaaattccaaactctccagcgcttgagatggaagatgtcgacaccagagcgttacatgagacttctcacgatgaaaagtatgaggcagaggatgatcaaatgaatggtaggaattccagtccttgtgatgaacatgatgaggacaactgcaactctgtgattgagccatcttatttagatgtgatggagcatgaaaatcctggtaccaaaaatggcatgttgacaccaagcaatcaatgggattctcctcctgaaagttctgcaagattggaaaaagggacaccatcaccagacaggatggtctcacttccagttggaaggtctcctcgtactcattcacctaaggaactggattcaccacgtcctgaaaatgaggttggtaaattagccacttctcaaaactcacctgttagacgtcggtcccggtctcctggaaagcatgagactaaccgcagaagggcttcttcacgtgagttatctccgcatggtcgacagaactctccatctcctccagaaaagaaagcacgaagggagcatcgacatggagatgggtcaccgcgacgaagatctgtgtctcctagaagaagggctttgcccaagaggagagactcaccaaggagagactctccatcaaggagaagggactcaccaaggagggactccccatcaaggagaagggactcaccaaggagggactccccatcaaggagaagagactcaccaaggaaggactccccattaaggagaagggactcaccaaggagggactccccatcaaggagaagagactcaccaaggaaggactctccatcaaggagaagggactcaccaaggagggactccccatcaaggagaagggactcaccaaggagggactccccattaaggagaagggactcaccaaggagggcatccccatcaaggagaagagattcaccaaggagggactccccatcaaggagaagggactcaccaaggaggtcctccccatcaaggagaagggactcaccaagaagggactccccatcaaggaggagggactccccacgaaggaggcacaggtcaaaatcaaggtcaccttcgaggaaaactgatggctctagacatagaagggaacatggtagatctcggtcaaggtctcctcactcaaggagtcaccataggcgatctccaagaaggcattcaccacggcgcagatcatctccttccagtcatcgtcatcattcacctagaaggccgtggtcaccacctgccaacaggaagactggattgggtaagcctggacggaatctgtttgttgcaggtttagttatgccaccactgagcgagatttggaaaagaaattctctaagtatgggcgtgtgacaagtgcacgtgttgttcgggataaaagatctggggattctcgaggctttggtttcttatctttggagaaggatgaggatgctgatgcagcgattcgtgcttgtgatgagactgagtggaacggtaggatcattcttgtggagaagtcaaaggcacctacatggtgaatcttacaccttggagatcagcacaccatgagccgacaacattgcttcagcttgcacagcttttattgcaccaaagatttcctattgactataacataaattatcattaaatatggcaaactcaccagctattgatggtatattaggagtaagagtcataatgcacttcctatggctaccttgctgacaattacaacgaataagatgttatgtcacaccttagcttgtttcagggccctgctgctgataagagggaattaataccttttaatgtctgcaacctctgcgcacaagatgttatgccctgccagatatgcacgaggcgttcatcctcttcctcatggtcaccagctgacctggccaagtggttaagctccactgcattaaggggcatgaatggaattcagatctgtgaggctctgatactaaaccgtctagttgaccttccaataatttatagcaatgtaggttccaatcatcatgtttatatttgcacctttgcgaggtaaaagatggcatctttctttcttcactgtagtttgtggttttggattctagttactccgtgcttgataatggatatagccaacttgtattttctttttgctcgttatgttatcctgtatgttaccttccattaaattcaaaactatctatgctcg

SEQ ID NO: 26126 - DNA, 1688 bp, Oryza sativa
  ref <308>: DATABASE ACCESSION NUMBER: AK101568
  ref <309>: DATABASE ENTRY DATE: 2002-08-28
ggttttctctcactcaatctcccagcaacgaatagcaacctaggttcccatcgcaactgaccgatccccagccgccgccgccgccgccgccgccgctcaaggaagcgcatcagatggcatcgccgtcgctcagggacgccgtgggcggcctcgaccgcgaccccttcgtctccctcctcgggaagctcatcggcgagtcccgccgcctgcagaacgacccgccggccctcgtcccgcaggaggacctcgtggcgcagcacgtggtcgacgcgctcctcccggtgtccatggagaccgggggcggcccgctcgtcgtgcggaaggtgagctacgccgagggccggagcaacgtcatcgtcgagtaccccggcaccgtccccggccgcgccatctccttcgtcggcatgcacatggacgtcgtccccgccaaccccgacgaatgggatttcgatcccttctcactaacgtttgacagtgaagacaaggacaaacttaggggccgtgggacaaccgactgccttggccatgtggcgctggttgctcagctcatgaggagacttggtgaggtcaagccggtgctgaaacattcggtcattgcggtgttcattgccaatgaggaaaactcacttatcactggcattggtgtcgatggccttgtgaaggatgggttgctggataagctcaagaatggacccttgttttggatagatacggccgataagcagccttgcatcggcaccggtggagtgattacatggcatctgaaggcaattgggaagctattccacagtggcctcgcacataaggccataaatgccatggagttaaatatggaagcactgaaagaaatacagactatgttttacaacgatttccctccacatgagaaagagaagctctataagtttgctaccccatctacgatcaaaccaacaaaatggagctatcctggtgggggtctgaatcaaattcctggagaatgtacaatttcaggggatataaggttgactcctttctacagcacgacatctgtagtgaagaaattacaagagtatgtacatgatataaatgagaacattgaaaagcttcctactcgtggtccggtatctaaatatgttcttcctgatgaaaacctccgaggaaggcttgagatcactattgatgaagatattatgaatggggtggcctgtaatctcgagtcgcgaggctttcaagcattatgcaaagcaactgaggaaattgtcggccacgtggaaccatattccattactgggagtctgcccctgattagggaattacaggatgaagggtttgatgttcagactgctgggtatggcttactcaagacataccacgcaaagaacgagtactgtctattttcagatatggcccaaggctttcaagtatttctgagcatcatttcacagttggaagcagatgtttgagtcttgttttagggaggaaaaaaatgagcgttcactggtacttattcctgttacttgttgctctaataaaggcactcacagtgcaagctacccaaaatgaggaacctcaggctaaggccacacctcctctcccacggtgcaaagatgctttagggtgttcttagtttttcatgtaaacccttgtcatcttctattctagtcctcacatgttttcaaacaacataacatacaaaatttaccact

SEQ ID NO: 26127 - DNA, 1836 bp, Oryza sativa
  ref <308>: DATABASE ACCESSION NUMBER: AK101569
  ref <309>: DATABASE ENTRY DATE: 2002-08-28
gtgcaacaaaattcagaagtcaaaaaaatcccaaaaacaaaaaataataaaaaaaaagaaagagagagacatttcgcatctgctgccctgcctcctctcccatcacctgcccattttttcacattgaggcccctctgaaaatattatatttacaactaggtccctggccgggccggccggccaccggaaggagcacctcgccggagaaggctttgtctcttctttttcttctcctcctcctcctccatcggcggcggcatggggttctcgctgtaccccatgaagacgtcgacgcgcatgctgtggagcaccagcttcttccgccataaggtcgcctcctccttctaagcccacgccctctcgggcggcggcggcgagccggcggcggagcgcgcggttggtaggtgcgcgtgcgtgcgtgaacgggagagcagcttcgagatcgggttttcttgggttcttggagaagggaggagaagagggggaggagagcatggatcccggccgcgtcgtgttcgactccggcgtggcgcggcgggcgtgccccggcggcgcgcagatgcttctcttcggcggcggcggcagcgccaacagcggcggcttcttccgaggcgtgccggcggcggtgctggggatggatgaatcgcggtcgtcgtcgtcggcggcgggggcgggggcgaagcggccgttcttcacgacgcacgaggagctcctggaggaggagtactacgacgagcaggcgccggagaagaagcggcggctgacggcggagcaggtgcagatgctggagcggagcttcgaggaggagaacaagctggagccggagcggaagacggagctcgcccgccgcctcggcatggccccccggcaggtcgccgtctggttccagaaccgccgcgcccgctggaagaccaagcagctcgagcacgacttcgaccgcctcaaggccgcgtacgacgccctcgccgccgaccaccatgccctcctctccgacaacgaccgcctccgcgcgcaggtaatctcattaaccgagaagctgcaagacaaggagacgtcgccgtcgtcggcgaccatcaccaccgcggcgcaggaggtcgaccagccggacgaacacacggaggccgcgtcaaccaccggcttcgccaccgtcgacggcgcattggcggcgccaccgcccggccaccagcagccgccgcataaagatgatcttgtgagcagcggcggcaccaacgacgacggcgatggcggcgcggccgtggtggtcttcgacgtcaccgagggcgccaacgaccgcctcagctgcgagtcggcgtacttcgccgacgccgcggaggcgtacgagcgcgactgcgccgggcactacgccctctcgtcggaggaggaggactgcggcgcggtcagcgacgagggctgcagcttcgacctccccgacgccgccgccgccgccgccgccatgttcggcgccgccggagttgtgcaccacgacgccgcggacgacgaggaggcgcagctcggcagctggaccgcctggttctggagctgatcgatggaagcatggagcattggagccatgctatcaatgaatgaatgaatcaaatgaccttgagaccctcctctccgtcctttcttttgccctatttttaatcgctgttatatgttaattatgtgcaattaaagtgtacgtgttttgtcgtaagttgtgtttgttcaaattgtatgttttgaaggtgtcatgtattcatacacgatatgatatatagacgggatcatgaatgatactcggaaagattggaataattccatgtagtgttgagcaataataaacattttcctccg

SEQ ID NO: 26128 - DNA, 3738 bp, Oryza sativa
  ref <308>: DATABASE ACCESSION NUMBER: AK101570
  ref <309>: DATABASE ENTRY DATE: 2002-08-28
gagcagatgcagcagctcgcacgcccttgtggtccggtcgcggccgcgcgcggcgcaagggcggcgtccggagaccacccgatccgcagcttcaccgcccaaaaccgatgctccgcccgcctccacgtccgccactcgacaggtaagtcccgtagtagaggatggggaaaagtggctacttcgcgctaccgcttctgttcttccaactgaacaatctatattgccaagtgttttgggtgataatcgtccgatctgggaaatgctactagtagtacatgatctattattgttcattttattgcacacagccaccgtgtggacgtactgtatattagttgctgcgtcagtcaaggttgctgtagacgtagacaagtagtattgggcattttctttccaagatatcgagggattgtagtacttattatcttgttaaaatgttggtttggttcatccatgtgtttgggatggacaatttctcctctctgtcctattacacgattgagcccagaactgctttggacattcaatttgtggtggtgttgcgtctattagttatgtagcacagaagctggtcttaaatctgcccgtagaaataagtgaaataggtgaaaatttaatacatgtaaaacaagtaattataaaattatctctcaatatcagcattacacttttcactgaaagaggcatgtctatgaacatgtcaccgacattcccttgttctggggcacactttccagccttccagttattgctggagtttttacaacagatatagcatgattattgtgtaaatattactagttacagtagtagttagctattgcacaaatattacttcttctatatctggaccctcttcttgcatagactttaataacttattagtgatgaagttctggttgaatgtggttcctcacttcctcctgttggtgtgctactgacttcatcaactgatacaagtttctgcaccacacattccatggtaggtcttctgactctatcttcttcaaggcatgaaacagccaattccatcatcattcttgcttgtgcgctgttgaattggccattcaatcgggtgtcaatgaagtcggcaatccaaaactgatcgtcgccatctgacttaagttgctctgagcatagcctgattacccttcccagggccattttcacgtcctcatcatcattcttttccaattctgaaacacgagctcccttcagcaattcgaggagcacgactccgaagctgtacacatctacattcgctgttattggcagactgtaaacccattcaggtgccaaataacctcttgttcctcggatccgtgatatgtctatgttagatccatctctgttcaggagctttgcaaggccaaagtcggcgatcttcggctccatattctcgcccaacaatatattttcaggtttcatgtcgcagtggatgacccactcagaacattcatgatgaagatatgccaatccttttgccaccccaagagcaatattgaatctttgtgtccatccaagtaagttctgtgagcccccactgccaaacaagattttgtccaacgaaccattctccacaaattctgaaaccaatatcctgtgtggaccgtcagaacagaatccccaaaccctcactagatttgtatggtaaatcctgctaatcacactcaattcatgctggaattcttcttcaccttcgtttacgtctaccaactttttcacggccactaccctattgtctttcaagactcccttgtatacgacgcctgatgctccccttccaagctcatccttaaattttctagtggccaacaccaactctctgtaggtgtacctgcgaaaatggttagctatcatttcatatccggcctcagctggccatactcctctgagttgtttggcctccctcctcaaaataaaccatcctaataaaacaaataatacctccgccagaaatatcgctgataagaacccgtagaaatacaaaaactttgatatgctctgcccactattaagtgtatccaaaaaatctgctatgggaatgttgtttgttgtattacagttagggccatatttaggaccaagaggctgtgaatggggaaatgaggaccttgacacatttactccctcaggaagcttgagatacatggtaccagtgctgccaaagttacttagtgttacaccaccaagaagaacagactttggatagcaatcaccagttccttcccagtaggcgaaacccttacacctgcagtctttcaagcatatgttcttgcagaatccaagaggaacaaaacgataaacactcagatcataccccaagaaatcagtattgcggagtgcaacaaatttcaccttctgtccatcacaactgaggttgacctttgggctgcaacctttgctccggtcacttgggtcgatgatctcgtaaccaggggcacaagcacaggcaggaacaggtgtatacacacatattccattctgaccgcacaaaccgcgtactttgcagagctgaggaaatgccatccatgtcactgaccatgttctgtctaccttatcaagactgtacagcctgagattgccatcataatccagtgttagtctcctcactgtgccaggaccccaatcagcagctatgaatgttgcattatcacttccaaggaaatgtccccagctgtcaagaaccccatttgtggtgctgttgaatggacttcttagctttgcccaaatagtcatactagggtttggccagtagataaaagatatgttcttctcatcatcaaacagtgaaagtaagtactgatcatcgaaacggaaactgtaatggccaggaacaagtaacctatttgtagacacaagctttgtagcagcagtgatgctctgagtgggtaacaatgtatcagtaggagaatcaaagctttgccacagagtgttaccactttcgcccttcacaacgaggttcccggtgtccaagagctgagcttgagcatactgggtatctgaagagctaacgttgttagcccacacaatctggccagcataatctttcaaaaacatgccaccatcgaatttcaactcaactttggatccccaggtgtacacagggtggagaggatttgcgctccagacgacggggttttcggtcaagttggagaaccagatagagaaggtggaggcattgggggagattttgtagaagccacaggtgaaagtgccatccggtgaatggagcacatcctgtacagacagggaggagcctggcttgaggaaatcttgagctgagatgcacaaaagtgggtggatcagagtgaagaggagcagagaggcagagcttgcaaccatttttggtggagctgcagctttggagttgatctttcaagagttattaagaagccactggctagtggccgctaatggagtgagcatcttggaactgcaggtttgaactttagtggaagacaggggcgaagctatagccatctatcggggtccactgaccccgacgatttcttgtgtacgtttcttactccacttaattttaccgtgtatgaccccggtcgataaaaacactagaccccggtaaccatgatttgttatagcctgattaattagcaacttgaaacgacacgtttgagattagcaagcaacaaataggaattagctagcgctaatgattatacgtcagcccaaaggcccaatatacattttggtaatcttagcagtgagtatttgtgc

SEQ ID NO: 26129 - DNA, 1706 bp, Oryza sativa
  ref <308>: DATABASE ACCESSION NUMBER: AK101571
  ref <309>: DATABASE ENTRY DATE: 2002-08-28
gcgggtttggatttcctctcgcctccgccgctcccgaattccccaccgcgccaccgcctcggccccatcacctcgtcgccggccggcttcaacgccacgatccacctcccctgctcccggatcccccgccgtcacgcccggggtctctcctcctgattcggcaccacgatccacctccgggattgccgccgcgccacctcctccggctccatcagctcgtcacgaccggcgtctctccctcctgcttgcttcgacgacgccacgatccgcatccccatccgcgatcgccgcctcctggacccgggtcttcaccgcctctcgacttcgtctcccagtacgcatatgcagctgccatgccgactgctacaggtggggaagcgccggcttcggcgcaggagtgcacttccgtgggtttgggggctagattggtccgccttgatggcaacgccattaccacagtggccgaccttcagttgtccggtccaattccttctccacctccccaagacattgatacagccaccatcatctgtggagaggatatcaggccgggtacctacctggttattcatgcaggagttgatatccttgacattgccagactcactttccttgaggaactaccggtggctgccaggaaagggtatcccacggaagcggaagaggagaaggacgccaaagctgtggcactggcaggcaggaaggggactcccactgaaatgggagaggaggagaaaggggtggtggcaacgccccatcaagagaaaaacatggagaaactggaagaaaagaataaagaagctgagaggttgggaatggaggaaagagaggaagaagaggggaacgaaagattgcgggaggaaaaaccatggcacaaccaactgtggggcgaaacagtgcgggaagagaagaattggcacaatcaattgtggggtgaatcagttgaggaggaagaccattggcacaatcaattgtggggcaaaacagtgcgggaaggaaagcattggcacaatcaattgtggggcaaatcactgcaggaggaagagcattggcacagtcaattgcggggcaaatcactgcgggaggaagagcattggcacagtcaattgcggggctgatcactgcaggaggaagagcattggcacagtcaattgcggggcagatcactgcgggaggaagagcattggcacagtcaattgcggggcaaatcactgcgggaggaagagcattggcacagtcaattgcggggctgatcactgcaggaggaagagcattggcacagtcaattgcggggcagatcactgcgggaggaagagcattggcacagtcaattgcggggcaaatcactgcgggaggaagagcattggcacaatcaattgtggggtgaaagattgccaaagaaaaaacattgccaccaccaattgtctttgagactgtggcctggattttctcgtgcggttcttgttttacactgttaagtttaccccctataagtttttcttaaggaaagctgtagaagtttctgccgttaatatattaggaagaagatagcaaagggaccaggcagttagaaaaacaattaagttcttgtttcttgtctgagaagatactgcaatacatgtaggtgtgtgtaggagttggatgtaggtctttcttctttgggtgcttttgctttgaggtgaaaggacttaagagttttcatctgc

SEQ ID NO: 26130 - DNA, 2205 bp, Oryza sativa
  ref <308>: DATABASE ACCESSION NUMBER: AK101572
  ref <309>: DATABASE ENTRY DATE: 2002-08-28
gggtcattatccccccaagcgattcccgccaattccccaattccccaattcttctcctccccccaattccccaaaccctagcgaggcgcgagggctctagaatcttctggaaacgggagaaggagctctcgccaagcaccaccatcatggcggccgccgccgcggacccggccctgctcgacctgattccccagatccacgccctcttcgccgatccgctccgtgtgatttcatacaaatggctcagcaggaacttctcagtatcatccaatgattcaaagaggttgcttcaggagttcgtcaacaaacatggggctgatcttaaagtgatttacagtgtgtctggatggttaaagaagaaccccacaaattattgtgtaaaactcacttcaggccataaacttgaagaagcaaggcaagaatttaaagattcttgttcagttcaagtgtacagtatccaggcttgtattccaaaagatactgctgtactttggaatcctgaatttgtacaggcagaggagctttttaaccggccatttgatgaagaaaattgtttgagagataataggttttgtggtgttttgaattcttttgtcaagcgaactgctaatgggaagcttgtgagttcatttccgccaaagcctataaatagtgttgctgcagctgcaccgttgaaaactagtagtgctccaaaagaacaatctgctaagggtcaacagcaaggtctacctggatcatccagtccaaagaaaggaacaagtaataaggctgagaaggatatttcctcggtcttggataaagccaccaatgctcctgttgtcaaagaaccatcaattgctctgcagggaaacaaaaacaaggctcagaatgggaaggcgctgcccagtaatggtggatcacttgctacgatgtggggacgtgcatcagctaaacccaagactccagctaccactaatcctacagttttaccaagtgttgctgttacagctgatgcacaaatatgtgcaaaggaagaagcaaatgctgatagtagtgatgatgaacaagctgtacactacaagcgtggctctagtgcaaataacagaaagagaagagcagtctttgatctttcagatgatgatgaagatgacaatgttgtagccattgcatctcctgagccaccggaacagtgcattacaaatcctattgatgaggttgctcaagaaagtaaccccaaacaagaaaacttggaaaataaacaagaggttgagaaggatgtgaaatgttgcataggaaggacagagtctcctgagtgtaaaaccaaaagtagcaacactgtcagccattctgggatcaccttaaaagaaaagaacaatggtccaccacctaatgacaataagcaggatcatgctgctgagactgcttccaactcacctaaaagaaggaaagttttgaagacacgaatagatgagcggggaagagaagtaaccgaggttgtctgggagggtgaagcttctgcaggtgataaggctgagaagaatgtgagcgatactggtgctgcaaacagggcaactctctcaagcaagccgcagccagtagcaaagaccgaaaaaagcaatgcttcgagtaaaacagccggcaacaagaaacctgccaaggccggaaccaagcaaggcaacattatgtcattcttcaagaaggtataagccttctcgcttatctgacagagttattcaggaaggagtatctgttgttgccctggctaaagctaccgtgccaagctcccaggcaactgtagtattaattgattcaagtaaacagaccagcatgtttcagaattcagaagctcacttgctgtacatatcctgtgtgattttgtactggtactactacccatttttcagaattctgtatgaattctgaagatgctgctggatgagtatggcaacgacatggcttgtgaagtttgtactgtaggctgtatgcatccaggcacccgtgcggccgtgcctttgtcacttcgccgtgtggtcagattcaggtatgggcattgtagcctagtacgtgtacacgtgtactagttcatgggatgctttgcttgttttccctgacacatgcactgtacatcacctgtcagctgcatggtccatcatccatgacataccaggtcaacctcatgtagaaagttaaaaacaaacagtcatctgttaataacttttgcatcct

SEQ ID NO: 26131 - DNA, 1795 bp, Oryza sativa
  ref <308>: DATABASE ACCESSION NUMBER: AK101573
  ref <309>: DATABASE ENTRY DATE: 2002-08-28
ggcgagtaattcctccccacgggcggcgactagggcggctagggttcgtcgggcgccgccgtgccggagatcgcctctcgccgccgacacccggatctccgccgccgccggtcgccccaggttatcccgctcccgcagtcaccatcccgtcttctccgccagtcgcctcacgcccggcctggacgccccggaatccattgtcggtctcgccccgccgactgccgttgacgccactggctgaagtagggatactttaagaggcttttgggaacaggaacagtctgagttaagaaatgtcttctgggaaggggaagcggaagatggaagaaaagggagtgcctctgcagggagatctagaccctgataatgatcccatgaaatatgctttgtctgctcccagggtacagattattcccgggctgtggcgccgaattgtcagacgacggagaagcaagaatgatgccaagccctgggcatgtccctgtggatatgtaaataaacctatccagcatctgctttttgatctccctcgatttaagtgtggaagtagagaatgcaaggaaatgatcccggatgactatgaatttaagttctcacttgttgagaagcgaacggtgtttgtcttctcaataaagtgaaagaccaagattccagaccacactgcatggcatatgcctctgcagtgaatgctgatataacaagtaaggtcacaagcgtacttttaggagaagcaattcgtgatgcaaaatctgaaatatgcatgagaaactttcttgcaaaaattgaagctaaagaagcaattgccaaggagtttggatatgaatacacatgatgatcttggcataaaagatttgtggaaaattatttcgatcttagagaaagatggagttgagacagtggatggttcacacaaagccaggatatcagggattactcatgttccactggatttcccagtgatatgcaaagagattgcggaaggacacccactattggccatcataagaacaggaaaaggatttgatgacttgcaatataatcagatttataaaccaccaaaagtatcgagaattgtggatggtaaatctgcggggcttcattgtattacacttgttggaggtgccatgcgcaaaggtagaaaaatgcattataagtttgtcaatacatatggggaggatttctgcaaactcagaagcttaaacagagatgatggaataaagggtggataggaaatgtcattgctgaagggatactaaggaaacctgtcaagtttctccgggagggacgagaggttttgaagcagtagaagtaaggcctgttccaggatgtaattactcacccagccacaaagggaagtagggggcagttctggtgttcgatgttccagcaaccaaatcacgatggatgtatggttaacctgctatgacagccatgaactcgttaattggtgtatgtagctagcacttctcattatcttttttgcctactcttcttcttgggcatgcattgtccctatgattacctgtgattcgtctctgcggatggcgcattgagatttcaaatctcgggacgtacaacagatctagtaatagtttgtttgctgtgctggttcgttaaacatatactggagctcccagaatcactggacataccaggcttcatttagagtgtgtagtctccaactgtaatactttcctgtggttagtgttgtttctctacatgatgatagcctgaacaaggatacattcctcagttccatgggtgggtggatggtcgacacgttttccatctcggc

SEQ ID NO: 26132 - DNA, 1708 bp, Oryza sativa
  ref <308>: DATABASE ACCESSION NUMBER: AK101574
  ref <309>: DATABASE ENTRY DATE: 2002-08-28
gagtccgtggaccatggccgccgcttcccctccgcaacggcgcagaatcgtttctgcagctgctggagctccgcgaggcgatctcgggagagatcgctcccgtgccctcggcactccgccactcccgtctcctcgcgatttcgcccgcccgctgcccgcgccaatctccatcccgcgagcagctgcggcggcggcggcggcggcgacctgtctcccttccgccgcatcctcgccggtgagcgacccatacggaaatcctctctcgcgtcccctctatacccgcaccttctctctttgccttaggcccttaacattagcttctcttctagatctggaagcatgctttactctttaccatatatttgctgtttttcttattatttttttgaaattgaagagcacagctcttccccttccgttaaaggaagcgagcatgttcagctacagaggaaaaaaaaacgaaaaatggaagggaagcaacatcagatcacaaaacaaatagtgccatcccaccattctgtatgatctccacaagacaacaacaacatataacaactaacaaattaccttaaaattagtagtgggggcagtttgtttccagaagaaattcagaattagatacgagtttttagaactggaatgggaacccacctggtataaatcggtctgatatgtaactgtaacatcatattttagaattagatatgagtgtttaccttttacaaccgggatgggaacccacctcgtataaattggtctgatatgtaaccgtaacatcatattttagaacttcagggtctagttgactgttgatgaacttctttggtcgacctagaataaagttggattgggcattgtgacagaaaaggttatttcgtaatgtgtgtccttaacatctcatacaattctaggtatgtagtatcttatttcttgtgggaaatttgagacctctaattcaattaaacctgaacatgacttttatttttctcaacagatttctaaattaaattgattgacaatgtacagtaaatacaaatgtatagaacaaacacagtctttctgctctctcagtatctcctttatttttaagtttgatgtcgtacacctccaattgccccatgttgtttccttgtttttcagaacaacacggtgaactagtaatctagcatcacccatgcccttaagcagcaatatttctactcagaaaacccactatgaagttctttctgtgaatgaaggtgctacatatgatgaggtccgagctggatacagggctgctatcctaaacgcgcatcctgacaagtctcaggcaaaactggattcacttgtgtcatctgttgagcatggggaattcttcagcgtgcagaaagcttgggaggtcctacgtgatcccaaatccagaacagagtatgacaagcagctgcaaacatcaaggcagaactctgcaaacattgcttatgaaatcgagatcgaggaaatgactgttgaaagcactggtgatgctatggagttgatgtatccatgtagatgtggagatcatttttcgatcttgtcatctgaccttgcggagatgggcattctggtcgacgatgatggggaaatatattttcagtcatctgactgtgtatcagcttctgttgttttgagctgtggttcttgttcacttaaaacacggctggttataaatagaacttcttgacagttgtgt

SEQ ID NO: 26133 - DNA, 1695 bp, Oryza sativa
  ref <308>: DATABASE ACCESSION NUMBER: AK101575
  ref <309>: DATABASE ENTRY DATE: 2002-08-28
gacgtactatgctagactagacaacacccaaaggcaaagagagggagggaatcatctgctcacaccaaccgaactcgcaacctaaacacctccctcttcgattcacttcatcttcctcttctcttctcgtctcttgtagtagtatatatttataaagcccccaaacaaaagagaagacaactgaattagttcgatcgatgcaggcaggcaggccttctagttctacaaagatgcctctaatggatcgttttcctttcctatcgatggcttgattgatacaaagccggttttttcactcctcgggcgtgcgtttcttgacaccggccggattgatctatcatccatccatcgagtcgagtcgagatcgatcttgatctcgatctcgatcgatggagaaagccaagatgggagacgttgccaccatccgagccgttctggcgatcctccaatggtggggcttcaacgtcaccgtcatcatcatgaacaaatggatcttccagaaattggagttcaagttccctcttactgtctcgtgtgtccactttatatgctcttcgattggagcttacatcgcaatcaaaattctcaagatgaaaccactgattgaagttgccccagaggatcggtggagaagaatattcccaatgtcatttgtgttctgcataaacattgtactgggaaatgtcagcctgagatatattccagtctccttcatgcagaccataaaatctttcacccctgcaacgacagttattctgcagtggttggtctggaggaagtatttcgagtggcgcatatgggcttctctggtaccaatagtgggaggaatcatgttaacatcaataactgagcttagtttcaacatgtttggtttttgtgctgctatggttggttgcctggcaacatctaccaagaccatccttgcagagtctctactccatggatacaaatttgatagcattaacactgtgtactacatggcgccatttgcaaccatgatactgtcagtaccagcgattgtgctggaagggagtggcgtcatcaattggctctacacgtatgattccatcgtccctgcactgatcatcatcaccacctccggagtactcgcattttgcctcaacttctccatcttctacgtcatccattccacaacggctgtcacctttaacgtagccggcaacctgaaagttgctgtggctgtgttggtgtcgtggatgatcttccggaacccgatctcctcgatgaacgctgtcgggtgcgcaatcacgctcgtcggctgcaccttctatggctatgtgaggcatctcatctcgcagcagagcgttaattcgagcccacgcacgccgaggagccggatggagatgcttcccctcgtaggagacaagcaagagaagatttaattggccaccaaattaaaacaagttgatactcaaaagaggagggaattgttggtgcatgatcaataggaataaaggagcatcatctaacagctttcaggattaatcctgaggcacttttgtcatagaaaattattcagagttttcagttgagttgttcgtatagagctaatagaacttccttcttgtcatctgaacatgctggggtgctcctcagctgtatctctctctctctctctctttctattcttttcttcctttttctcacaggattaaaagatttttgtttgctcgt

SEQ ID NO: 26134 - DNA, 1690 bp, Oryza sativa
  ref <308>: DATABASE ACCESSION NUMBER: AK101576
  ref <309>: DATABASE ENTRY DATE: 2002-08-28
gacgtaccacacaacgtacacacgacgaacccccacgacgcacttagctaagctagcgtatagtctctgatcgatccgatctccgacgacgacgacgacgatggccggtaaagtaagcgcggtggtgctggtggcgttggtggtggtggcggcggcggcgggcggcgcggccgggctgtcgatgtgcggcgtcgaccggtcggccgtggcgctgtgccggtcgtactgcacggtggggagcgcggagaaggcgccgacgaaggagtgctgcaaggcggtggcgaacgccgacttccagtgcctctgcgaccgcagggacatgctccgcaacctggagaacatcgacgccgaccgcgccacgcagatcccgtccgagtgcggctaaagagtctgcttctccagaagccaatgacctggctcactgggacctaagcttctggagtgaacgactccgggaatctaaatatgatatcaacgaggaagatttgcgtccttactttgcactacccaaggttatggatggcctcttcagtctcgcaaataggctctttggtgttagcgtagagcctgcagatggactggctcctgtttggaatagtgatgtcaaattttactgtgtcaaagattcttcgaatagccctgttgcttatttctacttcgatccatattcaagaccatctgagaagcgtggaggggcttggatgaatgtggttttttctcgcagtcgtgtgcttgctcgcaatggttcacctgtcaggcttcctgttgcccatatggtgtgtaatcagaccccaccagttggtgataaacccagtcttatgaccttccgtgaggttgaaactgtgttccatgaatttggtcatgcgctgcagcacatgcttaccaaacaagatgaaggatttgtttctggtattcgtggagtagaatgggatgctgtagagctgccctctcagttcatggagaactggtgctaccacaagaatactcttttgagcattgcaaagcattatgaaacaggcgaacttcttccagaggaaatttatgcaaagcttgtcgctgcaaagaatttccgtgctggcaccttcagtttacgtcagatacgttttgctagtgtggacatggagctgcatacgacttacgatccaaatggttcattgtccatatatgatgtcgaccgaagagttgctgagcgaacacaggttcttgctcctcttccggaggataaattcctgtgcagctttagccatatatttgcaggaggctatgcagctggatactacagttacaagtgggctgaagtattgtcagctgatgcattctcagcatttgaagacgttggtttggacaatgagaaggcaattgaggaaactggcagacgattcagagaaacagtccttgcgcttggaggtggaaaatctccactcgaggtgtttgtgtctttccgcggacgggagccatcaccggaagctctgctcaggcacaacggcttgctacctgttgctgcattgtgataactcatgctcgattgtccccttcttttttcttttaacttgcgaaaacggcttgtaagatgttattgattgatggcatatcagcaacacgctaaaagtgccgtgtcctgcttacaacatgaaaaacaagttgctgtgcacaaccattatataatgatcatcgctgcttcttgccgttc

SEQ ID NO: 26135 - DNA, 984 bp, Oryza sativa
  ref <308>: DATABASE ACCESSION NUMBER: AK101577
  ref <309>: DATABASE ENTRY DATE: 2002-08-28
gattcgcttccactcccacaccgatctagggtttctagggttttgggttgcggcggcggcggcggcgagagggcgagggcgaggtcgagatggcgtcggagagggtgaaggggacggtgaagtggttcgacgccaccaaggggttcggcttcatcacccccgacgacggcggcgaggatctcttcgtccaccaatcctcgctcaagtccgacggctaccgcagcctcaacgacggcgacgtcgtcgagttctccgtcggatccggcaacgacggccgcaccaaggccgtggacgtcaccgcgccggggggcggggcgctcaccggcggatcccgtcccagcggcggcggggaccgcggctacggcgggggcggaggcggcggccgctacggcggtgaccgcggctacggcggcggtggcggcggctacggcgggggcgaccgcggctacggaggcggcggcgggtacggcggcggcggcggcggaggcagccgcgcgtgctacaagtgcggcgaggagggccacatggccagggactgctcccagggaggaggcggcggtggtggctacggtggtggtggcggcggctaccgcggcggtggtggtggcggcggcggcggcgggtgctacaactgcggcgagaccggccacatcgctcgcgagtgccccagcaagacctactaggcgctgctcgcggcgtcagatccagctccctcccatgatgcgttttgctccccctccctcactgaatcaccgagcagcgggtgatcagttctatcttattagtagtcgtagatctcgttaggaaagctatggatctatcggttcgtcgtcgtcgtcgttctatgtaatgggatgggagtcttggagtggtttaatctttttgtttcgttgggtcggtttgagagacaagccatggatttgcactgtctgatctatctatgaatctatctattatgaaccgagaagaaaatattcatcagct

SEQ ID NO: 26136 - DNA, 1643 bp, Oryza sativa
  ref <308>: DATABASE ACCESSION NUMBER: AK101578
  ref <309>: DATABASE ENTRY DATE: 2002-08-28
gatcgcgccgtacgccccctccctcactttccccaactccctctccagtctccactgtcacactccaccctcttgcctccccgcgtcggcgaccaccaccaccatggccgccgcctctcctcctccgctcgcgctcctcaccctcaccctctccctcaccctctccctcgcctccgccggcctcgtcctggacgacggctacaccgtcaccaccgccgccgacctcaaccacccgggcgcccccgccgcgccccacccctacgcgctcctcccgcgcccgcgcgccggggacctcgtcctgctcgactccgcggcctccgcgctctacaccctcgccctcccgctctccgggggcgccgccgcgcggaccctcgcgggcggtggtggcggccccgccgggttcgccgacggggagccccgcgacgccgccttcgaccgcccccgcagcctcgccgtcgaccacgcggataacgtctacgtcgccgaccgcatgaacggcgccgtccgaaagatcgcgccctccggttttactactacaattgctggagggcgctcaaaagggcctggtcgcaaggatggacctgcacagaatgctacattctcttcagattttgagcttgtttatgtcccaaaaatgtgtgctctgttagttactgacagaggaaatcgtttgatcaggcaaatcaatctaaaacaagaagattgtgcacgtgagacacagccaggcttgggaacaacttcggtgtcaattattgcagtgctatgtgcactgcttggttcagttattgggttctccattcggcatttctaccctgctcatgcaggaagtctccatcaaccgctttttcaggaggatgcagatgcagtacaagacaatccagaggacggccgctctgatcagcttctccgacatcagaagcgtagctgctaactccacgtttcacgccctcctgctgaagctagttagagtttgtgttggctatctaagtgttgtgttccctagcgttaggttagagaaacgagcccctgttaagccttgtccttctcttcttgatttagactaccctgttgttactagtactggtcctgacaacaaggcagatgaatctactgagctagtggggaatttcatcggcttcgatggagataccagttcagaggaggataatgtgcctgcatcttatggcaaggtgcctgctggtgaattggtggcgcttctagatggtccagaactcagcaataagatagatgacatgatcgaggccaacttatcgggcttttcaggtcaagagaataatcattgctcagctgtcaaatgttctggtataagcaggaggaggaggttgcatggagagagtaatgttctctaagcttgattgcctgtatgcacgcatttgcttggggtattgtctccatgttgctatctgctgtagtagcgcctaactaaaaaacctatcgtgtcagtatattctgctctatcgaatgtaagtacaataactagaactgatatgtgctcgtcttaagtggtgatgtcatgtataagtgtgatcagggtatggtaagctcatgtaatgattgttactgctgctattctcgtgtcaaagctttgtcatgcctgttaacgtatggaatttatatactct

SEQ ID NO: 26137 - DNA, 1643 bp, Oryza sativa; identical to SEQ ID NO: 26136
  ref <308>: DATABASE ACCESSION NUMBER: AK101579
  ref <309>: DATABASE ENTRY DATE: 2002-08-28

SEQ ID NO: 26138 - DNA, 1298 bp, Oryza sativa
  ref <308>: DATABASE ACCESSION NUMBER: AK101580
  ref <309>: DATABASE ENTRY DATE: 2002-08-28
gagccgcgttcgcatccgccgccgcagccgcagccgccgccgccgacgccgacgaggagaggaggagagggaaggcgagagggaggtaggtaggtaggcagttagccatgtcgccggcggagccgacgagggaggagagcgtgtacaaggcgaagctggcggagcaggcggagcggtacgaggagatggtggagtacatggagcgcgtggcgcgcgcggcggggggcgcctccggcggggaggagctcacggtggaggagcggaacctgctgtccgtggcgtacaagaacgtcatcggcgcccgccgcgcgtcgtggcggatcatctcgtcgatcgagcagaaggaggagggccgcgggaacgacgcccacgccgccaccatccgctcctacaggggcaagatcgaggccgagctcgcccgcatctgcgacggcatcctggccctgctcgactcccacctcgtcccctccgccggcgccgccgagtccaaggtcttctacctcaagatgaagggcgactaccacaggtaccttgcggagtttaagtctggcgacgagaggaagcaggctgcggagagcaccatgaatgcatacaaggctgctcaggacattgctctcgcagatttggctccgacccaccccataaggcttgggcttgcactcaacttttcagtgttctactatgagatcttgaactcccctgaccgtgcctgcaacctcgcgaagcaggcgtttgatgaggccatatcagaactggacagccttggtgaagaatcctacaaggacagcactttgatcatgcagctcctgcgtgacaacttgactctgtggacttcagatgccaatgatgatggtggtgacgaaatcaaggaagccgcagctccaaaagagcctggggatcagtgagatgaattcggacgccagtctgatgcaccatctgttgttgttggggcaatggacattgatgtcttcggctttcagtagctatcttctagtacacgaactgtcgtcgcaccatcgcggaggagacgatgatgttcttaaattacttaagtagttctgggtcacgcttttgttcagttgataaatgatggctggatcctggttttcttgttccacgatgccagccacaggaaaaaccctactattctgcactgttagaatgctgttatattaaccatgtttgacaagacattttcagtatgtttgtatgaccgtcttggaagtgtttggttgaacctgtctcagggtctttggtccaagacattattcacctggcttgcttaactcgttttagag

SEQ ID NO: 26139 - DNA, 1737 bp, Oryza sativa
  ref <308>: DATABASE ACCESSION NUMBER: AK101581
  ref <309>: DATABASE ENTRY DATE: 2002-08-28
gagaacaagggaggggaaaaaaaaaagagaagggaaggaaaccctcgccaccacgcgtctccgcctccggcggcggcggcgccgcccgccgctgtaccaagatcccgcagccactgcgccgccggccgccgcgctcgtcgcccacgcactagtccctcccggagtcgtaggctgcgggttacgccccccgccccgccgcccggccgctctctccgggtggggtggtgggtggcaaggggctgcgccgccatcccatcaccaaccaagcaagccggccggggaacggggagcaaccatgtcgctcctacgacgggtggggaggaggttcctcgccggcgacatcctgtcgtcggaggcttcgccgcatgccgtcggccgcctcttcaccgagcctccgctaccgtcaccgctggagggtgtcaggagcccctcaccgctgccactgcctcgggctaccaagcaaccattcattggcatcttctcgccattcaagagttacccattgcaggtcataagggagtcactgccgctggcccatcatcagtcacttagccgcaacgccatcggacctagctacaggtggccatggacgcggcttacatctgcagtagcactgccgaaactccttggcactaggtgggcatcaacaaatacctcctcaactactgggtttggtccatgttttactagtgcgggagagttgattgatgcccttacctatgcaagagccaaccctcttatgagaaaggttaagatcatgggtagagaagataaaatcatatggattccaaatgacaatctcaggagactcgtgagatcattaaacaagacctatgccttacttcatgcaaagaagaagtgtctgtcctcattaacttcttcaaatgtcttagtgggtgaggatggaagtgcagtaattcagggtgttatagagattccttacagtgaggaagaagcttgttgtcgatacaatgaaactgcttccattctgaaagagctgattacagagtctgtggggtctgaagctattggtgtggattgtattgccgattttcgccgtctactccgccagatggagagcatgacatcggtttgtcaggagtacatcatcagcaaccacgcttcgcttatacctgatgctaacaggacggcggtatttctattattttacaatcacatcatgggtaagctcgcccaggagcaaccaagactgaagaatcagattattagcaagttgccgtatgatgggatttggctaggcatagttatttccaaccgctttctcagaagatggttgaatagccatagggaatacgtgagtaccggggatgatgacatgagctttaactggaatgtccgctctcatttttacgtacatctgtggatctttgcttatagtcaattggaggtagaggaatgcttatatggtgagtttccagagcttctgttggagattgagatcctgctatggaaagcgaatgagatcgatgggctaggattcgaggataagttttagtggctttgagatatggcaatgcattgtaatatgggtgaattgtctgtatgacgtttaatctgagatcatggatctcttgttagggctttaggtggtgtttggatccagggacttaactttagtctctgtatttagacactaatttagtctattaaatatagactacttacaaaactaattacataaatgaaagctaatttgcgagataaattttttaagcc

SEQ ID NO: 26140 - DNA, 1760 bp, Oryza sativa
  ref <308>: DATABASE ACCESSION NUMBER: AK101582
  ref <309>: DATABASE ENTRY DATE: 2002-08-28
gggccgtcgtctcctccccccgaccccgccgccgccgacctctctcctccgcgccgccgacgaaccaccgccgccgaatccccctcgccggcggccacccggatctccccagccatgtacggcggcgatgaggtctcggccatcgtcatcgacgtggggtcctacagctgcaaggcggggtacgccggtgatgacacccccaaggccgtcttcccctcggttgttggttcaattgagcaaacgggagaaactgatgaagcaaaggcagacaaggaggctgaagctgcatcagattctaagaatggagccaaacctatggatgtggacaaagccaagacaaagcgcaaattgtatgttggtcaagaattggagttcaggagggatcatatggaggtgatttcaccaatgaaagatggaacagttactgattgggatattgttgacaatatatggaatcatgctttcaggcagcggctattgatcaatcctgaggagcatcctatgttgatagctgaaccatctacaaacacaggacagcaaagagagaaagcagcagaacttatgtttgagaagtacaaagtgccggcactgttcctagcgaaaaatgcagttctcacatcttttgcatctggacgtgctacatcgttggtagttgacagcggtggtgggtctactgtggttgctgctgttcacgatggttatgtattgcaaaagtctgtggcgacttctccaattggtggtgaatttttaactgactgtatgatgaaaagcttggagagcaagggcgttgttataaggcccaggtattcattcaagaagaaggaagtcggccctggcgaatataaggttgtagatcttgatcttccaaacacaacggagagttacaagttatactgcatgagagctattgctagtgatatcaaggagtcagtttgcagggttccagatactgccttcgatgaagtggcatatgcaaacgttcctacaacttcatatgagcttccagatggacaaaccattgaagttggtgcagacagattcaagattcctgatattctgtttaatccatctctttctcagactattcctggagttgatggatttgcagattcaatgtcagttcgtggccttccacgaatggtcattgatagtgtaaataggtgcgatgttgacattcgcaaggaactgctaagcagtattctgctttcaggtggttcatcatcaattctgcagttgaaggagaggctagaaaaagaagtacttgaggaatcttctggtaatactcgtgtaaaggttttggcaagtggaaattcagtagagaggcgattcagtgtttggattggagggagcattctagcatcccttgggtcgttccagcaaatgtggttctccaaagcagaatacgaagaacatggagtatcctacatccaaaggaagtgcccatgaagttgtggagcatcgctacgatttgtgaccaaatttgggtgcatgtgggcaatcgtattacagccaccctgttgttgatctatatcgactattatccgacgatatttatcattatattatgactagttagtttgtagattttgagagggcaacataagaagcaatccagcttaacctgttatgttcttgatggtagattctagttcatgtgttgaatctgttctccctgctgtagaatgtatcgagttgctgctctctactctgtacttttagaataccttttcaatcatttggagtcagctgattgttgtacc

SEQ ID NO: 26141 - DNA, 1776 bp, Oryza sativa
  ref <308>: DATABASE ACCESSION NUMBER: AK101583
  ref <309>: DATABASE ENTRY DATE: 2002-08-28
gaatcatctccgcaatcgcgacggccctgcgacctccgcccatggcggctacaactacaagtagcagcagcggcggcggcaaccggatctggacctcctcactcgccgtcctcgcgctcgccgtcgccctcgtctccctcctctccctccgcgcgccgccacctgctgcgcccagcatggccgacgacctgcccacctccgtccacgacatctccgtcaaggtagccatgctacggcgtctcgcttttctcttttttgatactgtctcgtggtttcttgaaagagggtggatgaggaggttctttccgtgattggggctcgatgcgatgtagtctagtgagatgttgcttttagttgtggggggtgattgtttttatctttggccaggaaccctagattgctccttttgttgggaatatttgtaattcttggcggaattggatcatgtcgccatgatgggacgttggatttcaggttaattctgttgttgtcaccgtaaagatgaactttattctatattaaggttagatgggaagtttaccttttctctgaacatagcacagtgtggatagatggcgtcagttctgatagggactttcacatcctaccgatgttattagtagtaattggtttaacattactgtgcgaaatttcagttgaacatacttagtgattaacgctttcctacttaactctttatgttactccgtattctgtttctttgattcggcctgtcagctgatgtttggttcttccaaaggatataaagggaaatgatgtgaagctgagcgagtatgaggggaaggttcttcttattgttaatgtggcctcaaaatggtacttatcagatcagatttcatttatttagtttttaggtagacctaacgtattgctctcggattctcatgaattggaaaattgaagtttatctaagaattaattcattaagttgagctgaacttgtcaaattactaattctttttcaatgattggtatatgtgtgcttgtgacatatatgctcgtttattgggatttagacctcgcatattctgtcgaacataaaagtcattgaagtccaacacacttgttccattgttggtcttctcaccaatacatttgtgttaggcagagtgttgcgtaatgacaaatgctatgtcgtcatgttttctcctctagtgtgggctatatgaacatttatgtttcattacttcacctttactcttttgtagtggcttaacaaattccaattacaaggagttgaatgtcttgtacgagaaatacaaagaaaaaggccttgagatactcgcatttccgtgcaaccaatttgctggtcaagagcctggcagcaatgaagagattgagcaaacagtttgtaccagattcaaagcagaatttcctatttttgacaagattgatgttaacgggaaggaggccgcaccgctatacaagttcttgaaatcacagaaaggtggattccttggtgatggcatcaaatggaacttcacgaagtttctcgttggtaaagatggcaaggttgttgagcgatatgccccgacgacttctccattaaagattgagaatgatatccagaagctacttgggacctcgtaacttattaacacggaacacatatgtgtatgtcatatgttgtataattgtttgaaaatttgtctatgttcgtaagaatgtggtttgcttcttttagacgcagaaaatgttctttgtgcattacaactattctggagtaggaattaatctcgatgttgtcaggtgacc

SEQ ID NO: 26142 - DNA, 1711 bp, Oryza sativa
  ref <308>: DATABASE ACCESSION NUMBER: AK101584
  ref <309>: DATABASE ENTRY DATE: 2002-08-28
gggggagaaaacgggtagagagaaaagaggaggaggagccccaatccgggacgccattgacgccctcccaggaaggtcagagtagagggaggcgaggaacacatgacctcctcctctcctctcttcgtggaagagtagtagtggtagttggtgttgcgtagaagagagcacggaagcgatacgcggcggggaagagagcagagcagccgggtggcccgttcttgccgccgcggcgccgtcgtcgctgcctttctcgcctcgggagatcgcggattagaggaggagttgggggaagaggagggtttgggggcaatggatactaccacgagggccaagatcccgtcccttcaccaccagacggagatcaactgggacaacctcgacaagaccaagctctatgtggtgggagccgggatgttcagtggcgtgaccgtggcgctgtacccggtatcggtgataaagacccggatgcaggtagccactggggaagccgtgaggaggaatgccgcggcaacattcaggaacattctcaaggtggacggagtgcccgggctgtaccgagggtttgggacagttatcacaggggccatccctgctaggattatctttcttacagcgcttgagacaacaaaggcggcctcgcttaagcttgttgaaccatttaagctgtcggagccggtacaagcagcctttgccaatggccttggcggtttgtcggcatctctatgttcgcaggctgtgtttgtgcccattgatgtggttagccagaaattgatggttcaaggatattctggtcatgttagatataagggtggacttgatgttgcccaacagattataaaggctgatggaattcgggggctgtacagaggatttggcctgtctgttatgacgtactcaccatctagtgctgtgtggtgggcaagctatgggtccagccagcgcataatttggagtgcttttgatcgttggaatgataaagaaagttctcctagtcagttgacaatagttggtgtccaagccacaggggggattattgctggtgcagtgacatcctgtgttacaactcccatagatactatcaaaaccagactgcaggttaatcaaaacaaaccaaaagccatggaagtagttagaagattgattgctgaagatggatggaaaggtttctacagaggtttaggtccaagatttttcagctcatcagcttggggtacctcaatgatagtatgctatgaatacctaaagcgcttgtgtgctaaagttgaagaggtctgagtcagcttaaacctatcactctgatgctcgcagtggtggaaattttgtagcaaaaatccaataatgctgtatgccaacaactgtgacccatgaggaagctctctttcttgctgacttgatactagatatctttaaaattttagtgctcttgaggctattttgaaaatgcagaggttcatattgtttgcctctaacgatgaatatggattaggcagaatgttttacatgatatataaacgaaagattagatatgttcacttttcattctttttagctccagcctccagggcttgtaatagtgagaccggagtattggaaccggtttcagtgaggaggagcaaggatatatatacatttgctcgtttctcttcgatgtactcaaaatatcattcttcgaatttttttacgatggtgctggtcttcgttttgtacc

SEQ ID NO: 26143 - DNA, 1898 bp, Oryza sativa
  ref <308>: DATABASE ACCESSION NUMBER: AK101585
  ref <309>: DATABASE ENTRY DATE: 2002-08-28
gagctacccgcctggcgcctagtgccctggccagtatacagcgaggacatcgtcacctcgcagcgccacaacgccggggcggagatgggctccccctcctaccgtctcgcggcggcgatcacgatcccttccaccgacgagttcctcctcgtccgccagccgccgccgccgtccccagcgcccgcaccggaggaggaggaatacctataccggggctacgtcgacagcgagctctacgacctcccgtcggcacccctgcggcccctggcgggtgagctccggtcggatgtggccatccgcggcgcggaccccgtcgccggccggctcgacatctcgcgcctcgacgtgtccgcctccctcgaccagatttgcgatcaattcggtttgccgagtggaatttgcggggagtggaggctcctgaagtatgtggaggaagcggagtttggcccagatgctgggctcaacacggtgctcatcatcggttcattggagtcaaaactggaggcgttgcaagactcctggaggtggatgtccaaggaatgtgcttcgggattgctctctggagcaaagtccggtggtactcgcatagggccctatgcgtatattggacttctgaagccagagctgccatcaaactggacagttgcccctgcattgccttgccaggagtaccctcctggaataaaacttgtgccgatgaagagtaacacattacagcccttccgtacaactaatcttgtggtagtagtagcaaccgatactcctggtggatcaacatgttctgattgtgttgtttatggggatgctctactaatagatcctggatgctgctcacaagttcatggaaagcttgcagaacttgttaattcccttccaaagaagttagtggtccttgttacacatcatcatcatgatcatgttgatggtctctctgttgttcagagatgcaaccctgatgctgttcttttgacacacaaaaatacaatgagtcgcattgggaaaggaaattggtcaattggctatactgcagtagctgggggagaaaatatatgcataggtgaccaacaactgcaagttgtttttgctcctggtcatacagatggtcacatgggggttttacatgttaataccaatgcattaattgttggagatcactgtgtagggcaaggaagtgcaacattggacaatagagctggtggcaacatgaaggactactttcaaactacatacaatttcttggacatgtcaccgcacgtgctgattccaatgcatggaagaatcaacctatggcccaaacatatgctttgtggatacctcaggcaccgaagggcaagggaagtgtccattctacagtctatagagaatggggctcggactctgtttgacatagtttcaaaaacttatgctgatgtagataggaaattatggattcctgcttctttcaatgttcgccttcatgttgatcatctgaactcccaaaataaactacctaagagcttttcgatggacaagtttgaagtgagctgtggaacaaacttcatgctgtggtgggcggtggcgtatgtgcaagccaggagctcaccagctatccttgcggcaactgcccttgccggtggtttggcaattgcttacgctctcaaaaggaacagcggcaacgaaccgtaaggattctccgatacgacttcaaagcacgaagtatctattttaatgcagaaaggaagcttttctcaaaataaaataaaataaagtttgatcttataattaattttagagtttctttgccactttcaatagggatgagaagttgtctttttcctttttcatggagggagtactccatactgtacactacagtgctacccatttcattgaatatattgacccggattctgatcctg

SEQ ID NO: 26144 - DNA, 1776 bp, Oryza sativa; identical to SEQ ID NO: 26141
  ref <308>: DATABASE ACCESSION NUMBER: AK101586
  ref <309>: DATABASE ENTRY DATE: 2002-08-28

SEQ ID NO: 26145 - DNA, 1935 bp, Oryza sativa
  ref <308>: DATABASE ACCESSION NUMBER: AK101587
  ref <309>: DATABASE ENTRY DATE: 2002-08-28
ggtttaccctagcaatccattttagattgattccgtgtagatcgatggagtttggggcggctggtagttccaggccgggagactaattctgatgcgattcgacagcggacggatatttggagagtctgtctctttttgccgccgcctatgattcggagcagcaagcgccgccgcctgacgcccatccccagcgacgccggcaagatgtcgccggattgggcttcgcttgaccaggatctggtggggctgatcggggggcgggtgcttgccggcgacgacatgcgggactacgtccggttccgcgccgtctgctctcactggagcgcaagcaccgtccgcccactcggccgcggcgtcaccgaccggcgtttccacccgcggcggtggatgatgctaccggagggccacggcctctaccccggccatcccgacctccgcggctacgtccgcttcttcaacctctccaccgccgccttggtccgtgtccatctaccgctcctacgcgaccacgtcatcatcgactcggtcgacggcctcctgctcctgcaccgcgaccacgacacagccatccgcctcctccaccccttcaccggcgatgtcgccgacctcccgccgctggcttccctcctgccacagatggaatccgagagccgcgaccgcagccagcgaagcaagcacagcagactaatgaaagtttgcgcatctgttaccgtcacctccactggcaccatcaccgtcatgctggcccttgaaatcctgcaccgcgtagcctacgccactcccggtgaccaacggtggactctctctgcctggacgctcaaaccttttgtcaaacccgtatctttccaaggcaaactctatgctttgcagctctcatcttacgacatacataaggtatacatctaccagtttaatccaccatgccaagataacgacaagggattgcttcatctgccattgccagtgaagattgctgaatgcccaatggacaaatttctatacctgctcaactttgctgaatgtggttcagagctcttgctggttgcctataatggtgtttctcgttcaaagctgctagtatacagacttgctgaccttgtcagtggaaggattgagccagtaacgaccattggagaccacgccttgttccttgatgaacgttgtctctgtgtctcactctcaaataacaaggaggggagtaagatccttccctccgatttgtctaactctatcatttgcatgcatagtttgcaggtcgatcctagttcactagatatatttcgttttgagcaatatgacctaggtactggtacctgggctccagctagtgacggagacattttccataaaccaccaccgagtccccatacacttatccatcatatctttacttgctgcaatcgcagatattggaataaaggaatcatgtattgcagtaaaagacagcctatttggttggtgaagcaagaactgcggtttggggcttgatgggctcttgtttccgctgaggtcttttcctccagaatatctagaggagcaaataaactatgggtgtgttcggagggggcattttacagcagcggctgcggctgcagcagttcaaaactgctgcggcagcgatgccgccgaacagagtcgatgtgttctctattgaaagtccctggatcaatcgtccaattagtgtatggacctttgatgccttcttccctggattaatcgtccaattagtgcatggacctttgatgccttcttcttggctgtttgacggacctttgttgccccatctttaacagtatgctacacatctattatagatactagaaggatatgcgcggcgccacgccgcgcacgacaatgttttgcatgagcttagtgaaggctacgtagcataattaaatgtgaaccaaagatcacattctttccaattctcaaact

SEQ ID NO: 26146 - DNA, 1713 bp, Oryza sativa
  ref <308>: DATABASE ACCESSION NUMBER: AK101588
  ref <309>: DATABASE ENTRY DATE: 2002-08-28
gatccgcgcgccaaaccctagcaatcttgatccgtccctttccgcgagacccttctgccgccatggccgctgcagacgccgtggcacccgacgacggcgatcacgccgttctccgcgacgacgagcgcgggatccctcgatccctttccctcctcgccgcgctcgtggaggccgaagccctctgccacgccaccgccgccgacgccgacgccgactccgacctcatccgcgccttccgcggcggcgcgacgcccaccgtccggatcgcggcgccgcgcgggaggcggggatcctcatcgacccgtccaccgcgcaccgactcgtcgccgtcgcgatcttcgtgggcgccaagttcggcgggcccatctacaggctcccgacgaggtggaccgtggtgttcgagaccagctcggacgccgcgatccgcgcgagggagatggccggcctcgaacggcgcttccttattgccgtcgattaccgcctgttcgtccgtgccgaccagttcgactggttctgtcgtgtcctggagcgagggccgcggccaagcgggagatgcggcggcggcggtgctggcaggaagaggacggcggcggaagctgtggagggagaagcggaggatggccgccgccgcgtccgggcctccctgccgccgccatctgtcgtcgccaactaggaccacgatatctgcatccacaggttcaattatatttacataatgtattttcttttgctgcttcttgtctatcagttgtttgcaggtggcaagggtggagaagatgcagttggcgttggaagagtttgatcagacgaggcaagggtggagaaaatgcagccggcgttggaagagttcgatcagcggccatcgtcggagtagagtgtaaaaaaaccagttttaatcgtaggatgtttagaaactgttaactctgtcaaattctatcaatccctgtgtcttagatttccatcttattggaagtagataaagaaatgcaggggcaacgccatgttgagcttgccgagtgcacaggcaccagggaaaaatttagcttttagttattagcatctaatctccaccttttgtgtactccctagaaaaaaaaatatgtgcaccaccttcagctgcctagcaggctgcaggcagcccatgaaggcccaagaaagagggaaaatgaaaagccgcgacacgtccctcgccgcctcgcgcaaaatgcccagaccgacgcccccaaatcgcagaacggcggaagccggaagcagcggagcggaggcactgcacggcgcacccacttgccatgatcgctggccaccggctaaccgctcaggcgctcagcacggcagggtagcacgcctcatcgagcaggaatcgctgattgcaggttgcggcatcaaggcatcaagccctccacgtctgcattgtgatgggtttgcaattggggctatagttttgcttattgaaaagaaggtctaaagaatttggcgggacttgaggaccaggagttttagtactgaaatcatgtcaagtaagtcatcaattttttccccatctaattagcacttttttacaggttattatcgtctcatcaaggttattcttaattatgtattttgcccattgccttgtagacatgtactaccggatttttcattttggtaagcattttttgtcattgtatatgttacatttacatttctattacatgcgtaaattaagtgtgc

SEQ ID NO: 26147 - DNA, 1761 bp, Oryza sativa
  ref <308>: DATABASE ACCESSION NUMBER: AK101589
  ref <309>: DATABASE ENTRY DATE: 2002-08-28
acgccgcccccacctcaccttccgccgcctttgcctcccgctttctccaagcgcggcagcgccgccgccgccgccgccccgtctttctccttgccctccggctcgctctgctgggtcgacgaaaagcccggcccatctgcatcgttgaaagcaacacctccacccaaactacagccgcgcggaatctgattcttttttttttctcggaaaaaaaaaatcaattcgaagctcacagtagctcgcggcggcggcggcggcggctcgggctccgacttcgtgggcgatggcgggggcaggaggagggggagtgcgcgacatggacgcgctggagggcgtgcgctcaatcgtgttgaagccctcggagtccctcgacgaggggcggttcacgaggatcgccggcgccgacttcaacgacgccggcctcggcctccccgggctgctcgcgtcgctcgccaccaccggattccaggcctccaacctcggcgacgccgtcgacgtcgtcaaccagatgttagattggaggctgtctcacgagaagccacgtgaggactgtgatgaagctgagcttgatcctacatatagagaatctgtaaagtgcaaaatattcctgggattcacttcaaaccttgtctcttctggcattcgagatgtagtccgttttctagttcagcatcacatggtggatgttattgttacaactgctggtggtatagaggaggatctcatcaaatgtcttgctcccacttatagaggagaattttccttacctggaacactgttgcggtcaaagggattgaatcggattggaaatcttttggttcccaatgataactattgcaagtttgagaactggatcatgccactttttgatcagatgctacaagagcaatccactgagaatgtttggacaccatcgaaggtcatagcttgtcttggcaaagaaataaatgatgaaagttcccacctttattgggcgtataagaacaatattcctgtatactgccaagcattgactgatggatcgcttggagacatgctattctgtcatgcagtccgcaatcctggcctaattattgacattgtacaagatataagattgatgaatggggaagccattcatgcaaccccaaggaagacagggatcatagttcttggtggaggtctacccaagcatcatatatgcaacgccaatatgtttcgcaatggtgcagattatgcagtctatatcaacacagcccaagagtttgatggcagtgattctggagcacaacctgatgaagcagtttcatggggaaagattaaaggttcagccaaacccgtcaaggtgcattgtgacgctacgatcgctttcccattaattgtggctgcaacattcgcacgcaagtttcacggtgcgaaacaagcgaactgaatttctgggtttgagctaaaccgattcctgtcgaattcgtctccccaagttgagtgttcagacctcggagcacggcttgtacatcccttctcagggatggagcaggaaggttttgttggtagtaaaatgcattttgcttgcgtgttgcaggggacacttcatggaagttaagacattgttcgctttgttcatccgctgttcggatgatttctgactagtgcaagagggaaaaggatatttatctcacagaccgttttggatatgtacgcattcagcgagaacaaatgggtatatgtaatttgaattccgtatcaattgttttgctaggaaacaggaaaggagggaaaatg

SEQ ID NO: 26148 - DNA, 1654 bp, Oryza sativa
  ref <308>: DATABASE ACCESSION NUMBER: AK101590
  ref <309>: DATABASE ENTRY DATE: 2002-08-28
gggcgtcgctcgcgagcagcgcagcagccagccatggcggtggcggtggcggcgtcgctctcgaccccggcgccatcgccggcggccggggggaggggccgaaggagggtgaacgtggcggtggcgtccctgcggcgggcggcggcgggaggtggctcgagctggcggagcgagcggcggctcatgtcggagctggagcgcacggtgacgcccggcgcggcggagcgcgtcatccgcagctacgtcgcctccaagtcggagcgcgccgccctcgccgcgctctcccgcctgctcatggactccgaccccttcgccatcccgttctacgaggtggtcacccaggcgcggtggttcaagtggagctccatccacgccgccgccgtcgccgcgctgctcgagagcaatggcagcgcggaggaatcaagatccctcatctccgactccatctcgcgcctccactccacctcctcctcctccgaggaggtgtccctcttctactgcgacctcatggcggccttctcctcccgcgggatgcgagaccgggcgatggatttctactcccagctgcgagcctcgccgccgctgtccgggaagaagacctacacggcgatgataaaatctctgtgcctgatgggcctcgccggcgaggcggaggcggcgctgagggagatggcgtctcgggggcaccagccggaggcgttccagttcggattggtggcgaagtgctacggcaaggcgggatccatggccgagatggagagggtgatctcgtccatgtccgacgccggcatccgcctcggcaccggcgcggcgaacatcgtgctctcgtgctacacctcctgccgtgaccattccaggatgctggcatggctgaggaggatgaggaagctgcggattgcgccgacgacgaaggccttcaactttgtgctcaactcatgcccaacagtagcttcgatggctcaagaattgggggaatcactgccattgtcaacggctgagttggtcaagaagctcaggtctgcatctcaatggccagcagaagctgagctggtgcaggagctcctgacatcctcttcggtgctcgacaaggcgatggattggtcggagtcggaggtgaagctgaacctccatggattcagcacaattgcagcctatgttttgattttgcagtgggtggatgcgatgaaggcgcgccgcgcattgccattggaggtgtcagtggtgtgtggcattggcaagcacagcgatgtcagaggtgagcccaaggtgagggagctggctcaggaggttctgagcaggatggggagccccctgaggctgtccatgaggaacaaaggccggcttgtcgccaagcgcgacagggtgaagcaatggctggccactgactggagctctccggtggatgaggagagcacagatcaatcacctaatggggacaaccagcaaccatttttacttacactcatgagaaaactaggacaggttctgtcaccatttctgcagttctcaaagggtaaagcataagagaagcacctctcttatgtaggtttttcagatagtttggtctttggatagttcagcatctttgccatgctgtagattgatacaagctttgtcttggtctagtgaatcctaagttctagttctgatgccg

SEQ ID NO: 26149 - DNA, 2331 bp, Oryza sativa
  ref <308>: DATABASE ACCESSION NUMBER: AK101591
  ref <309>: DATABASE ENTRY DATE: 2002-08-28
gctcgtttccctttcctcctctcttccaccacgcgaggaataaatagcaggacaccggattggagtaacagagaatttattttttttttcagttttttcccccacccacaccacaagcagacgaagaagaagaacaaggttcgtccgtcgagatgttggaggagctgctcatcttcacgcgcggcggcctcatcctctggtcgtcatgccgggcgctcggcggcgccgccctcaagggctcgcccatcgacgccctcatccgctcctgcctcctcgaggagcgctctgccgacgccagcttctcccaggacacctatgcgcttaagtggacctttaacaatgacctcggcctcgtgttcgtcgccgtttaccagcgcatgctccacctcctttacgtcgacgacctcctcgccgccgtccgtaaggagttctcacagatttatgatcccaagcgcacctcctatgatgacgccttcaatgaggtttttcgccagctccacctcgaggctgaggctcgcagtgaggagatgaagaagaataaacaggtcactggttcccggcccaccaaggttaccactaagaccaatcgtggcgacactcagggctctggtggtggtaggaagaaaggtgactcggggaaggacgactctgatggtgactccgggaaggagcacactttgccaaatggtaattccaagatgcaagagaatagcctcaaggacaattctcatgcccgcagtgttgttgttaaaggaaaggagaacggagaccccaacgatggggcctttgatgtaaataagttacagaagatgagaaacaagggtaacaagaagaatgaggttgctagtaatgtggccaagaacacctctaaggctaacacaaagaagaatttgaagaaaaatagggtttgggatgacacacctgatgacaagaagaagctggatttcacagacccagctgatgagagaggggatgaggtgatagaccaggtggttgtcaagcagggggaaagcatgatggataaggatgatgtcgtgagcagtgatagtgatgaagaagaggaagatggagaggaaaattctggagcttcccaaaagaagaaaggatggttctcctcgatgttcaagagcattgcaggtaacaatgtgcttgagaagtctgacatccaacctgcactcaaagcgcttaaagataggctgatgactaagaatgtggctgaagaaattgcagagaaactttgtgaatcagtggcagctagccttgagggcaaaaagctgggatccttcacaaggatatcctctactgttcagacagctatggaggaggctcttcttcgcatcttaaccccaaggcgatctattgacatattaagggatgtacatgctgccaaagagcgtgggaagccatatgttattgtttttgttggagtgaatggagttggcaaatctaccaatcttgcaaaggttgcttattggcttcttcagcataacctcagtgtaagcctggcagcatgtgacacctttagatctggtgctgttgagcaactgcgtactcatgctcgcaggcttcagatacctatatttgagaagggatatgaaaaagatccagcggttgtcgcaaaggaggctattcaggaagctactcgtaataagtcagatgttgttcttgtcgacactgctggacgtatgcaggataatgagccactcatgagagcactctccaagctcatcaatctcaatagcccagatctagttttatttgttggggaagcattggttggtaatgatgctgttgatcaactcactaaatttaaccagaaattagcagacctttccgctgtccctactaccagattgatagatggcatcctgctcaccaagtttgacaccatcgacgacaaggttggagctgcactttcaatggtttatatatctggagctccagtcatgttcgttggctgtggtcagtcttacactgacctcaagaagctcaatgtcaaatccatcgttaaaaccctgctgaagtgaatgtggtgcgccgttgtgcggcacctcgaattcgtactgccagtattgctatcgtcgaaacccccatgacctcgtcgtcatcgtgttggatgtgttctgtcctggtttactgttgtagtagcacaaactatcgtgcgctttttcagttatgtgactgctttgtatcacaggttttacctgttttaccctggaatatatacttactagtggttaacatgggctgatattctctccattaactacttgcattgatacggtgttaccgctatcaatggcggcaggcggaagtcctgtgtacagtcgt

SEQ ID NO: 26150 - DNA, 1681 bp, Oryza sativa
  ref <308>: DATABASE ACCESSION NUMBER: AK101592
  ref <309>: DATABASE ENTRY DATE: 2002-08-28
gggatttcctccttcccttgcacgcctccacgcacccgtggccggagaagaagacgccgccatggacgccggcgagtgctccagctcccagccctgcgcgtcctcctcgccggacgccgccggtggcgtttgggccaagctagtgccctccgattccgcgttcccggaggtggagctggccgaggacgacgccgtggtgtgctcccgggtcaccccggacggcggcggggaggtggccgcgtggtgcgagattaggcgcggcggcggcgatggcgacgcgtcgtcggcgacgattcggaatctgagctcggatgcaattattgtcgatggaagagtgatccagcaagaagcagttgacatcaaaccggggagtgaaattgtttcaggaccccagaaagatgggcatctgttgtacacctttgatataacaggcctgaatgaccaggacaaaactaatatcaagattgtgctggatattgagaatgcaaagtgcagcatatgcttaaatttgtggcatgatgttgttactgttgctccatgcctccacaacttctgcaacggttgcttctctgagtggttaagaaggtcttcagctaattcgcgtgataaaagtcagagtgctgcctgtccacaatgtaggacggcagtgcaatcagttggtaggaatcacttcctacataatattgaagaggctatactgcaagctttttcatcgctacagcggtctgatgaggagattgcattgttggagtcatatgcctcggtcaagacaaatattgttttggggaaacagaaaatccagtcaaggaagcgccgtttgccacgttcaaatgatgaagctaaccatactaaccatgctgattttctatgccctcaatgtggtgctgaatttggtggatttaggtgcagtccaggtgctccacacttgccgtgtaatggatgtggaggaatgatgccagccagacctgacaccagtataccacaaaaatgtttgggatgtgatagggcattttgtggagcttattggtgttcccaaggagtgaattcaagtcagcataatccaatctgtgatcaggaaactttcaagatgatctctcagcgccatatctctagtgttcctgacacagtacatggaggcaatcaatacgagaaagatattacagaaagatgtatacagcaatcaggcaaagcattgcaagctataatctcagagtggatagtgaagtttgacaataaggagcttgatcgctcaaggctgcagctgaaccatgttgatgcaattacttctaggacatacgtctgcaaccaatgctacagcaagttcatcgatttcctgctctactggttccgtgtatcaatgccaagaaatctccttccacctgatgctgctaacagggagagctgctggtatggtttcatgtgccgaacccagcaccaccggcctgaccatgctaagaagctcaaccatgtctgtcgtccaacaagaggcaacccctagcctgcctcgttctctgaaaaaaatcatctattttcagtgttcaacagcagcattgtacagcaaagagcaagtgccataggctctggtttctcagtgtttaacagctctgtttgattagtaggaatgattgtcaggtacatcaaccagtttcaaatgcctaaactgatacaacctgtttatctt

SEQ ID NO: 26151 - DNA, 1710 bp, Oryza sativa
  ref <308>: DATABASE ACCESSION NUMBER: AK101593
  ref <309>: DATABASE ENTRY DATE: 2002-08-28
gtattggacggctgggacaaccttaggggcatctctccacgattttatctcatccgtttggccctgctgctgctgtgctgccccttctctagggttttgactcctaaaccgccgcccccgtcctcccgcgccgccatgatgcagccgccgccgccgccgcagtgggcaatggggccgccgcctcctccgcagtacttccaggctggccctccgccgccgccgccacagtacttccagggggcgcatccacccgctgccatgtggggccagcccccgccgccgcaggctgcccctccgccggcgccggctggtggcgcagcaggggacgaggtgaggaccctgtggatcggcgacctccagttctggatggaagagaactacctgtacaactgcttctcccaggccggcgagcttatctcagcaaagataattcggaacaagcaaactgggcaacctgagggttatggtttcattgaatttggcagccatgctatagccgaacaagttctgcaaggctataatggtcaaatgatgcctaatggtaatcaggttttcaaattaaattgggcgacaagtggtgctggcgagaagcgtggagatgatggctcagattatactatatttgttggggatctcgcctcggatgttacagatttaattcttcaagatacattcaaggcccattaccaatcagttaagggtgcaaaagttgtctttgacagaagtactggtcgttcaaaaggctatggatttgttaagtttggagatttggatgaacagacacgtgcaatgactgaaatgaatggacaatattgttctagcaggcctatgcgtattggaccagcatccaacaagaaaaatataggtggccaacaacaaccaagtgctacataccagaatacacaaggaacagattctgatagcgatccaaacaatactactgtatttgttggtggtcttgatccaagtgtgactgatgaggttctgaaacaagccttcagtccatatggagaacttgtctacgtcaaaatacctgtaggaaagcgttgtggatttgttcaatattccaatagggcttcagctgaggaggccataaggatgctaaatggaagccaattaggaggtcagagcataaggctttcatggggtcgtagccctggaaacaagcagcctcagcaagaccagaaccaatggaatgctggctattatggatatcccccccaaggatatgatccatatggttatgttcggccgcctcaagatcctgccatgtacgcttatgcagcatatcctggatacgggaattatcaacaaccagcgccacagcagccccctcaacagtaagaacaagtgttggtcaagtgccctatcacaacatatgatgaaatagttttggcaactttggtgtaattggcatgaaaattttttgaactgttgcttgtgctatctttgttgaacgtcgtgtgcacgcccagcctatgttgtaacatgacattttactgaggcctaggtgacactagaatgacagcttttagggagggagtattggagtgaacatttttcgcttgctcaaaaagttttgtcgccatgggtaccattagaagaggagttgagcaagaaataataagtttgtaacattagacatcggcgtacattttaatcgggcactttggtattattgcactggagccgttttctgtttgcgtccct

SEQ ID NO: 26152 - DNA, 2159 bp, Oryza sativa
  ref <308>: DATABASE ACCESSION NUMBER: AK101594
  ref <309>: DATABASE ENTRY DATE: 2002-08-28
gatccaccgaaccatacccaacaagcgtcaaatcgcgtcaaagccaaaaacctcatacaagtccaggaatctgtaatatattccgagacttttacacgcattccagtcatcactagtgtagcggttgctgcttcttccccggggaggtttatcggatcttgatggagacccatatcggatccgtggacggggcggcggcggcggcggacaacggcgcggtggggtgcccggcgtcggcggtggggtgcccgatgacctcggcgcgccccgcgcccgtgtcggccggcgaggcgtcgctgggacggcacctggcgaggcggctggtgcaggtgggcgtcagcgacgtgttcgccgtgcccggggacttcaacctcacgctgctcgaccacctgatcgccgagcccgggctgcgcctcgtcggctgctgtaacgagctcaacgccgggtacgcggccgacggctacgcccgcgcgcgcggcgtcggcgcctgcgccgtcacgttcaccgtcggcggactcagcgtgctcaacgccatcgccggcgcgtacagcgagaacctgccggtcatctgcatcgccggagggccgaactccaacgactacggcaccaaccgcatcctccaccacaccatcggcctcccggacttctcccaggagctccgctgcttccagaccgtcacttgccaccaggcggtggtgaccaatctggaggatgcgcacgagcagatcgacaccgccatcgcgacggcgctgcgggagagcaagcctgtgtacctcagcatcagctgcaatctcccagggctgcctcaccccacgtttagccgcgaccccgtccccttcttcctcgcccccaggttgagtaacaagatgggtctggaggctgcggtggaggccactgtcgagttcctgaacaaggcggtgaagccggtgctcgttggcggccccaagctgcgtgtggcaaaggcagggaaggccttcgtcgaccttgttgatgccagtggctacgcctacgcggtgatgccgtcggccaaggggctcgtgccagagacgcacccccacttcatcggcacctactggggtgccgtcagcacggccttctgtgccgagatcgtcgagtcggccgacgcctacctcttcgcagggccaatcttcaatgactacagctctgtcggctactccttcctcctcaagaaggacaaggccataattgtgcaaccggagcgtgtcatcgtcgggaatggcccggcgtttgggtgcgtcatgatgaaggagttcttatctgagctggctaagcgcgtcaacaagaacaccactgcttatgagaactacaagaggatcttcgtgcctgagggccagccgctggagagcgagccgaatgagccgctgcgcgttaatgtgctcttcaagcacgtccagaagatgctgaacagtgacagtgctgtgattgccgagactggtgactcctggttcaattgccagaagctgaagctccctgagggctgcgggtatgaattccaaatgcagtatggttccattggatggtcagtgggtgcattgctcggatatgctcagggcgctaaggacaagcgtgtgattgcctgtattggtgatgggagtttccaggtgacggcacaggatgtgtcaacaatgattcgctgtgcacagaacagcataatcttcctgatcaacaacggcgggtacaccattgaggtggagatccatgacggtccatacaacgtcatcaagaactggaactacactggccttgtggatgccatccacaatggagagggcaaatgctggacttctaaggtgaagtgcgaggaggagctgacggaggcgatcgggatggcgctgggggagaaggactgcctgtgcttcattgaggtgatcgcgcacaaggacgacaccagcaaagagctgctggaatggggatcgagggtttctgctgccaactccaggccaccaaatcctcagtagaaacttttagtacttgttgcaagctgggctcaatcataataatgtaaacactttgcccttcagttatgttccttgtgtccattccctcgggtttctgttcttccagtttcggtagctctgtatctacttgtgaacatctgtttctccaatcaaatgctacgagggttatgagaggttttc

SEQ ID NO: 26153 - DNA, 2328 bp, Oryza sativa
  ref <308>: DATABASE ACCESSION NUMBER: AK101595
  ref <309>: DATABASE ENTRY DATE: 2002-08-28
gaccgctaaccactctcgcctcctcccccgtctgtactgactactgagatggaagcgagcaagtgaaagagagagattcctggcttcctgcctcacgcgcacgcacaccaacctcaagccatcgggctctctcaccccgcacttctcccaccgccaccgaggcacggctctcgaaccttcccactgcttcctccctccctcccctcccctccccgcgacgagacgagacgagacggcggcggcggccggagtcaagagccttccctatgcagcggcggcggggcctcgccgcgctcgccgtcctcctcgccctcgcggcgcgcggcgcggacgcgtccgtccacgagtactcgggcggggggttcgcgccgcgggccaactccttcttcttccacggcggcagcgaggggctgtacgcctccgaccccacctccaactcctccgcctccttcatcaggtttgactctgtcacatttcgacggacccaggagtcagcaggtaggcatgaggctatgcagcaaaagacagggttagttgaggctattattgttgagatccaggacagaagcaagattggtggttcttacttgcattctgatgcaatatgctgcactcctgagctcgataaagagaagtcctgcaaagttggtgaagtaattatacagccaaatcctgataatcctgactggccaaaaagggttcggacattttttagtggtagagatgaagaagctagcatggtcacacaagttgtatctataaacaaaacagggatgtactacctctattttatgttctgtgatccacagctcaagggattgaagattacaggcaggactgtttggcgaaacccacaaggttatctccctggtaaaatggccccaatgatgacattttatggtttcatgtcgcttgcatatcttgtacttggacttctgtggtttcttcagtttgtgcgatgctggaaggatattttgcagctgcactaccatataacagctgttattgctcttggcatgtgcgagatggctttctggtactttgagtatgctaacttcaattcgactggaaacagacctatggctataaccttgtgggcagttacatttactgctgtgaagaagaccatatctcgccttcttttattagtggtttctatgggatatggtgttgttagacccacattaggtggggttacatctaaagtaggtgctcttggtgtcgtctattttattgcttcggaaggtcttgaacttgttgaaaatcttggaaacatcaatgacttctctgggaaaacaaggttatttctggtgttacctgttgccatacttgatgctaccttcattatctggatattttcatcgctctcgagaactttggagaagctccagctgcggagaagtatggcaaaacttgaattgtatcggaagtttacaaattctctagctttgtcagttcttatctctattgcttggattggctatgagctatacttcaatgcaactgatccattgagtgagctatggcgaagggcttggatcatccctgcgttttggaatgttctctcctatgtcctccttgccatcatatgcatcctttggtctccgtctcgcaatccaacagggtttgcgtattcggaggatacagctgacgaggctgatgaggaaggtctctctcttgtaggcagtgctgtgaaaggaactggagacatagtgaacatgcatgtgtttccagaggataaacgtgcatgacaagttgtcatctttagtgcagctgtactcctggctgagtgctatgtgaagtaccgtttccctctgcattcatggcaagcttacgacttctgaagcttgcgtgcagtcccagtgtacaggtcgtgactttgtatggaaggatttgacttctatagaattttactcaatccgttgatgactatccaatacaaaaatgtgcgggaaataaacaatgacttggagagcgtgctggggttacttgctgtaattcctgcgcatggtgtggcgtgtgtagtagactcgtaggtcttgtttggtagaagcgcacattgttaaacacattgactgcatccccacgtaacgttggtatgatgacctcgtgccagttgcttatgcattgctcgcacgtatgagatatggaatgatttaattctgggtgtttattcaaggttcaccaaaccgttttgagtgagtttggtggtagctgcatggttatcacgaggtatacccgtgattttgaaaactgaaggttaacgcatcactgagaaggtcacagtatgcgttaaccacgataatacttaatacatatattttcatc

SEQ ID NO: 26154 - DNA, 1626 bp, Oryza sativa
  ref <308>: DATABASE ACCESSION NUMBER: AK101596
  ref <309>: DATABASE ENTRY DATE: 2002-08-28
gagacacttccacccatttgcaccgccatttcgaccggccggggcagtagtgtactacgtatactgtatacagttcccgatcgacgcgtgcatggcggcgagccttctgtcccacgtcgtgtccgatctctgcatcggcaagccgccggcgcgcgtgctgccgccgtccactcccgtcgcggccgccctcgccgcgctccgcaccggagatgaccccttcgtcttcgtcgtcgacgctgatgaggcgctccgccactcccgcgggaagaagatcgccgcggggtgcgtcgtcgtcaaggttagcgtcgcggacgtgctctgctacgtgtgcggcgacgcggacaacctcagcgaccccgcggccgcgctcggccggcccgtgtccgcgctcgcggcggccgtgcacgctggtggtggcgatcatcacggcgccgccctccgcgtcgactcgctcacaaggtacgcacgtgacagccggcgccgccgctgttaattccgctgttgattcatcagccgtggaatgccacgacgcaaaccgggaatcgaattgaactgtgtgtgatctggtccaactttgcagcctgctcgacgccattgacgcgctgctgagcaacgacgctcagaccctgctcgtcccgctccacgcgcacgccgcccgcagcaggaagcaccaccacgtacacgtctccggctgctccccggccaaccccgccgccgccactgactactgcgtgctgacgcgggaagacatcgtccgccacctcttcagctactccatctccctgttcgcccccgtcgcggcgcgcaccgtcgcctccctcggcctcgtccgccgggacgtgcacgccgtgcacgcagacgacgacgcgctcgacgccatcccgctcctgcggagatccatcgcggacggcaccgccgtggccgtcgtcgccgatgacgacgccctggtcggcgagatctgccccggagttctcggctcgtgcgacatcgagtcggcgtccgcggccttcgccgcgctctccgccggcgacgtcatgacgtacatagactgctcgttgtctccgccggagttcttgcttcgctccatcagggcgcagctcaagggcaggggcatggacgccatggccgacctcatggacgccgcggacgacgctgcctcgtctctgccgttatccccatcgtcttcctcgtcggcatcgtccgacgaggactcaccttttgggcgtgcgcggcgcgcaaggaggtcgtcgtcgggaagcttcaggtggaggtcgacgaaggacgtcgccgcatgccatgctgggagctcgctggtggcagtcatggcgcaggctcttgcgcaccgagtcgggtacgtctgggtcgtcgacgaggtcagcggcgcgctaaccggagtcgtgagcttcggagatgtacttgcggtgctccgggagcatctccgtgatggtgatacgcagatgaactgacgaattagcagttcatttgcagttttgcacatgtgcaagtgtaaattacacgagacatgagataaatttggcccatgagccacggacttccttttctcgagtccagcccgtaaaagagcatttaggcccaaacctaacaagaacttgcagttctgctacc

SEQ ID NO: 26155 - DNA, 1488 bp, Oryza sativa
  ref <308>: DATABASE ACCESSION NUMBER: AK101597
  ref <309>: DATABASE ENTRY DATE: 2002-08-28
gacctcgctgctgctccgccagctagtagccgccatcctccacgcctacaaagctcgcggccccgcaggtgcatgctccgctgcccgcctcctcgccgcctctgcctccgcctcggctcgccggtgtctacgatggcctccacgctcgccttcctcaggccctccgcgccggccccgctcgcagcctcgcgcggcgccgcgaggggcgtccccgcggccgtgagggtgccgtgcagatctagggtctcggcggccggcgtgtccctcggatcggaggtggcggtgggctccgacgcgctcttcgccgactacaagcccaccaccgcattcctcttccccggccagggtgctcagactgttgggatgggtgcagaagcagtgaatgttcctgcagctgccaaactatttgataaggcaaatgatatacttgggtatgacttgttggatttttgcaccaatggaccaaaagaaaagcttgactcgacagtaatcagtcagccagctatatatgtcaccagccttgcagccgtagaggtactacgctcacgtgatggaggccaaaatgtaattgactctgtagatgtcacatgcggtctcagcttaggggaatacactgcacttgcatttgctggtgcctttagctttgaggatggtctgaagcttgtcaagcttagaggagaagccatgcaggatgcttcagatgctgccagcagtgctatggtcagtgtgattggtctagattcagagaaggtgcagcaattatgcgatgctgctaacgaggaagtagatgaaaaggaaagagttcaaatagcaaactttctgtgtcctgggaactatgcagtttctggtggtgtgaaggggattgaagcagtcgaagccaaagcaaagtcctttaaggccagaatgacggtgcgcctagctgttgctggtgctttccatacaagcttcatgcaacctgctgtttcaagattggaatctgcattagctgagacagagataaaaacaccaagaatcccagttatctccaatgtggatgcatcaccccactcagatcctgacacaatcaagaagattttggcgcgacaggtaacttcccctgtgcaatgggagagtaccgtgaagactctgatgggtaaaggacttgagaaaagctatgaacttggtcctggaaaggttatagcaggaattcttaaaaggattgacaaaggcgcaagcattgagaacattggtgcatgagtttggaggtatcaagagtcaaagactatagggataataaggttagggagagcctgcaaattcaagcagtactccgaatgtatcaaatgttagccaacatggctgttgtggcaaactggcaattgccgtctgaggaaacgatattgattactgttgaggcccataatttggagacttttgtggtttatttacagcctgctgttcagatttaaccaagatatgaacgtgtgaatgtgtgataactcatgatag

SEQ ID NO: 26156 - DNA, 2103 bp, Oryza sativa
  ref <308>: DATABASE ACCESSION NUMBER: AK101598
  ref <309>: DATABASE ENTRY DATE: 2002-08-28
gctgctttcgctcgatttcgggggcggatcagacggccgcgagcgaatccggggatctcccccctccctcccgctctgttcctgcctctgctccccgcccgtttcctctcaatccttccttctccctgcttctctccctcgcggaaaaaaaaaagaaaagaaaaggaaaagggggagtggaaaagatctcctcttcgtcctgtttctgttggcgtcgctgctcggcagctcgttcgctagctaccacccaaaaggcggcagtcgatcgcctgatagctcagccgctctcctctgtcgcttccgagctcttgtgccgccgcgcgccggcgaggatctgtcgaccgagagaggagccacccgccgtccaagaagaggaggaagaagatcatctttgcgtcagaaggagcagtgacgagataccactgtccgcgtggtcacaagcattgctgcgagactgtgattggcgggagttgctttggatgagcaatagcctgatggtggcttgctaactgggaaggaggatttgcgcggttctggactactcgagaggctaggaaatgcttgcgtgcatcgcgtgttcgaccaaggacggcggggagggcgggcaccggtccgccaccgccacgcccaactccggcaagtctctgacttcacagttgaaggacatggtgctcaagttctccggcagcggcaggcaccaatacaagtccggcgggagcccgtcgttgaggaccagccgcttccaccgctccagccgcctcgccgcgtacccgggcatcatcgacgagtcgggcttcacgtcggacggggccggcgaggcctatacttacatgaggacgacgacggcgagcgccggcgcccgggccgcgccgtcgacgtgggacttgccgcccaaggtgaaccaccgcagcttccagccgcgcgtgatcaggagcccgagcgcgagcggggtaccgagcatcggggaggaagactacgacgacgacgacgacgacgatgacgaggagacagtcctcctggaggaggaccgcgtgccgcgggagtggacggcgcaggtggagcccggcgtgcagatcaccttcgtctccatccccggcggcgccggcaacgatctgaagcgcatccgtttcagccgggagatgtttaacaagtgggaggcgcagcggtggtggggggagaactacgaccgcgtggtggagctctacaacgtgcagacgttcagccggcagcagggcttctcgacgccgacgtcctccgtcgacgaagccatgcagagagattcgttctactcccgcgtcggctcgacgagggagagcccggcgatgatgatgccgccgccgccgccgctgccgtcgtcgggtgctggcagggagcacccgatcagccggacagcgtcgagcaaggcgcagctgtcgtcgtcgtcgtcggtggcggcggctcggccgccgttctacccgtccacggccgtgccggacccgtccgaccacgtgtgggcgcaccacttcaacctcctcaactccgcggccgccggaccagcggcgccgtacgacccgtcgcgcggcacgacgtcgtcccgggacgaggcgtccgtgtccatcagcaacgcgagcgacctggaggccacggagtgggtggagcaggacgagcctggggtgtccatcaccatccgcgagttcggcgacggcacccgcgagctccgccgcgtccggttcagccgcgagagatttggcgaggagcgggccaaggtgtggtgggagcagaaccgggaccggatacacgcgcagtatctgtgagctaacgcgagacccatcgttgatgagagtgaagtgatactgtgacagaagctaacgcgtcgccgggaagaatagttaagagtgtgatgatactactactttgccgctgctacggttagtgctactaggttttttttacagggtgaatataggatgagggggaaggatgctgtggtctgagaagcagcaggctcagtcaagctgctactcttgttaactgaccactttggtcttccgtttgtaacctttatggacagggtgttcgtttaattcgtttgttttagcatggtttcatgtgatcctcgacggc

SEQ ID NO: 26157 - DNA, 1152 bp, Oryza sativa
  ref <308>: DATABASE ACCESSION NUMBER: AK101599
  ref <309>: DATABASE ENTRY DATE: 2002-08-28
gtcctcggttcctcccctcttctggtcgcccccacccactcacaggctcaactcaactccacccgaatccgcaagagagagagagagagacgatggcggcggcggcgggaggagggacgagggaggagatggtgtacatggcgaagctggcggagcaggcggagaggtacgaggagatggtggagttcatggagaaggtggtgacggcggcggcggcgggcgggggtggggagctcacggtggaggagaggaacctgctgtccgtggcgtacaagaacgtcatcggcgcgcgcagggcgtcgtggcgcatcgtgtcctccatcgagcagaaggaggaaggccgcggcgccgcgggccacgccgccgccgcgcgctcctaccgcgcccgcgtcgaggccgagctctccaacatctgcgcggggatactccgcctcctcgacgagcgcctcgtccccgccgccgccgccgtcgacgccaaggtcttctacctcaagatggagggcgactaccaccgctacctcgccgagttcaagaccggagccgagcgcaaggacgccgccgacgccaccctcgccgcctaccaggccgcgcaggacatagccatgaaggagctgtcgccgacgcaccccatcagactgggccttgcgctcaacttctccgtgttctactacgagatcctcaactcgcccgaccgcgcgtgcacgctcgccaagcaggccttcgatgaagctatttcggaactggatacccttggggaagaatcctacaaggacagcaccctgatcatgcagcttcttcgcgacaatctcactttgtggacttctgatatgcaggacgatggaggtgatgaaatgagggatgcaaccaagcctgaggatgagcactagctaaagatcctagtgacagtcgtctgtctcttaaccgctgggggtagttatgatgcttgtacaaggaccattttcttgtgtcctttcgtcgggtctttgcttaccctttgtttacttatattgctatcgccatcctcatgtattatttgttactttcctgctggaatcctgctcgtgtgtgggagagtgcctcaagcctttaactaggacaaggattgtcaactcttgtttactatgattgaatggctatgcttgttcgatattt

SEQ ID NO: 26158 - DNA, 1856 bp, Oryza sativa
  ref <308>: DATABASE ACCESSION NUMBER: AK101600
  ref <309>: DATABASE ENTRY DATE: 2002-08-28
gtcgcacacgcctctacggtttcgtctccccgatcgcctccggcctccgccgctcgccgctcgtttccgccgccgcgcgatccggcggccggaaggcgtcagccatgcacgaccaggcggagatctgcagcctccccatcgacatcgccttcggccgcctgcaggagtggctggtggaccgcaagcgggtgccgcaggactggaggaagcgcctcgccggcatccgcgcccgcctcgccgccgccttcgcctccctccctcgcgacctcgacccctccctcctcgccctcgagccggacgaaattgggtatcttgaagcaaagaaaatatacggcatcctcttggaatccaacccggagagtaggaacatatttggccgcctgactggctcagcgggtgaatgggaggccattgttaaagcttatgagaaggaccatgtttttctcggggaggcagctcagatcatggtccagaatgtgaactatgacattccttatcagaggaagcagatgcaaaagactcaacaacagctcgcagagctggatagaagggaggctgacattaagcgacttgcagctctgtccgcaaccagatatgcagaggcttgccaggagcttggtctgcagggaattaatgtgcggcaagaactgatagagtctgcaaaaacacttccttcaacgtttacaaaaatcttggaggttctgaacagtgatcctgtctcaatagctaccgagtactatacaactttcgtaagggaatgccatactgaggataaggaaaactgcaaatctgtgctacagaatctgaaacagttgcaggctaatcctccctcccttcatatctcagtatgcaatgaggttgaatcttctcttggagagacatcaaaagctctggagtctaatgtgactggggcagaaaacattgactcaaatatatctgcagatgacattgattgggacatctctttggatgataatggaattgattgggacattggtgctgttgaacaacctgtagaagaatctggcaatggttttggatcgtatgaaattattgatgccaatgtagagttggcaggttctgaaaattataattttggtatttcagatgatccatctgtgaacaagtctagttcatctgagcctggtatttgctgggacatcactgatgttaatcctgaagaaaatgctagtatacagaatgctcctgaatcaggacagtctcaaagtttagctgaagaaagaagccagttactagagaaggaatatagaaataatattcttgatgatttacttgaggtaagagcatttttgacccaacgcttaggggagatgaggaatgctgatacatcatctctacagcatcaagtgcaagctgtctcaccttttgttctgcagcagtatgctcctgaaaatttagagaatatgcttgcagaggtctcatcagctatatctttgctcagtaaccagaaaactcttgaccttataatgattctcaactcaaaaaggtttttagacagattagtatcaacattagaagacaagaagcatcatgaggtgaaactacgagaaggcttaggtgatttgtcagttaagcgaatggagctgcaaaatgcactttcgtcatcctggcctaagcaagaggcagcaattacaaaaaccagggaactcaagaagctctgcgagacaacgctatcaactgtatttgatggcaggccggtgcatataattggagagatcaatactttactaagttcgagtgttagtcaattagctggatgactgtactagccggatgactgtacctgaaataagatgagattgaaagctggttgattacatcaaggttcatacttt

SEQ ID NO: 26159 - DNA, 1534 bp, Oryza sativa
  ref <308>: DATABASE ACCESSION NUMBER: AK101601
  ref <309>: DATABASE ENTRY DATE: 2002-08-28
gtgctgtttgccccgtccactgacctctctctctgctctccgcctctcacctccgtcctccaaaggacgaatcggcactctgcccagttcatctccacgatcactgctcgattctcgaagcaggggaggccattgccaccgaccaacaaaagttgaaggggtacacacatctgcatgcaatttctgtcctctggttgctagctgccgcttctttcaagtttcaacactccttgcaaccctccactcgtaggatcatctccatttccaatcctccttcagttttgtaaataatgaagaggcccaccagcagcagccgaaaatccaaaaaacaaggagaggacctggcgttctctgaggagggcagcttgcccgcggtgaccatggagcagaaagatgaagccgagatggaggaggtggacgaggaggaggaggaggaggtcgacgaagacatggccggcgggcacgcggcgcagtcgccgtcgccgtcgtgcgggctgggcgagaagaagcggcggctggcgctggagcaggtgcgcgctctggagcggagcttcgacacggacaacaagctggacccggaccgcaaggcccgcatcgcgcgcgacctcggcctgcagccgcgccaggtcgccgtctggttccagaaccgccgcgcccggtggaagacgaagcagctcgagcgcgacttcgccgccctccgcgcccgccacgacgccctccgcgccgactgcgacgccctgcgccgcgacaaggacgccctcgccgccgagattcgggagctgagggagaagctgcccaccaagccggcggacacggcggcatcggtgaaggtagaagccggcaatgacgcggcggccggcgccgcggccgccacggtgtgcaaggacggctcgtcggacgacagcgactccagcgtggtgttcaacgacgaggcgtcgccgtactccggcgcggccttcattggattcggcccgtcgttcttggtcgacgacgcgtcgggcaaccgtgggctgctcgtcgtcgctccccgcgctcgagtccaaatggcacggtccgtactccgacgactcgtgcaaaggcggcgtctatggcttcacggaggaatggctcgctgcctgctccggcgagatggccggcaacgacgccgccggcttcttctccgacgagcacgcctccaacctcaacttcggttggtgcgcgagtggtaacgagggttgggaatgagattttgatctccacggttagtgtaaaaaatggcagggttagtagcactgtgcataaccgcattggcgcattgcatgcttggatggagcacgtacttttagtttttttactgtactcatttactaccgcctttggctacctggcgtgcttactgctagtactgtagcaaagtagcaagaagtggaacgagcctagaggacgaaattgatatagggtaattaacgaaggatcaaggatgtaaattttaagccgccaaggggtcgaagaaggatagcacaggacagcaaagcatagctgtctgcgttttacc

SEQ ID NO: 26160 - DNA, 1510 bp, Oryza sativa
  ref <308>: DATABASE ACCESSION NUMBER: AK101602
  ref <309>: DATABASE ENTRY DATE: 2002-08-28
gactgcccactctcctccttctccggccgccgccgccatcgccgccggccgtagcatggttcttgcttgactgacctgaataaacagtaggggtgatgtcgatggaggaggcggaggagtgctcggcggcgtgcggcttctcgctgacgtgccaagaagacggcgccgacctcggcgacggcgtggtcgacgacgacgacgacggcgacgtattcttgttctacaatgccgttgcggcggcggacgacgagaaggaggaggaggagtacgtggagcagatggtctccaaggaggctagcttctgctgctcctcttcttcctccctcttcgacgccgccgccggcgacggctacggcgacggcgacggcgacggggactggttccggcaagcccgcctcgccgctgtcaagtggatcctcgaaacgagggggtacttcgggttcggccaccggacggcgtacctcgccatcgcctacttcgaccgcttctgcctccggcgacgcgtcgatagggaggcgatgccgtgggcggcgcggctgctgtctatcgcgtgcgtgtccgtggcggcgaagatggaggagtaccagtcgccggcgctgtcggagttcgacgccggcggcggccgcgtgttctgctcggactccatccgccggatggagctgctcgtgctgtccacgctggggtggcgcatgggcgccgtcacgccattcgacttcctcccctgcttctcctcccgcctccaccgccaccaccacggcggcgccggcgccgccggccatggcgccgccgccgccgcccgcgttgccctcaacgccgtcggcttcatctttgccacagctgaagctggaagtgtgctagattacaggccatcaactgttgctgcagctgcaatcttggctgcatcctatggagctccactgacaaaagaagcattggagtccaagatgagcaacctttctccatcttgtcttattgacaaggagaatgtacatgcctgctacagtatgatggttggggacatgaacaacaacaggaggagcagcaagcgaccattgcaatgttcagactccaatgagattaccaccaccagtacatatgattctgttcttgttgatgatgttaccgacaccgccgccttcgctgcgacggcgatgaataagcggctcaggccagagccgccgcgaatccgttgaggaagctagcaccaccagggacacacaatttttagtcagatgtctagggggcgcttggtttggatcttctccttttccccttctttttttctccctttttttgacataagtttccaaaatatttattaggttctttgagccattgccattggttggcatttggcaaatgttgttggattggattggtttggtttgtgagaaggagaagagataatgaacaaaggaaaaaaggggctgagtgagctctcctaaggagaggagagcttgagttacttgaagccccaaattccagtgcccaaatggagcacatttcctct

SEQ ID NO: 26161 - DNA, 2171 bp, Oryza sativa
  ref <308>: DATABASE ACCESSION NUMBER: AK101603
  ref <309>: DATABASE ENTRY DATE: 2002-08-28
ggttcatcactccctccccattttaccgttgaggtcggcgacctccgcggacggtacggcgggacactagcccgtcccgaggggcaatcccgtaattttcgcgcagtacagtgcctcccagcgcagtggcttcgccccacgccctactgttttaaatccccctgccgctctcctccgccgtcttcttcccccccttcctctccaccacccccgattcgtcgtccaccaccgttcgacgagtttctcgcagatcgggcgggggcgcgccgggatggcgtacatgtgcgcggacagcggcaacctcatggccatcgcgcagcaggtgatccagcagcagcagcagcagcaacagcagcagcagaggcaccaccaccaccaccatctgccgccgccgccgccgccgcagtcgatggcgccgcaccaccaccagcagaagcaccaccaccaccaccagcagatgccggcgatgccgcaggcgccgccctcgtcgcacggccagatcccgggccagctcgcgtacggtggcggcgcggcgtggcccgccggggagcacttcttcgcggacgcgttcggggcgtccgccggcgacgcggtgttctccgacctcgcggcggccgcggacttcgactctgatgggtggatggagagccttattggggacgcccccttccaggactccgacctggaacgcctcatcttcaccaccccgccgccgcccgtgccgtccccaccccccacgcatgccgccgccaccgccaccgccaccgccgccaccgccgctcctcgacctgaggctgcaccggctttgctcccccagcctgctgctgcgaccccggtggcgtgttcgtctccgagtccgagttccgcggacgcctcctgctccgctcccatcctccagtccctcctgtcctgctcccgcgcggcggcgaccgaccctggcctcgccgccgcggagctcgccagcgtccgcgccgccgcgactgacgccggggacccatctgagcgcttggccttctacttcgctgacgcgcttagtcgccgccttgcgtgcggcaccggagctccgccctccgcggagccggacgcgcggttcgcctccgacgagctcacgctctgctacaagacgctcaacgacgcctgcccctactccaagttcgcgcacctcaccgccaaccaggccatcctggaggccacaggcgcggcgaccaagatccacatagttgacttcgggatcgtgcagggcatccagtgggcggcgctgcttcaggcgctcgccacccggcccgaggggaagccaacgcggatacggatcaccggcgtcccctcgccgctcctggggccgcagcccgcggcgtccctcgccgccaccaatacccgtctccgtgacttcgccaagctcctcggggtggacttcgagttcgtcccattgctccggcctgtgcacgagctcaacaagtcggatttcttggttgaacctgacgaggccgtggccgtcaatttcatgctgcagctgtaccaccttcttggcgactcggacgagctagtgagaagagtgcttcgtcttgccaaatcgctcagtccagcagtggtcacacttggagagtacgaggtcagcctgaaccgagctgggttcgtcgaccggttcgccaatgcgttgagctattaccggtcattgttcgagtcgctggatgtggcaatgacccgggactcaccggagagggtgagggtggagcgttggatgttcggggagcgaattcagagggccgtcgggccggaggaaggcgcagaccggacggagaggatggccggcagcagcgagtggcagaccctgatggagtggtgcggcttcgagcccgtgccgctcagcaactatgccaggagccaggctgatcttttgctctggaactatgattccaagtacaagtattcacttgttgagttgccaccggcgttcttgtccttggcatgggagaaacggccattgcttactgtgtctgcttggaggtgagggtagtttttttgggagtatttgggggaatgtgtggcgttgtgatagaacctgggaggaaatagttaggagaaatcattttgcagcttttgttgtagtttcctccaaaactgtgtttaggatgattggtataattgggaaattttagctgaattatcttgct

SEQ ID NO: 26162 - DNA, 1608 bp, Oryza sativa
  ref <308>: DATABASE ACCESSION NUMBER: AK101604
  ref <309>: DATABASE ENTRY DATE: 2002-08-28
gggttcgtgtaaaaaaaaaagtgagccgcttagcctcgccggcgccgcctctctccgggaagcggcggcgagaacgcggaggagagagagagttcggggttggcccgtcgcgtcgccggagcgatggatcttctgaagagggagctggagaagaagcggaaggcggcgacggccgacttcggcgggaagagcttcgtgcggcggtcggagctggagcagaagcagctccagaagcggcgccacgaggagcaccgccagctcctctccaaggccccgccggcgacctcctccgcctccgccgcgggctccgaccccagcaaccccaacgccgacccggcccagtcctccgccgcaaaccctaaccctaactcctcctcgtccgccgccgccgcgtccgtcccgccgggcctcgcggggaagaagaccgcgcaggatgaggcgctcctctccgaggagcgccggatcgacgagctcgacctcccgcggcatgaggtggtgcggcgcctccgcatcctgcgcgagcccgtcacgctgttcggggaggacgacgccgaccggctcgcccgcctcaagttcgtgctcaagtccggcgtgattgacgacatcgacgaccttgacatgacagaggggcagacgaacgacttcctccgtgacatggtcgagctccgcaagcggcagagggctggccgggacacctatgtcaagggcaagggcaaacgagcgggcggcggtgatggcggcgagggtggcgctggcggggataatgctgatgatggggatggggacggccggaggagtggggatgatgctgatgcggacaaggactcgaaacggatgaagaccaagtttgaggagctgtgtgatgaggacaagatcttggtgttcttcaagaagctactcattgagtggaaccaggagcttgatgagatgccggagctggagaagaggacagcaaagggcaagtcgatggtcgcaaccttcaagcaatgtgcgcggtatctcagccccctgtttgagttttgcaggaagcaggttcttcctgatgacatccgtcaagcattgctcgttattgttgaatgctgcatgaagcgtgattatttagcagcaatggaccaatacatcaagctggccattggcaatgcaccatggcctattggtgtcactatggttggtatccacgagcgttcggcccgagaaaagatctacacaaacagtgtggcgcacattatgaacgatgagaccactcgcaagtaccttcagtcaatcaagaggcttatgaccctttgccagcgacgttatcctgctctgccctcaaaatcggtggagttcaacagcctggcaaatgggagtgacctgcaggcccttttgtcagaggagaaagatccaggaaaccctcctagcgaggataggcttcgactcatgccagcgtcaaaagagtgatgcttcaacgcacaagcttggatcacaaatagaatatttgtaatctgtgtaatgtgtaaaccaaattttcctgctcttattttcatttttgtactcttgcaagaatctgagaatattgcctgctaatcaaattactgaagaaagcaatatactgtctgcttctctccc

SEQ ID NO: 26163 - DNA, 1675 bp, Oryza sativa
  ref <308>: DATABASE ACCESSION NUMBER: AK101605
  ref <309>: DATABASE ENTRY DATE: 2002-08-28
atcggcggccgcctgtcgcagctggagctctactgctacaagctcgagaggtccatcggggagctgcgcagcgacgtcatggattaccacagcgaggggacggtcaacttccggtgcctggagaagaatctgaggcaggttcaaaaatctgtgcagattctgcaggataagcatgagatttcagagacaccgaacgagttctccaaacttcaaatagcgcatgagttccctgctagagcaaatgaagcctctgctttctcaacattcggaagggaaaatgatcacagcacacaagttgcaaaacatgaggttgctttcatgccacttcagcaagttaatgcaatgcaatctcctgctgtgccagtccaaagcagcaatggttatattttgcagcaactagtgcctgtctctttgagcacacaaccagatcagcagcagccgagtcaagctgccgtgtattatatgcaaagccaaaatcctattaagtgcacagagagtgaaccatcagaatccgcggtacatgttattcagtcacaaatccagaatcctgaagccagggttgcagttgacctatctcagaaatctagccaggtgacagaattgtaccctcaaccccaggaccaaaggctacatctgcctgctcagcaggttgagtcacaagcatggcgaacacagccccttgtggtgcaaccgcagcaatacaatattcagcaagttccaccacagctagttcaacagcaaacatcatctcctcaggctcaaagtgctcctcaagtcgctgtcttgtatcctccatactcttctcagaagcctgccagtgctacaacggagccacttctgagaaacatggttgtgcactcgccatactcttcacctcagcagaagcatcatgaagccatgccttctttttatggccaaggcaatacagttttgcttccatcgacagaccttaacatccagcatcagcagccacaaccattgcagcaacacggcctgagctcatgcccacctcaaccaagcaagcccaaccactgtagtgtggcatcctatgccgttcaaggtagtggccaatcctacagcgccacattcaagaatccttctaactgtgctgctactgttgttgctgttctgcctcagcatccagcgagtggtccgatggcatttcatcatttgggaccacaagtcgtgcataatcagccatttggaaatatgtttgaaacagctagtgtggtagggtatccacgggatcgagttgagagcgtagctctcccagtggtaactgcagcccaacctgcagactctgttgccatggctgataagctcaatgcaggtagcaatgttacatccccacgagaatggtcaggttagtgcagaatgaaccagtcatattgagatgtttcactggtctcacaaaggatctccacttctaatatggactggaagcttatcagctctccataaggccacttcaatctggcttcctttttttttaattagccagcagattggtgcaaatccttctactttttttcagctgaagggtcaatctgaataagaatggtagattagttaagtgatgatgctagcatatgtcctcacttttaatggacatacctgcttgtaacctggtaaacttatgtctttgcggtatgaatatatttgacgagtttacacc

SEQ ID NO: 26164 - DNA, 1236 bp, Oryza sativa
  ref <308>: DATABASE ACCESSION NUMBER: AK101606
  ref <309>: DATABASE ENTRY DATE: 2002-08-28
gcgtttgctcgggcggagaaaggaagggcagcgtcgcggttgcttgcttcctcccgaatcctcgcctcgatctcgctcgcgggcgggcggagggatcgtgatcgggatcgggatcgggggcgcgcgaagatgagcgtgatcgacatcctcacgcgggtggactccatctgcaagaagtacgacaagtacgacgtcgagaggctcaacggcgccaacgtcgccggcgaggaccccttcgcccgcctctacggctccatcgacgccgacatcaacgaatgcgtcgagaaagcggaggcggcgaagcaggagaagaaccgcgccacggtggtcgcgctcaacgcggagatccggcgaaccaaggccaagctcgtcgaggaggacctgcccaagctgcagcgcctcgcgctgaagaaggtcaaagggctcacaaaagaggaactcgcgacccgtagtgatctggttgctgccttacccgatagaatacaatcaataccagatggtagttcaagtgcaaagaaaaatgggacttggggcgcctcaggatcccgtactggtggagccattaagtttgacacttctgatggcaactttgatgatgagtactttaagggaacagaagaatcaaatcagtttcgtcgggaatatgagatgcgcaaaatgaaacaggatgaaggtttggatattatcggtgaagggctggaaactctgaaaaacatggcatctgatatgaatgaggaactggataggcaagttcccttgatggatgaaatggacgagaaggtggatagagccaacacagatttgaagaataccaacgtcagactaaaagagaccgttcttcagctgagatctagtcgcaacttctgcattgatatcgtcctgctctgtgttattcttggtattgcggcttatctttacaatgttctaaaaaagtgagaccggactgtgccatggatctattttccacgtcttccggtgatggatggatgagtttcgacgtgtccacgagctgttccctttatttttatctcatctgtgtaatagtagtatggtgttcttccgggacttgcgaacatccttgttgaaagttgaaacagtgagcattgtgcgtgcgaaaacctgacgtcttctgtacatctgcgagtttaattcttagcaagagcgtatcaaacattctgttatgaactatgtataccttctcatgtatattcattgcatcagttctttggttgtgcc

SEQ ID NO: 26165 - DNA, 1585 bp, Oryza sativa
  ref <308>: DATABASE ACCESSION NUMBER: AK101607
  ref <309>: DATABASE ENTRY DATE: 2002-08-28
gaatgagcgtcgtcgtgtgaaattatagctcgacagccatgaagaagagcagagaaggtaacctgaagcatgtcaagggttcgctctgcctcgtcccgcctctacttctcgcggtgttcttctacctgcagttccagacgctgggcctcttctccccgatcttccggtgcggtggccagtccgccggcggcggcggcggcgacgactacgtcgaccgactgcgagcctcggccacgttcctcccgctgaaggacacgcgggagtgggccgagacgtggttcatcagcacgctcgacgacacgtcggagccggagggcgaggccaagaacatcgtcttcccgtccgcggcctccgccggccgcctcctctgcatgtcggcgccgtcacgccgtgacggcaccaggaacgcctacgcgctcgcgtggcgcgacgcgctcccgggcggcgcggagctcaggccgggcctcgcgtacgtgtccgagacggcgtacgaccacagcaacctgtggcacggcatctcggcgctcatcccgttcgcgtcgtggcacgcgaggagcgggtgcagggcgaggcccgcgaggtgggcgctgttccaccacggcgaggtgaggctcgggatgagcccgtggctgacgtcgctggccgaggcgaccaccggcgtgggaatggttgtcgagacgttcaacgcgtccgacgtccccgtgtgcttcgaggaggcggtggtgttcaggcggaacatggccgggatgacccgggagcggcttctcgcggcgttcgacttcatgcggtgcaaggccagggcgcagtgcggcgtggtggcggacgtctccgaccccgactccgccgccgtgcgcgtcaccatcctgttccgcacgggcgcgcgggcgttcaaggacgaggccgcagtcacgcgcgtcttcaagagcgagtgcgcgcgcgtcgccggctgcgcgctcaccacggcgcgctccgacaacctgaccttctgcgaccaggtgaagttgatgagcgggacggacgtgctgatctcgtcgcacggggcgcagatgacgaatctggtgttcatggacaggaacagcagcatcatggagttctaccccaaggggtggcgagagagggcgggaggcgggcagttcgtgtaccggtggggcgcggacaggtcggggatgcggcacgagggctcgtggtgggatccccacggcgagccgtgccccggctcgccggacatcctcagctgctacaagaaccgccagatcggccacgacgaggcctacttcgcgcagtgggcggccagggtgttcgcggcggccaaggagcgcaaggccggcggctcgccggcgtccacgcggcgacgagaagcgccgacgtgccagtgcagctaactgaagtatgatcagttaatgatcaagttgcattgggtcgtgattcgtgaagctttacgtgcacgctggtggcatgcagggagccagggatgataattcaatggtctgattaatattgtgttataccttatatatacttgtatctgaataagcaacctgaaaaatgcaactgtaactcttgatccgagcatttttttaggtgg

SEQ ID NO: 26166 - DNA, 2353 bp, Oryza sativa
  ref <308>: DATABASE ACCESSION NUMBER: AK101608
  ref <309>: DATABASE ENTRY DATE: 2002-08-28
ggacgtcgtctcgtcctcctccccgtctccccgagttgccgagctcgtctcgtccatagaaacgcagcgaattctcgccggatttctcctcctcctccgtgttccaatctgctctgctttctcggctcgtgctggattaccagtagcaatcactgtttcggcaggtgggggggatcgtcggcgtacaccaatccgccgtggttggaggtggtggtggtgcagcaatggtggaggtggggggaagggtgagggggttcgtgcggaacaggtggctggtgttcgtggcggcgatgtggatgcagtcgttcgccggggtggggtacctgttcgggagcatctcgccggtgatcaaggcctcgctggggtacaaccagcgggaggtggcggggctcggggtcgccaaggacctgggcgacagcgtcggcttcctcgccggcacgctctccgccgtgctcccgctctgggccgcggtcctcgtcggcgccgcgcagaacctcttcggctacggctgggtctggctcgccgtcacccaccgcgcccccgtgcccccgctctgggcgatgtgcattcttatctttattggtactaatggtgagacatacttcaatacggctgctctcgtctcatgtgttcagaacttccccaagagccgtggaccgattgtcggtatcctcaagggatttgctggtttgagtggtgcaatcctaacgcagatgtatgcgatgatacattcacctgatcatgcggcattgatcttcatggttgctgttggtccaacaatggtggttattgcgctaatgttcattgtcagaccagttggaggacacaggcaagtgcggccttctgatggtacaagtttcacgtttgtatacagtgtctgcttgcttttggctgcttatctgatgggtgtgatgatactgggggaccttgtcgacttgagccacacagtgatggtcttgttgaccatcattctaatcgtcctcttgatagttccaatagtcatccctgtgatactcagcttcttctcagataacgatgagagtgcctatgcatcactgttgcaatcaccagggaaagaagaagcaagtgcgtcaacaccatctgaagagcaaactgaggttatattcagtgaggtggaggatgaaaagccaaaggaagtggatctacttccagcctcagagaggcagaagaggatagctgaattgcagacaaagctattccaggcagctgctgttggcgctgtcagggtcaagaggagaaaaggtccacgaagaggagaggatttcacattgatgcaggcattgatcaaggcagatttttggctactattcttctcccttctgttgggatcaggatcaggtcttactgtgatagataatcttgggcaaatgagccagtcattgggttatgaggatagtcacatttttgtctcgatgattagcatctggaacttccttggacgcattggtgggggctacttttcagagcttattgtcaaggactatgcatatccaagggctattgcgttagcgacagctcaagtatttatggcatttgggcacttctcctttgcaatggcttggccgggtgcaatgtacatcggcacactgcttgttggtcttggctatggtgcccactgggcaattgtgccagctgcagcctccgaactcttcggcctgaagaacttcggagcattgtacaacttccttaccgtcgcgaatccagcaggctcccttgtattctcaggcattattgccagtggcatatacgactctgaagctgagaagcaggctcaccagcaccataactcgacattgctggcaatgcctgggagattgcttgccatggcctcggatgctactcagccattgaagtgtgagggggccatctgcttcttcctttcgtctctgatcatgtctgggttctgcattgttgctgctgtcctgagcttgatcctcatctaccggacgaagattgtgtacgccaatctgtatgggaaccccaggacatgaagaatatcatcagtcaagacccagaaggaaacaaaatttataaatgttatcaacgcatatactactatctcggattttcaccccaagtcctgttgattcgttggagagcagaagggtgaagttttgttatcttccttctgtttctgagaggcattcttgcgctatcataagttaatgaagttatcagtggctactgaaagaacgatcgttgttcagtatcttgaagtatcgacgtgtaccggtgcacggtggagatgtgttttgcttttcaacttttgctgtgtaaaaactttaaaaatcgcatgtatacatgtacaaatagcgttgcttggtcaaggagg

SEQ ID NO: 26167 - DNA, 1339 bp, Oryza sativa
  ref <308>: DATABASE ACCESSION NUMBER: AK101609
  ref <309>: DATABASE ENTRY DATE: 2002-08-28
ggcaggaggccgcagccgcttcgggatcgggaagcggaggagaggggaaggaagggagagaggcaggcgacccggccgcgcagcttccccccctccctctctctctctctctccgccgccccccctcccccctaccaccaccaccacccgccgccgccgcacgatgagctccggcgccgcctcgcccccgccgccgccgcccgccgccgcggaggacgggagggtcacctcgcacgtggatcccttcctcgtcgaggcgctcgacaaccctcgccaccgcctcatggttttgcgtatggcaatggatatacagaaatttatgcagaatcctcaactgcatgaattcgaattccagcattttccaacttcttatctccgctgtgctgctcatcgtgttgcacaacactatggtttagagactacagtagcagatagcttagtagatggttcagttagcaagatagttgcaaagaaaacatctgaaagcaaacttccagttattgcattgtcagaagttcccagcaaacaagcaagaaatgagcatgaagctgcagagaagcttaagtttgttatttgtccaaggcccaaggctttccaatggtgcaggtgatgccggtgccaagaacaatgcagcaagaactgttgaagagaggatagaggaatacaacaaagcacgagcacgcattttcaacggttccatttctgatattgaaggcacaagtgatttgggagctttatctgttgcgagagatgaaccaattaatgttgagcctcctgttgatgagaataaggtgaacacaatgaacagccgttccagagttgctgtttttaaggacactgaaaaggatcgtagtgatcctgactatgatcgtaactacaagaggtatgttaggggcccagtgcacgacttcaatgtgagtcctggtggcttcaattttgttgtgccacagtttatgcagtatggtgttggttttatgcagtctgctaatatgtcaagaaaccaaccttctgtgtactttggccaacccgatttatctatgggctcctcttctggaactgctgtctacccacagtggccaactccagcaatgatatacccccattgctatgacaatcttgggcatatgatttctcaggttccggtttaccagtccttcaaccatggctgagagatcctacttgctggaatgcgccaagtttgttaaaacttgctatgttgtgttgtcatatgttgagtccatttgtagtcaaactttcccagcgtcgaacttccgtgtagcgtcaaaagatagctgtataagaattcctatttcgatgagacgttattgtgcactaattt

SEQ ID NO: 26168 - DNA, 1896 bp, Oryza sativa
  misc_feature (2)..(6): "n"=any one base of a, t, c, or g
  ref <308>: DATABASE ACCESSION NUMBER: AK101610
  ref <309>: DATABASE ENTRY DATE: 2002-08-28
gnnnnngacctactctctctctctgtctctcgctctcgccgtcgccgagctagttgagccgcggatggatagccccggtggtgcggcggcggcggcggcggcggcggagtccagcaatcgcgcgggagaagatgctaaaagtgatggtgtatcttgtcagaattcgcgacggccaaacctttcattacaaataccaaacagggcatttgatgacactctgccaacgtcaactagaatcaaaatatcacccagcccaaattctgcaagaagtggtttaccaccaaggccgaattcaactagaacaaaatcatccatcaggggcatcattccacaaaggagcttcaaagcaaagagttcattacaggatggtgaccagacaattcttctaattcctgacacaccatcatcatcaggacagcaggtgaaggcaactacatcaagatcattttctttcacaaaggtcatcaactccttatcagcgaagcgaacccactctcttccagttactcctgttgcagcttcaggaccttcttctcatgaaggtcatgcagacaacctgccaagtacagttaagaatgaggttgaaacacaaattaggcgctcactctcagcaccaggaaatcatgatagtaaggatctgaggaggacggcttcatcaggccttatacgtgtgattcccacaaccccacgacctgttcctgttgaaactgttgcatcaaatgatggcattgaagaagcagtagatgctcctgaagatggaggtgaagacattcctgaagaagatgctgtctgcagaatttgcctagttgaactcaatgaaggaggtgaaacacttaaattggagtgcagctgcaagggagaacttgctcttgcacaccaggagtgtgcaataaaatggttttgcatcaagggaaacaagacatgcgatgtttgcaggcaggaagttcagaatctacctgtgactttattgagaatacagattcgaactgttaacagacaaccgcggaatggtgttcagcaaagagcagcacatccacacagattttggaaggagactccagttctagtcatggtcagcacgcttgcgtacttctgtttcttggagcaactcttggttgctgatatgaagtcacgtgcactagctatttctttgcctttctcctgtctcctgggcatattttcttccatcctcgcatccacaatggcaaccgataattacctatgggctttcgctacgttccagtttgctttcctaatcctatttgctcatattttctacaacttgttaaaaatgggggcagtccttgcaatcctacttgcatcgttcactggtttcggcatcgctattagtctaaatgcaatgctaatagaatacctgaggtggagactcctgcggaatcaacggttaactcaacgtagaaatcacagacatggtcaatctggaaacaatgcttcaaacgagaacactgcaagtaatgctaggcagcaaggcagcggaagcgatcaacagtctgcagaacatggctgaagatgatccatctgtggttttgcaggtatcatggtgatgataaaattcaaaatcaaaagtgttaatgaatgaatggaataaaggcgccactggtaaaaccgcaaatctgcaattccaagaatgccatggccggttgccacctaagttgatcgtgaaacaaagttattattcagaaaaagggggctctcaagtctctcaactctgaaccaaaaaggtccagcagtctccatttactcccggttatagtttagtagtccagtgtgatatgtgtgtttatgaaatgtataaattgcgaaagcaaatactacacaccgacctttgtatcacaaccatgaacaaactgtatatagctcatcgttgtcgatttt

SEQ ID NO: 26169 - DNA, 3158 bp, Oryza sativa
  ref <308>: DATABASE ACCESSION NUMBER: AK101611
  ref <309>: DATABASE ENTRY DATE: 2002-08-28
cctctgtctcgcgccgccgccgccgccgcagcaaaaccctagcctccgccgccgtcgttccctcccgccgcctcgcgatggcttcgtcgcagggcctcaagaagaactaccgctgcgaccgctcgctgcagcagttctacacgggcgggccgttcgccgtcgggagctctcccggaggcggcgaaggcgaagtcgaaggaggcgaggccgaggccgaggcgttcctcgcgtgcgcctgcggcggggaggtgcgcctggtgtccgccgccgacgcgtccgccatcggggagccgatcgagggcgaaaacgaggccgtcacggcgctcgcgctgtcccccgactcccgcctcctcttcaccgcggggcacagtaggcttattcgagtctgggacctcgcgtcccgcacttgcacacgcagctggaaggggcacgatggtcctattagggccatggcctgccatgcttctggtgggttgcttgcaactgctggagcagacaaaaaggtgtgcgtttgggatgttgatggtgggttttgcacacatttctttagaggccacgcaggtgttgtgacgactgttatgttccacaaagatccgaagcgccttctgctattttctggaagtgaagatgccactgtgagagtttggaaccttgaaagcaaaaagtgtgtcgctgtgctgaaagagcatttttcagctgtgacatcattagccttatctgaagatggacaaacattgcttagtgctgggcgggataagattgtgaatgtgtgggatgttcgtaagtacaactcaaagaagacaataccagcatttgaaatgatagaagatgtttccttcattggaccaggaagtaatttattgtcttgtttgggtgaaccggcaaatataaaacgcaaaacagatggttattttcttacggttggtgaacgtggagtagttcgcatctggtgcttggaaagtgctcagtgtatatatgagcagcaatcatccgatgtaaccgttaacacagagaatgaggagtctagaaggggttttacttctgctgttatgttgtcagatgatcaaggactgctatgtgccactgccgatcagcagtttttgttctactgtcccacgagaactgacggaggggacttccagctgaacttatataaacgcctagtaggttataatgatgagattcttgatttgaagtttgttggggaggatgaacaatatcttgctgtagctactaacttggagcaggtccgtgtttatgacgttgcatcgatgtcatgttcttatgtgctgtctggccacactgaaattgttgtttgcatcgacacttgtatttcttcttctgggaagacacttgttgtgactgggagcaaagatagcactgtgagactctgggatatggaaaggagaagctgcattggtattggtaaaggtcatctgggagctattggttccgttgcattctcaaagaaatctaagaatttttttgttagtggaagcagtgatcggaccatcaagatatggagctgggatgatacacttgatgatgttggcagtgaagttcctctcaaagcaaaagctgttgtagctgcacatgacaaagatattaattctctttctgtctcgcctaatgacggtcttgtttgcagtggttctgaggaccgtactgcatgcatatggaaacttccaaacttagtgccctctgttgtccttaaagggcataaaaggggcatttggtcagtcgagttttctcctgtggagcagtgtgtcattacatcatctggtgacagaacagtcaaaatatgggctgttgctgatggttcatgcttgaagacatttgagggccatacatctagtgttttacgagcctcattcctttcacacgggacccaatttgtttcttgtggaagcgatggccttgttaagctatggaccatcaaaacaaatgaatgcattgctactttcgataagcatgatgggaaggtttgggcactggctgttggcaagaaaactgaaatgcttgctactggcggaactgatgctgttcttaacctttggcatgactgtaccatggaagataaacaggaagattttcgtaaaaaggaggaggaactgttgagaggtcaggaattagaaaatgcagtatcagattatgactatgcaaaagcaatacaacttgcatttgagcttagaagaccccacaggcttcttgagttattcacacagctttgcagggagtctgatctggaggacccaatagaaaaagcccttattggtcttccaaaggaagggcttcgcgtacttcttgagtatatccgggaatggaacacaaaacctaagctttgtcatgttgcacagtttgtgctttttcgggtattgaggagcttgcctcccactgatatcctggagataaagggcatcagtgagctccttgagggacttattccatattcacagaggcatttcagcagagttgatagactagtacgaagcacatttttattggattacaccttgacccggatgtctgttgtagatccggacatagatgagggcacaaccagagatgacgcaaatggctcatcagtagagaattgtgaaattgcacaggcgaagcctgatgcattggtagcagaagagaacttgcaaaagtcggtaaagaaaagaaaatcaagcaaatcaagcaaaaaaggcggtaagaaggtgaagattgcgtccacggggggcagtaaggatgttcctattgaggcttaaatagttgacaaaccgcagttatatgttattcgcaccaccaattttgtagctgctgttttatctggtatgttgcagcatgaatcacatgttttaccttttgacccactgtacagaatgcattctttgcttgagttagaaagatctggtggctttcagttctaaatttctaagtgcttcagaaagttttaccgtccttgatagttgttgccatcttctgcgttgggtacttgggttagtttgccttgattaatttccatgtgtgtgtatggcagtggcacggaagcggtacccagcagcaaataaagttgcttgctccacttgtaattgttggatctgcgatctggatgtcggctctcttcataattcccgtccttgtcatctggcagaaattttttatggttcggt

SEQ ID NO: 26170 - DNA, 2053 bp, Oryza sativa
  ref <308>: DATABASE ACCESSION NUMBER: AK101612
  ref <309>: DATABASE ENTRY DATE: 2002-08-28
tggtcctccaaagcaccagcgccggcaggaggtccccccgccggattcgattcccggcacgtccttctcctccctttctcgcgggcgccgcacgccccttccccctcctcctcctcctcttggtctgatgaatggggagagcctcctcgaccgcagctcctccgccgacgccgccatgaacgacgccgtgcccggccaccgccaccaccacccgcttagcgtcttcctccgggacgccaggttggcgttcaggtgggacgagctcgggagggagatcatggggattgcggtgcccggcgcgctcgccctcatggctgacccggtcgcctcgctcgtcgacaccgccttcattggccacataggcccagttgaacttgcagctgttggtgtatctattgccgtgtttaatcaagtatcaaggattgcaatatttccccttgtcagtgtcacgacatcatttgttgcggaggaagatgctacatccagtgacagagaaaaatatgaaataaatggcgagaatgaattcaatgtttcagacagtgaaatggaagagctggtttctcatgaagaggctagtgctgctcccagtaagtcgtctttcgaaactgactcaagtgatgtcaaaattgaacataagcggaaaaacattccatcggtgtctacagcattactacttggtggggtgctcggccttttacaagcactgcttcttgttatttgcgcaaaacctctcttaggctacatgggtgtgaaacagggctctgcaatgttgatgccagcactaaagtacttggtagtcagatctcttggtgctcctgctgtgcttttatctctggcaatgcaaggggtatttcgtggacttaaagatacaaagacacctctttatgcaactgtggctggagatgcaaccaacatagttttggatccaatatttatgtttgtcttccagtatggtgtcagtggtgcagcaattgctcatgttatatcacaatatttcattgcatccattctcttatggaggttaaggctacatgttgacctacttccacccagctttaaacatatgcagttcagtcgattccttaaaaacggtttcctattacttgccagagttattgctgcaacatgctgcgtgacactatctgcatcaatggctgcacggctaggttcagttccaatggctgcatttcagatttgcttgcagatctggctggcttcgtctcttcttgctgatggattggcttttgcaggacaggctatacttgcaagtgcatttgctcgtcaagaccattctaaggccgcagccacagcttctcgtatattgcagctgggattggttttaggacttctcctaagcatttttcttggcattggcctccgtttaggatcaaggttatttactgatgaccaggatgttctacatcatatttacctaggcataccgtttgtctctctgactcaaccaatcaatgcgttagcttttgtttttgatggtatcaattatggagcatcagattttggatatgctgcttattcaatgattcttgtggcaattgtcagcatcatcttcatagtcacactagcaagttacaatggttttgtcggaatttggatagctttgacagtctacatgagcctccgaatgcttgcaggattcttaaggatagggactgcacgaggaccatggactttctatgcagctcaacgcatgcattctcatgaggtggttggactttgttgaacaatactataggaagacaccatggatactttgtaaggttttgcaggtttggtgggaatggaggttgtttgaacaaaagaaaatattcaactgtcatgtacatagataatcacacatgttactactattctaatagattctcccctgtcgtgtatgttgtatttgcccatgtatagttcagtatgttcggctggctattttgtaacaagtttggatataaagtcacgtagcataagatgtttgcacaccgtgagatatacggagcattggcatttgatttttaaaacattaatggaaattttaccagatgcc

SEQ ID NO: 26171 - DNA, 1643 bp, Oryza sativa
  ref <308>: DATABASE ACCESSION NUMBER: AK101613
  ref <309>: DATABASE ENTRY DATE: 2002-08-28
gtcgcctccttcttgctgccgccgccatccccggttcggttctctcctcttctttagatcagttaaaataaatggctgacgcagaggacattcagccccttgtctgtgacaatggaacggaatggtcaaggctgggtttgctggagatgatgctccccgtgctgttttcccgagtattgttggccgtccgcgacatacaggcgttatggttgggatgggacaaaaagatgcttatgtcggtgatgaggcccaatccaagaggggtatcctaaccttgaaataccccattgagcatggaattgtaagcaactgggatgacatggagaaaatttggcaccacacattctacaatgagcttcgtgtagcaccagaagagcatccaattcttcttacggaggctccacttaaccctaaggccaacagggagaagatgacacaaattatgtttgagacattcagcgttccagccatgtatgtcgctattcaagccgtgctttccctctatgctagtggacgtactactggtattgtcttggattctggagatggtgtcagtcacacagtcccaatctacgaaggttatgcccttccgcatgccattctccgtcttgatcttgctggtagggatctgactgattccctcatgaagatcctgactgagaggggttactcattcaccacctctgccgagcgggaaattgtccgtgacatcaaggaaaagcttgcatacgtcgctcttgactacgagcaggagcttgagactgcaaagagcagctcatcagttgagaagagctatgagctgcccgatggacaggtgatcaccattggcgcggagcgcttcagatgcccagaggtcatgttccagccttctctcatcggcatggaagctccaggcatccacgagacgacatacaactccatcatgaagtgcgatgttgatatcagaaaggacctgtatggtaacattgttctcagtggtggatccaccatgttccctggcatcgcggaccgcatgagcaaggagatcaccgcgctcgcgccaagcagcatgaagatcaaggttgtcgctccgccagagaggaagtacagtgtctggattggaggatcaatccttgcatctctgagcaccttccagcagatgtggatctcaagggctgagtatgaagaatctggcccagctatcgtccacaggaagtgcttctagatgtggcctagctgtatctttcatgagaaccccttgtctattagcattagctggctgtttcatggacaaaaaaattgttgggtctgatggcttgtctatgggtgtatctactctgattagctccggtttttgtgtatgccaatataattattccgtaagtacgtggggagtcaagaacattatgtgtgtagtttgatttcataaattgatttgagattcttgaacttttctagtaccgcaactgctagtctgcaaccttgcaatgttcatcctctttgtcatgagcttgtactacttgaagatactatgcccctgtttggggaggtcgagattttaagaagtagctagctagtgaaaatatgaaaatgctaggattcccaaattgtagctttttgttcattttcagggttatataattacatattctcaaattgtcggg

SEQ ID NO: 26172 - DNA, 1793 bp, Oryza sativa
  ref <308>: DATABASE ACCESSION NUMBER: AK101614
  ref <309>: DATABASE ENTRY DATE: 2002-08-28
gggccgagagggaggcgtccgcacgtttcacggtctctctctccctcctcgaccagccgtccacacgtccacttccccatctcctcctcctcctcctcctccccccttcctgcccttgggtcagacgacgaccgcgcgcactctgccgccgccgattcattcttgattgccctgtgaggctgcataaaggctccatcataatccaagaacttgttggaggctcctaaagaataaccaagttggtcttgctcaggtggttagctggtccggtagggctggcttgaaaagagcaaccacggctccaaagaaaggatcccgtgttgcactaagaaggggaacacaatgtgcccatcgctttcctaagtttcttcttgcgtccccttctttccacggtggtcgcggtgccctcccatctgcaggggggcatccttctgatttgacctaccttgccggtggtggtgctgttcaagtctgaattaggctttagcattgtagatatttttttagtagtagtacagatattaagcattgtaagtatggtatcaaccacggagttcaaaggtgaatattcgttgccaagcaagaaatctcctcttgatcaatttgaaggtgtgaagacacatctttaccgtctcggtgcagaacatgaaaatggtaccctcaaaagctttgcatatactgatcagggcagcccaagtttgcttgatacaatcattctttctcagtgggaggattatgcttggaagggccattttggatatgacgtaactgcttgcaatctcaaggttgttgaaggtggatggagttttgttgttcagctgaatgataagtggaattcatgtgtcctcaaggaacatgacaagttccttgaacctgttggatgcctgaagccaaactgtatgaatagttatgatgaattgcttctgtgcattgctcaaggtgacaaggatatacctgaagttgttccttcaacaaaaccaccaaaggatggactactgctgattgcaaatgcatatcctgttgaatatggtcatatcttcttggtcccaagcgcaaccaatcagctatccttcttctgggacaaaaggatgtttagtctgattgcaaggattgcctctgaagtaaatagtgcagcattccgggttttctttgatagttgcacatccacgatgccagaccacatgttttttcaggcttgttacttcgcaaacccgttgccagtggagtctgcatcaactgttgcaatttaccacggcaaagccacatcagccgttcacctgtatgaaataattgattatcctatgaaggctcttgtgttaactggcaaggacgtaaacacgcttgccaattttgtcagtgaagtatctttaactctgcatgacaataatactgcgtacagcctgctgatctccaacaatggcacaaaggttttcttgtttccacaggtgaagaatctggctactggatgttgtctttctgcctgggagtgcagtggctacttcatttatcgcgccaagtacgattttgacagagcttctgagaatgaaatttccaacagaatggcgtcagtcacactccaagatggcgcattcgagaacctgaagaatctttgctgcgctgttgctgatgatcttgttatgtaaaagcttgtgaaagaatcaaaaccacaataataaaaccgtgtgagggtggtccacttgttatgtctatagcattttaatgcatggatgatggtaattgaacctatgtctgaacatttggattgatcaatggagcatgctgttcttatggtg

SEQ ID NO: 26173 - DNA, 1900 bp, Oryza sativa
  ref <308>: DATABASE ACCESSION NUMBER: AK101615
  ref <309>: DATABASE ENTRY DATE: 2002-08-28
ttggagcgagagaggagacaaacccctctccacctccccccaaaaccctaacccctcctcctcccacctcccgccacgccaccatggcctcgcccccgccgccgccgccctccgccgccgcccccggatcgccgccgtcggcgcaagtggtggggaacgcgttcgtgcaccagtactacaacatcctgcaccagtcgccggatctcgtccaccgcttctaccaggacgggagccgcatcggccgccccgcctcccccgccgccgccgagatggacaccgtcaccaccatggaggcgattaacgcgaagatcgtgtccatggacatcgtgcgggcggagatcaaggcggtggacgcgcaggagtcgctgggcgggggcgtcacggtgctcgtcacgggccacctcaccgggagcgacgacgtgcgcagggagttctcgcagtccttcttcctcgcgccgcaggagaagggatacttcgtgctcaacgacatcctgcgctacgtcgggggggagggggatcaggaggtggagccggagccggagctggagctgtcgtttccgccgtcgcagcagccggattcggtgcctgctccttcggcgaatggcactagcgtgccgcgggaacaggaggccttctcgcagccggagcagcatgtggctgatcctgcacccaatgctcaggaggctgatctcaacggcgaggaggtttataacccaccgaacaacacagaggggcctgttgtggaggaaacgccgattcctgaagttatagatgaagtgccaaataacgtagctgtggctatgccgactccgcctgcccctgcccctgcccctgtaccacaagaggaggcccccaagaagtcgtatgcttcaattgtcaaagtcatgaaagaaattccaccacaaatatctgcaattccttccaggccggcaccaccaaaacaagagaagcaagttgctcctgcacctgttgctccggttgctgatgctccaactttcagtcctaatcctgaaagcagcaacattcaagaggctgaagttgatgcacatgcgatatatgtacggaatctgcctttaagtgccacgcctgaacaattagaagaagcattcaagaaatttggcgctatcaagccggacggaatccaagttagaagtcacaagattcaagggttctgctatgggtttgtagagtttgaagatcccagttcagttcaaagtgcaattgcgggttctcctgtgacgattagtgaccggcaatgttatgtggaggaaaagagaactgctggttcacgtggtggtggcagaggaaggtttgctcctggtagaggtggtaacttccgaggtgaaggcatgagaggccgcgggaattacaccggagggaggggctatggaaggggtgagttcaattatcgatccgactatggaggcagaggcgctggtagaggtggttcatcacgtggtggtgatgttggctaccagcgggttgaccactctgctggtcgtgctgctcgggcgccatcgggcactagtgccgttgcaaagtgagcgagttagttgctatgcctcggttgctatgcgtcggtgaaaaagtttgatattttcgtgggttggaattatcaacattcgggaagagggtatgtgttgagttgggtttatgtgagagattatcagcaaaaatcgggtcataaattgaagcttcccttgttttgtggcaagggagagcagtggtgatattggtttactaattgtagcatatacgtctattcagaatttcagatgtagtcctggtaagcttggccctttttggagtacctgatgtttgtttttccccctctttttgtccctcttttctagcaggatcgattctattacgaatgagaggtgatgagttatagattccg

SEQ ID NO: 26174 - DNA, 3238 bp, Oryza sativa
  ref <308>: DATABASE ACCESSION NUMBER: AK101616
  ref <309>: DATABASE ENTRY DATE: 2002-08-28
gagttcaaaaccatgatgcgaacaagtgctcgctccgaccacgcggcaccacgcgtctcgcgctcgcacacgtgaatacatatattttctcgcgccaagaagccgcgagccctctagcctctcgcgaacctctcgatcttctcgccgccatcgtcgtcgtcgtggtcgatggcttccacggccgccattgctgcgctcgcgttggtgttcttcgtgttgctgtgtgtgagagatggtggcggcgtcgacgcggcggacacgctgtcgcaggggcagtcgctgggcgcgaacgacatgctggtgtcggcgaacggcacgttcaaggtggggttcttcacgccggcgggtggcgacccggggaaggtgtacctcggggtgatgtacgcgacgtcgaacgtgcagacggtgatgtgggtggcgaaccgcgatgcccccgtgagaacggcggcgggggccgcctccgccaccgtgacgggctccggcgagctgctggtgaaggagggcgaccgcgtcgcgtggcggacgaacgcgtcggccgcggggcgctccaaacacacgctgacgatccgcgacgacgggaacctcgtgatctccggcagcgacgccgccggcacggacgtagagtgggagagcttccaccacccgacggacaccttcgtcccgggcatggagatcgcgctccggcagaccaacggcgaccgcacgctgtacacgtcgtggaggagcgacgccgacccggccaccggcgacttcacgctggggctggacgcgtcggcgcagctctacatctggcggagccagggcggcaagaactcaacctactggaggtcggggcagtgggcgagcggcaacttcgtcggcatcccgtggcgggcgctctacgtctacggcttcaagttgaacggcgacccgccgccgatcgccggcgacatgtccatcgcgttcacccccttcaactcgtcgctctaccgcttcgtgctccggccgaacggcgtcgagacgtgctacatgctcctcggctccggcgactgggagctcgtctggtcgcagccgaccatcccctgccaccgctacaacttgtgcggcgacaacgccgagtgcaccgccgacgacaacgagcccatctgcacctgcttcacaggttttgagccaaaatctccgcaagagtacaacaacggcaactggacgcagggctgcgtgaggagcgttccactgacgtgcagcagcgagcggaacaacacgaccgccggtggcgccggcgccggtggcggcgacgggttcaccgtcatccggggcgtgaagctgccggacttcgccgtgtggggatcgctggtgggcgacgcgaactcgtgcgagaaggcgtgcctgggcaactgctcgtgcggggcgtacagctacagcaccggcagctgcctcacctgggggcaggagctggtggacatcttccagttccaaaccggcaccgagggagcgaaatacgacctctacgtcaaggtcccatcttctctattagataaaagctcggggcgatggaaaaccgttgtcgtcgtcgtagttgtggtcgtggtggttgtattgctggcatcaggccttctcatgtggaagtgcaggagacgaattaaagagaaacttggcattggtaggaaaaaggcacaactcccgttgctgcgtcctgcgagggatgcaaagcaggatttctcagggccagcgcaatctgaacacgagaaatcagaggagggcaagaactgcgagctgccgctgttcgcgttcgagaccttagcgacggccaccgacaacttcagcatctcgaacaagctcggagagggaggcttcggccatgtctacaagggaaggctccctggaggagaagagatcgcggtgaagaggctgtcccggagctccgggcaggggctggaggagttcaagaacgaggtgatcctgatcgcgaagctgcagcaccgcaatcttgtcaggttgctgggatgctgcatccagggcgaggagaagatcctggtgtacgaatacatgcccaacaagagcctcgacgccttcctcttcgatccggagagaagagggctcctggactggaggacgaggttccagatcatcgaaggcgtggcgcgagggctcctgtacctccaccgcgactcgaggctccgcgtggtgcaccgcgacctcaaggccagcaacatcctcctcgaccgcgacatgaaccccaagatctccgacttcggcatggccaggatcttcggcggcgaccagaaccaggtcaacaccaaccgcgtcgtcggcacactgggctacatgtcaccggagtacgcgatggaggggctcttctcggtgaggtcggacgtgtacagcttcggcatcctcatcctggagatcatcacgggccagaagaacagcagcttccaccacatggagggctccctcaacatcgtcggctacgcgtggcagctgtggaacggggacagagggcaggagctgatcgacccggcgatccgggggacgtgccccgcgaaggaggcgctgcggtgcgtgcacatggcgctgctgtgcgtgcaggaccacgcgcacgaccgcccggacatcccctacgtggtgctcacgctcggcagcgactcctccgtgctgcccacgccgcgcccgccgacgttcacgctgcagtgcacgtcgtcgtcgtcggggcgggacatgtactacagggacaaggaggagtcctactccgccaacgacctcaccgtcaccatgctccaaggcaggtaggagtgcgtataccactaagtacgtcttaaaatatagcaatttagaactagattggatatattctagtccaataaatctagataaccatttttttcagatttattaaattaagatatattttttaaattattatattttggaacggaaggagcagtaggaggttgggtgtacaaaactgtacatagacacgaagaaacacgcgctcttctctcgatcgggtggacgatcgagctagggagatgtactgtgtgttccacatgtgttgggtgatttgatagctctgggtgtagagattggtttgcttttgctttgtacatggccccaattttgttactgccggttccggtttttttttttttacactcagttccagttcattgattggttgaagtttgtgtaatccatcatcactgtacaaacaaaactatttaaccaggacgcgccgattaattgggccgcgtgggcccttctc

SEQ ID NO: 26175 - DNA, 1923 bp, Oryza sativa
  ref <308>: DATABASE ACCESSION NUMBER: AK101617
  ref <309>: DATABASE ENTRY DATE: 2002-08-28
ggccgatttggtagtggcaatgcagggattataaatgccagtttatctggctcaacatcaaatattggacagagctcaagtgttaataatggacctacacctgtgtatcccactggaactgaaaagaattctggtgaaacttggtttgaagtgggacgttcacggacgtatacgccaactgctgatgatattgggcatgccctaagattcgaatgtgtagcagtggattcagaaacaaggtcgagtgtgggagctccaacttcaatcatgacatctcgtgtaattcctgctccaacacccactccgcgtcgtctgataccagtgaattcggctgatgtaatgggacactttgatctagacagccgaaattcttcttttgggacattcacagtgttgtcttacaatattcttgctgatacatatgcaacaagtgatacatacagctattgcccaacttgggcactttcatggccttacagaagacaaaatttgctgcgtgaaataattggttaccatgcggatatcatctgccttcaggaggtacaaagtaaccactttgaagaattctttgcaccggagcttgacaaacatggatatcaggcactgttcaagaaaaggacaactgaggtgtacactggcaatctccaatcaattgatggatgtgctactttctttcgaagggacaaattttcacatgtcaaaaaatacgaggttgagtttaataaggctgcacagtctttaactgatgcaattattccagctgctcaaagaaaagtggctttaactcgattgattaaggataacattgcgttgattgcagttttagaagctaagtttggtagccatggggctgataaccctagcaaaagacagctcctttgtgtggcaaatacgcatatcaatgttcaccaagacctcaaagatgtcaagctatggcaggttaacaccctcctaaaaggtttagaaaaaatagctgtcagtgcggacattccaatgctggtctgtggagatttcaatgcaacccctggaagtactccacatgggcttcttgcaatggggaaagttgatctgatgcatccagatctagcaatagatcctcttggaattttgcgaccagcaagcaagttgacacaccagcttcctctggtgagtgcgtactcttcatttgcaaggatggttggtgctggttatgatttggagcaccagaggaggagaatggaccctgcaacaaatgaaccacttttcacaaattgcacgagggatttcactgggaccattgattacatattttacacagcggattcgttatcagtggaatcgttgctggaacttctggatgaggatagcttacggaaagacactgcgcttccttcacctgaatggtcatcagatcatatagcactcttagcagaatttcggtgcaagcctagagttagacgatgataccctaggtacatccatgttcactaggaggtgctctagcggcgtgattaccaacatacacaagggaacataccctcaggggaagtaagattaacaatcttaaggaagggaggattgttatgttcattactcttttcatttctgccctgatttttttagtggctctagctggattgcgactttctataggtgaaatatccacgcaaagagaaatatttaatagcatcattgttagtttttttcaatttcagtctgtctacaatttttccttaccatggaatctagttcttacaagctggaagtgatcccttccataatccattgtgtacgtctcactttttttttttttggctgacatgtaaatctgtcacgtgggtcggtgctagttttcggaaatgttaattgttgtttaagagccatagttgccaactgaagtacagttatcttgaaggaaatgaaattacgggtttggtttgttgc

SEQ ID NO: 26176 - DNA, 1904 bp, Oryza sativa
  ref <308>: DATABASE ACCESSION NUMBER: AK101618
  ref <309>: DATABASE ENTRY DATE: 2002-08-28
ggggccaaaataccggaccacaagcagtaactggaagtggatcaacatcatccgtctgctatagtctactagtacttgcattgcggggagggagacacctattctgctaagctgcccacggccatggagtcgccgctgagccatccggcgatggtcgccttgtcgctgctgctactcgtggcgctctacctcgcgcgccgcgccgtgctggggaagaaacgcaggtatccgcccgtggccggcaccatgttccaccagctgctcaacttcggccgcttgctggagtaccacacggagctctcccgcaagtaccgcaccttccgcatgctcaccccgacctgcaactacgtctacaccgtcgagccggccaacgtcgagcacatcctcaagaccaacttcgccaactacggcaagggcccgatgacccacgacgtgctggaggacctcctcggcgacgggatcttcaacgtggacggcggcatgtggcggcagcagcgcaaggtcgccagcctcgagttctccacccgtgtgctgcgggactacagcagcgccgtgttccgcgacaccgccgcggagctcgccggcatcctggagcgtggtccggcggcgaaggggcgggagagggtggacatgcaggatctgctgatgcgggcgacgctggactctttcttcagggttggtttcggggtcaaccttggcgtgctctccggatccagcaaggagggcttggtgtttgccagggcgttcgacgacgcgagcgagcaggtgctgttccgattcttcgacctgctctggaaggtcaagaggtttctcaacatctcgtcggaggcaaccatgaagcagtcgatccgcaccatcaacgacttcgtgtactccatcatcgacaggaagatcgaacagatgagcagagagcaacacgaattcgccaagaaagaggacatactgtcgaggtttctgctcgagagggagaaggatcccggctgcttcgacaacaagtacatcagggacatcatactcaacttcgtcatcgccggccgcgacacgacggcggggacgctgtcgtggttcctctacgccgtctgcaagaaccagcgcgtacaggacaagatcgcgagggaagtgcgcgacgccaccaccggcgaccgcgacgtcggcgtccaggatttctcttcatttctgacagaagacgccatcaacaagatgcagtacctacacgcagcgttgacggagacgctccggttgtaccctggcgttcccctcgatgtcaaatactgcttctcggatgacacgttgccggacgggcacgcggtgaagaaaggagacatggtgaactaccaaccgtaccccatgggcaggatgaagttcctgtggggcgacgacgccgaggagttcaagccggagcggtggctcgatgacagtggtatgttcgtcgccgagagccccttcaagttcacggcgttccaggcggggccacgaatctgcttggggaaggagttcgcgtacaggcagatgaagatcgtttcggctgtccttctctacttcttcagattcgagatgtgggatgacgacgccaccgtgggttataggccgatgctgactctgaaaatggatggcccgttctatctccgcgcattggcccggtgaagcttcacaccatatcaaaagttcaaaactcaagggcggcgctggtctatttcatccattttggcggggataatgacggttagatatggttgtcgaagacaacagtgctcctaaggtgtaggtatgtaagaaaaataacgtgtgtattatactcttaaaaactttttactagagggctatgtgtactccctccgttccacgtaataagacacgatcaaacatgacaccatcatcaaaattaatctgactttaaatttatc

SEQ ID NO: 26177 - DNA, 2185 bp, Oryza sativa
  ref <308>: DATABASE ACCESSION NUMBER: AK101619
  ref <309>: DATABASE ENTRY DATE: 2002-08-28
ggcttttttccacaccgtcctcagtaaacaaccgataccatccttaagtcgtctcccaacgacagtgatgaaaaattcttgcttaccactggccgctgacactgacactgcctcccccttcaagctagtacctctacctcccaatgccggagtcaccgacatcgccacccacctcgccgctgccgggatcgcccaccaataatgccacgccgccgtccccggtgtcggcgtttctgcgagccaccgtgctgttcgccgccttcctagccctccagctcgtgctcttcaagtccctcctcacgttcccgagctcccggttcctgccggcgccgcgccgcagcaacagcacctgggccaacggcgccgtggacgacgccgaggagtgcaaggccgggctcatctacgtctacgacctcccgccggagttcaaccacgacctcgtcgcccactgcgaccgcctgtggccgtggtactccttctgcccctacctctccaatggcggcctcggccggcccgccgccgaggtaccggcgctctccgccgtcgtgccgaacgcgtcgctgcccaactggtacaacaccgaccagttcccgctcgaggtcatcgtccaccgccgccttctgtcccaccggtgccgcaccatcgacgcgtcgctcgccaccgcgttctacgtgccgttctacgcgggcctcgacgtcggcagccacctgtggggcccgaacagcaccgtcgccgaccgcgaccgcgccggcgcgcggctcctccggtggctcagggggcagccgttcttcgccaagtccggcgggtgggaccacttcatcacgctcgggcgcatcacgtgggacttccgccggtacggcgccgacgggtggggcaccaacctggtgctcatgcccgggatggagaacgtcacccgcctcgtcatcgagggcgaccgcctcgacccgctcgacgtcggcgtcccttacccgacggggttccacccgcggcgcgccgccgacgtccgcgcgtggcaggagcacgtgctgtccctggaccgccgcaacctgttcgggttcgccggcgcgccgcgttccgggttcccggacgacttcagggacgtgctgctggaggagtgcgaggacgccgggagcgaccgctgccgcgccgtggactgccggggcacgcggtgcaacgacgacggcgcggcggtgatgaggctgttcatggggtcccgcttctgcctgcagccgcgcggggacagcttcacgcggcggtccctgttcgactgcatggtggccggcgccgtgccggtgctgttctggcggaggacggcgtacgacgcgtaccggtggttcctgccgcgcggcgaggagggggagtggtcggtgttcatcgaccggcgggcgctgcgggtgggcaacgtgagcgtgcgggacgtgctggaagggtacagcgagcggcgggtgcggcggatgcgggagcgcgtggtggagatgatacccaggctggtgtacggctcgtcgcccgacggcctcggcgacggcatggacgacgcgcttgacgtcgctctcggcggcgtcctcaagcggttccgccaccgccggtggagcattgggcatgaagagcgcccgcctgggcgtttggtcgctggggcaccaccacggcgtggcagcagcaaaacgacgacgcctccaacttctaacgggagaaacggatcggtgattgggcagcgtgcgtcgcggcacagatcaacggcggcgtcctcggcgtacataaaaaccgtcctatcggaagcaccggcatcaagaagcaaaagcttgcagcaatcttgacaagcttttaactttcaaagttaagcatagaacatgcttaggggttaattactgaagtctcagtcgcaatctctctgatctcggatcatggaacaagagggtcaaattcgcaggaggttacatacagaagaggtgatctggggtcctgttgattccggggctcagggtttaagaaatgattaaccagctgtttactgccacagtgccaccgccctcgatgcgtcggtgttcattgcagttgacctaaagatggattatttacagggtctaggggtagaactgtagaacgcgcatctgactgagaggtgttattgtatacttgggcacaggttttgagaaatactataaagctgttggtaccatttgggttt

SEQ ID NO: 26178 - DNA, 2225 bp, Oryza sativa
  ref <308>: DATABASE ACCESSION NUMBER: AK101620
  ref <309>: DATABASE ENTRY DATE: 2002-08-28
gtgactccatgacaaaacaccttcaagtagagacaagacctatacctctctctcctttcctctcttcaaagaagaaaaaaaccagcataggagaaaggaaggacaagatctttccatcaactgtgtgattagcatgccccagaccggaaggtgaagctgctacactttcagatactccatatcaagattcaagagagagctaaagctataggagtgagcagcaatagcaagagccaagaacagctagctactccagctgagagccaagaaccggtcaagctttgcttcttgcacttcttgctagctaaagctactccggtcacttttctgctatagtagctcttggctcttgcttatcacaagagaccacaatcttgatcgaagaaatttgagctagcgcttcgttctgattcttggagatactgggagatcgagctgtggttttgtggctcgtaggatgggagaggctaggagagggcagaatcctcatcatgttcttggctatggcttccatggcaccaccttgcccaactccatggcttctgcaaacctcttcgagcaaggaggaggaggaggaggtggcgctgcctattttggagagctagaagaagctcttgttcatcaggttgccacactcaggaggagggctcaacaaactgcaaccaccaccacctctcaccatggacacaccactcccttctccactgctgctgctgcagctacagcaacagcaacagctaggcctcctgctacactggacatcttcccatcctggcctatgaggaggagctctcttccaacaccgaaggatggatgttcaaatgtaacggcagacacaacggactccgagagcagcagcaagaacaacggcgatcagggtgcagcagcagccgacatggcgagccagtttgatcagatcccacagcagcagcagaagcagcacaagaagatggcagcaagttccactcacagtgaccacaggatgacaaagacacttgatccaaagataatgagaaggttagcccagaaccgagaggcagcacgcaagagccggctgcgaaagaaggcttacatccagcagcttgagagcagcaagttgaggctggctcagatggagcaggatctcgagagagctcgttcccagggcctcttgctgggaggatcaccaggtggaaacaccagcgcaggagcggcgatgttcgacgccgagtacgggcggtggctggaggacggcgggcggcggatggcggagctgcacggcgggctacacgcgcacctgccggacggcgacctgagggcgatcgtcgacgacgccctggcccactacgacgagctcttccgcctgagggcagccgccgccaaggccgacgtgttccacctcatcactggcacgtgggccacccccgccgagcgctgcttcctctggatgggcggtttccaaccgtccgatctgctcaagacagtggcaccccagctagaccctctgactgaacagcaagtggttggcatctgcagccttcagcaatcatcgcagcaggcagaggaagctctctcccagggcctggagcagctgcatcagtcactagctgagaccgtcgccaatggcggctccgtggtcaacgaagccagccttgggagcttcatgggttacatggcccttgccctgggcaagctgtccaaccttgaaggctttgtcatacaggctgataacttgaggcaacagactcttcatcagatgcacagaattctgacaattaggcaggcagctcgatgtttcttggcaattggcgagtaccataatcgcctccgtgccctcagctccctctgggcttctcgtccccgagagatattggtggcagatgaaggcaactgtggagagctaagcatagcagcacaaccatctgaaagccaattttcagctttctgatttacaaggactttgaagactaaccttcagataggagcagaagtaagcaaaactgggaacaaattttggaagtaatctgacacgtgtgggaaacactgatatgagctgggaaacaatgcaagctccagaactaggaagatttctcagaacccagattgcatagaactcacatggtaatttgcctgagatgtcaaatgatttaatgtcctgcccagtgacaacaaaaaggggttagctagattttgttgctgaaatactacttatttatgtgatttagtggcaaattatgtttcccgtg

SEQ ID NO: 26179 - DNA, 2731 bp, Oryza sativa
  ref <308>: DATABASE ACCESSION NUMBER: AK101621
  ref <309>: DATABASE ENTRY DATE: 2002-08-28
aggtttgcagagttcctgttaatgatgagctctacatcaataatctaagaaaccgaggtgtgctgcctgacattagaaggcagaatcacggctcacgcatccttcactcttcttcggttgacatggggaacatgaaggttggcttaactcgggaatcttcaggtccttcatctagaaggaactcaagtgagcaacctcattcgaaaaatgtatccttggaaagacggtggagccttgaggtggccattgaaaaattcattggccatgacgcaactggaagctctggcctagaaagatctgaaagcattaatgattctgatctgcctatgctggaacgggaatatatgcaaggtgttctaatcagcgaggtagtacttgacaggagtttttcggattcgtccaagaaggcaaaacggcgccagaagaaaattgttagggagacaaaaaagccaggagagacaataattaagggtcacagaagctatgatcttatgctcagtctacagcttggaatcaggtaatccctctgagttcggcatcgtagttgcaagatttgaatgacatctgttcgttaatttctttggtcccactaatactgtcctgacctactctcttctgttgatcgttttcatttatagatagtcttctctagttctcttgacaacatatcctaaaactataacagaactatttcaggtccctctagttgtctaatgcttgtgctgcgtaatagtgtccacggtaacatttaccttttgaaaagttagaatgcaaggttttttatttgctagctggtagtagtttttttggattctaagatacagcacctggcctaagcagggagtatttctagcagcactttttattgctcttaagaactttcgtgcaaaatattgcatcatctattaagttaaaatgagagttttcctagttagtaggacaatatgatggtgatacatcagtaataattatatcctataatgatcaatgcattattgtgtttaggtacacggtaggaaagattacgcccattcagaaacgtgaagtccgtgcttcagattttggtccacgagcaagtttctggatgaccttccccaaagaaggatcacgacttactccttcacatcctgcagaagacttcaaatggaaggactattgtcccatggttttcagaaatttgagggagatgttcaagattgatgctgcagattatatgatctctatatgtggaaattctgcacttagggagttatcttctccaggaaagagtggaagtgtctttttcctatcacaagatgatcgattcatgatcaagactcttcggaaatctgaagtccaggttcttttacgaatgcttccaaaatattaccatcatgtccgtacttatgagaacaccctcataactaagttttttggcctccacagggtgaagccttctagtggtcaaaagtttcgctttgttgtaatgggtaacatgttttgcacggaattgaggattcatcggagatttgatttgaaaggttcatccttaggccgttctactgacaaaatcgaaattgatgagaacacaactctgaaggatttggatcttaactattcattttatcttgaaccttcctggcgtgaggctttacttaagcagattgaaactgacagtgaatttctaaggacccaacggataatggattacagcttattgcttggtgtgcactatagagctccccagcaccttcggacgcgtgcatcttatcatcgaagcatggcagcagatagattaactgttctttcagaagaagacgctcaggaggacgatgctttcaactacccggaaggtctagtgttggttcaaagaggtggtgatgaaaacagtgtggttgttggccctcacataagaggtagccgtttacgatcaacagccgctggatttgcggaagtagatctactacttcctggtacagccaggctgcagatccagctaggggttaacatgcctgcaagggcagagcagaaccctaaagaagaggaaagcaaatcgtttcgggaggtgtacgacgtggtcctttacctgggtatcatagacatattgcaggagtacaacatgtcaaagaagatagagcatgccgtcaagtccatgcagtacgactccatctccatctccgccgtggacccccagttctactcggagcgtttcctcaagttcatccagaccgtctttccagaaaattcatagtgccccagccagcagccattgcgattatttcgtccgcggattgattctcctgccttgtgttatgacatgaacttcattcatagtgcctcagcagcaggtactaattttttgccgagcagcatcctccttgaaacgatatggcactgcgggatggcagggaaagcacgcgaatttattctttagttctgaaggtgctgaaactgaaatgtgcgaaaggcggtcatggagaactggagatgggagagaatttgacgtctttctcttgatggaaggaaggcacaaccgcacatgtctagggcaatgtactaccgtcggtgccatgtgcttgtgagcctctcttgtttgggcacaacacaacaaatcagaagcaaaagcgcagtgcactcatatgtgccagaaatatattttccattccagagtatactgttagttgtataggattacagtgaattgccaccttggtcttaatgttgtatgaaagatttttcacgtttttgtgat

SEQ ID NO: 26180 - DNA, 1569 bp, Oryza sativa
  ref <308>: DATABASE ACCESSION NUMBER: AK101622
  ref <309>: DATABASE ENTRY DATE: 2002-08-28
ggtatccaaactctcctttaccccaatctcgtgagcggcgacgaactttgccaccgatttcgatccttttttttggcagcgtgtagtgacgcgagagagaaatggcgagcaagaggagcgtgggcaccctgacggagtcggatctgaaggggaagaaggtgttcctccgcgccgatctgaacgtgccgctggatgacagccagaagatcaccgacgacacccgcatccgcgcgtcggttcccaccatcaagttcttgatggggaagggcgccaaggtcatcctggccagccatctgggtcgcccaaaaggtgtaaccccgaagtacagcttgaagcctcttgttccgcgcttgtctgagcttcttggtgttgatgttgtgatggccaatgactgcatcggtgaggaagtccagaaattggctgccactttaccagatggtggtgttctgcttctagaaaatgttcggttctacaaggaggaagagaaaaatgaccctgaattcgccaataagctggcatctgttgctgacctttatgtaaatgatgcctttggcacagcacacagagctcatgcttcaacagagggagttacgaagtatttgagaccttctgttgctggtttcctcatgcagaaggaacttgactatcttgttggagctgttgccaaccccaaaaaaccatttgctgccattgttggtggatccaaggtgtcaacaaagattggggtgattgagagtcttttggcaaaggttgacatcctcatactgggtggtggtatgatctatacattttacaaggctcagggatacgctgttggaaaatctcttgtggaggaagacaagctcgaattggctacctcgcttattgaaaaagccaagtcaaagggagtctccctattgcttccaactgatattgtagtagctgataagtttgctgcggatgcagagagcaagactgttccagcatctgctatccctgatggttggatgggccttgatattggcccagactccatcaagactttcagtgaaactttggatactaccaagactgtcatctggaatgggcctatgggagtgttcgagtttgagaaattcgctgctggcactgatgcaattgccaagaaattggctgatatcaccgccaaaggtgttacaacgatcattggaggtggcgattctgttgctgctgtcgagaaggccgggttggcggacaagatgagccacatttcaacgggaggtggcgcgagcttggaactgttggaaggcaagaccctcccaggagtccttgctcttaatgacgcataagactggtggcaagcatatgacgcaatttccctagccttttgcggtggtcttgttcggaccttggtgtaagtttgtaagaatgcaaagtcagtcgtctgctacctttgaacttgaaataggcttcgcttcaggtattgctagatgacagtgaataataataagcttttggcgtcctcggcatgagagaaatgcccggcacaaacaaactataatggtgtactatattttgccatattctagttgcagcagtttacactaagct

SEQ ID NO: 26181 - DNA, 3155 bp, Oryza sativa
  ref <308>: DATABASE ACCESSION NUMBER: AK101623
  ref <309>: DATABASE ENTRY DATE: 2002-08-28
gggcggcatagttgagcacttgagtggtaaaattgagctagctctttctcctcctcctcctcttcctcttcttattcttgttttctgatgttcttttcatttcctgattattaccttctcgagttcccaccagatcggacggagtggcggcgttgtacctgtcgtagagaagaagcgaacggtgggcggccgcaggatgtcggagctggaggtgtatagcttgctgcagaagatggcggcgatgagggacggcggcgactggccggccggtgcggagttggagttgcaggagttgtacaccgtcctcgagaaggtgcagcgcaagatggctcacgcggagccgctggtcgtcgtcgacagcggcaactccgcccgcgccgcctactccctcttcctcgcagaccttcgccgcgtcacgttcaccgtcgaccaagccctcgatagctactccgccagcgcccgccgctccccgttcatgcaccgcgtgcgttcggtggctctgatggggatggcggcatatggtgttttcgcgtttctctcggcccgttcgtcttccctgctgcaggaaaagcttttgccgcagccgctagagctgcgccccaagatcgccagaaagttggaagaggccgtgaaggacgtgaggatgcttctccgcctcttcagtacctacgtcgccgatctcctgccgccgccggagcaccagcagccagagcctggtctcggcgctgaccccgacgatacgtggtctcttgccgatcaaaaagaagccaacctccttgtcaaaggaagagaacaggacagatgtaaggtacggcagatcctcgaacatcctggaacgaaagtggtcgtaattgtaggaatggccggggccgggaagacgaagctcaccaggcatctgctgtgcgaaatgtgtagtgctactacgcatggcttcaactactctctttgggttacagtgtcccaagatttcaatccagaatggatttatcggcaggtgatgtctaagctgagcgatcaattgaaggcaggcgaagatgctgaaagcttctggtggtctctaaattcagatctaaatgaaggcttgatcaataagaagcatttgcttgtgctcgatggcgtctggaacgaagaccctcgtaagtggaaggaactgatggatctcctctacggcaattgcacgcaaaagaccaaaatcatcgtcactaccaggattcctgcggcggctgctgctataagctctgcagtaatctaccacctgcacccgttctcggtggagcataccttggagatgctccaaacgatcaatggggagctgcctgagaagttgctcggcggtggcagtagcaacgctaccgtgtctactgctgcggctaaagaattgagtaagaggaaggtcgcagagaaatgcagcggtttgcccaccatcataaagttcttgagctcttctcttgaatctatctgtgcaaacgaggttgctgatccactaaaacagtttgatatgatgtgtgctggcaaccaaggactgctgcacatcgctgaggccagctataaccatcttccaccacatctgaagcggtgcttcctctactgctccttgttcccatatcatcacatctttgatactgacgagatgattagcctgatggttgctgaaggtttaacacagactacaagcagggaagcccaagtggatggtgatatcagcaggcttcagagtgaatgctttgatcttgtcaataatcctgggtctaatgggggaatcagaagaggatgcatgatgcatcgagtattgcacatccttgcacggcacaaagggcaagaactatataaagctattgtgggtgatcattctgctgctttgaaagaacattccaatatcagatatatgtctctcacagttgatcatacaactacggagctcccagggtcgctgactgcgcacacagatttgaggacgctgatcctactcagaacgcagaagatggtcttgtctggtcagaagtctgaaatcaaagagatcccttctgattactgccgctatctcacatacttgcgtgtattggacctgcaggcaaccaagatcaataagttgcctgagaaagtcgaaatgctctcaaatctgaggtatctgaacctttcccaaaccgatattgacaaactgcctgaatcaattggcagacttcagtacctggtatccctcaacatttctcaaacatgcattgcgacagttccagattatattggcaaaattcactctttgaggtacctcaatctttctcaaactgatattggaaaactgcctgattcaatttgttcgctccgactgttgcaaaccttgcagctatcacgctgtgaaaagcttaccaaactaccacaaaatataggatccgtgacaagtttacaaaggttagacctagaaggttgctactatctatccgagatgcctcaggatataagcaacttgaaaaatgtgaaggagctaaatgtactggaatgtccctcactggataaaatgccttgtgggctgagtgcactaaccaagattgaagcattgccaaggtacattgcaaccagtggtgacaacaatcccatattggagctgcgggatttggtaaaattgaaaagactgggtttggaaaacattgcaaatatttccaatgaggatgccgagaaaatacaactgcaaaagaaacatgagctcgagcatttgacacttaattgcaatatggatgctgaaaacagaaaatcaagttctgaagtgaaggagctactggactgtctagagcccaacccagggttgaaaatactggagatcatttcttatgcaggggaaacgttcccgtgctggatggccaacacaaatccacaacttaagaagctcactcagatcagaatcatcagattgattaatctgaagtgcagcagtctcccgccgcttgggcagctacatcaacttgagactctagagatcagtggaatgaatgccataaaaaatgtcagcagtgagctacacggtgaactgaatgctgatacattccgttctctaaagaagatcgtcttttctcatatggttaacctacaatgttggccggtggaaaatggtgctatatgtgaacatcttaaagagttgtcaattatccaatgcccaaaatttc

SEQ ID NO: 26182 - DNA, 1635 bp, Oryza sativa
  ref <308>: DATABASE ACCESSION NUMBER: AK101624
  ref <309>: DATABASE ENTRY DATE: 2002-08-28
gcaccgcgacgccattggcgcttcttctgtcttggtggttgccgtgcctgcgcgcatcgatggaggggttctgcttcgcgcggtgccgcttcacgcggctggtggtggcgatgcagctggtgatgggcgtgctcgtcatctgcatcagcatggccagcctccaccgcttctacaccaccgacgccctcctccccggcgggctggacgaccccgcccgctgcgccaggttccacggcgccgtcgccggcgggtactccggcttcgacatccgcgcgctggcggaccgcgtcgacgaggtgctcgtccagctcgccgagctgcaggacaagctggaggccacggcgctcaagatcggcaagaagaccaagaagaggaaggggaaggggaagctgcagcagcaggagaacatgaccatgacggagttccagcgattcctggaggacgaggtgatccacccgctgtacggcgcgcacatcgtgctccggctgatccgcatcccccgccccgaccccgacggcggcgccccggccgtcgacccgctggtcaacttcttcgccgcggaggagacgcgcaagtacgtgacggcgaagcgcaaccgcgaggggcggccgggcgcgtacggcgcgaaccggacgtacggcagcatcgggcacgcgtgcgtggtgatgcggcgggagctggacgagtgcatgagctacgacgtgggcgcgctctgccccgacgactgggacctcggccagcgcctgatgctcggcggctgcgaccccctcccccggcgtcgctgcctcgcccgcgcctccaagctgttccgccggccgctccccatcaacgagtcgctgtgggcgctccccgacgacggcaacgtccggtggagccgctaccactgccgcggctaccggtgcctgtcggcccgcaacccgcggcgcggctacgaccggtgcgtgggctgcttcgacatggacagggagaagcagcggtggatgcagggcagcaacggcaccaccctggccgacttccggatggaggaggtgctggcggtgaagcccggggagatacgggtggggctggacgtgacggtggggacggggagcttcgcggcgaggatgagggagcgaggggtgacggtggtgacgacggcggtgaacctgggggcgccgttcgcggagacggtggcgctgcgtgggctggtggcgctgtacgccgggctggggcagaggctgccgctgttcgacaacagcatggacatggtgcacacgggcggggtgctggatggttgggtggacctgcagatgctggacttcgtgctcttcgactgggaccgggtgctccgccccggtggcctcctctgggtggacaagttcgcctgcgcgcgcaaggacctcgacgactacatgtacatgttcctccagttccgctacaagaagcaccgctgggtcgtctccttcaagtccagggacgaggtctacctctccgccctgctcgagaagccgctacgctcatgatccaccagctcgtatctctcttagttacgctgcaatgctgcgtctgatatgtgttgctgttaatcttagtagctctgattcatctgacacctcgatgaataaatacaattatctatctattatattattaagg

SEQ ID NO: 26183 - DNA, 3187 bp, Oryza sativa
  ref <308>: DATABASE ACCESSION NUMBER: AK101625
  ref <309>: DATABASE ENTRY DATE: 2002-08-28
ggggggagggttcggagaggcctcgctcctcccgcgccgcgcgtgcgcgaaaccctagctttgaggtggaggtggtggtggaggaggaggaggaggatgaggaggaagcggctgtggctgcggctaggcgtgtcaagagggaggtcgcggatgacctgaacggggagcccgcggaggaggaggatgacgacgaggaggaggtggtggtggaggaggacgaggaggtggttgtcgcctccgacgaggagggcggcgacggggaggcggacggcggcggcgaagtggctgtggccttcgagccgcgcacgctggaggaggccctcgttccgcgcgtgggtgcggtgttcgactctgtggacgaggccttctcgctctacaagacctacgcctaccgcacaggcttccacgcggtgcgccggacctgccacaactacgaggggctccgctaccgctctacctttacctgcactcatggtggcaaggcccgggctgacgccagcccgtctgatggctcaggcgcccgctacccactccgcagcagcaagcgtgcggccaacgcccaggagaagagggctcgtcgcggtgcggctgagaagacaggatgcaaggcgatgttgatcatccgtgacaggcgggcggatgataagtggaaggtggagttcgttgagttggagcataaccatccgtgtacacctgacatggtgaggttcttgaaggcttacagggaaatgcctgactcagctaagaagaaggccaagatttctgatgagatggatgatagggtggagaaatcgctgagcgagattgctgagaccaggaagttcccaactcggcccaagcggagtgttggtggtggagcctctgttggtgggttcaggtttagtagaagcgacagttttgtgcagcggtttggggatgatgaccttattgcactgaagaagtttattgaggcgatgcagcgcaagaagccaaactttatccactactgggatcttgatcaggaaactcatgtgaagaattttttctggactgactcgaggtcccaggcacaataccgttattttggtgacgtcattacacttgacgtgatgtatttacagcattcgcgtgctagccttccattggccacaatccttggggtgaacaaccatggtcaccttgttctgcttggttgtggtctgctttgcagtgacaagaaggaaaactatgtttggctgttgaagaggtggttgggctgtatgaatggcaagccaccagaggcgatcacaaccacctattcagatgccgttgcagaagctgtggctgaggtgttgccaaatgcgaggcaccgtttctgtttttggcatatcttgaaaaaactccaagagaatgtcggacgcacaaatgagaaagaggcaatttccttgagattcaaggaggttgtttatgacacagtcacacttacagactttgagagagagtgggggcccatggttgagcagtacaagctcaaagacaatgactggttctctgctttgtacagctgccggaaacaatgggcacctggttatgtcaaccattcattttgggctggcacttctgctattaggaaggtcgagaaaccagatccatactttgatggcgtggtgacaactaaaactaccctaccagttttccttgagcaatacgagactactctgagagggaagctggaaagggaggcatatgatgatttgcgctcctattactctaggctcacttcgctgtcgggattaccctttgaggaacaactcatggagctctacacagtacctatgttccaagcattccaagacgagatcaaacaattaatacacgtgatttgtaaagaggtagacaggagtggaaattcaattacctacatggctagtgagttgatacagggaaagaaggtcaactatacagttgtctacaacagtgctgacaaggatgtctggtgcatttgtcgctcctttccgtcacgaggcatcctttgcagccatgctctctccgttcttaagcaagagaatgtgttaatgctgccatcaaagtatatcctcaatcgttggagaaaggattttagagtacttcatgcaactgcaagttccagttctatatcatctgatagagatttgagcattttcaatgatctctatgtccgtggccacgagtatttagaagatgtcattgacattggagccagagaacctgagctcaaagagtttgtgttgacagttatgaaggaagcgaaggacaaactagttaggcctgaccatattcatcaagctgatcagcgggttgatgtaaatatgtcagtgactggccaagtgtccgcagatagaggagtagatgtgaacatttcatcaaatagcacatccctgattcagggagacagaagggttgatacaaatgtgacctcaaacaccacagccatggttcatggtcatggggattccatgacatcaaacaccacagctatgattcgtggggatagaagagttgagatgaagatcccaacgccccaccttattcatggagacggaagaattgacatgaacatggcatcccctctcttgatgcagagggacagaagagttgacatgaacatggcctccccacacatgatacagggggacagaagagttgatatgaacttggcatcaccacactttatacaaagcgacagaagggttgatatgaacctggcatcttcgcatctgatacaaggggacagaagagttgatatgaatatgacatcccctcacttgatacaaggtgacaccagagtggatatgaatatggtatctactgctcagaatggaatgcactcttttgatttggtgaatgtgaacctagaaagtggtcctttgccaatggctgcaactgatttcatgcaaatgcatcagcacccacccgtttaccatccaaaacaactcctcaatatgagagatcaggtgatggacacaaataagaggcccaatatggaaacaaacacatactttatgggaggtggaatgcatgtgggatagtttcttgtctagagacccactatgtaatcttttctgtttggaaaggagatgcctttccttattttatattgatatgtatgttcctacagcaggcagcaactaatcaattaggttgtagtaattgcagattaatcttgcagtgctggtagctttgttgttgc

SEQ ID NO: 26184 - DNA, 1891 bp, Oryza sativa
  ref <308>: DATABASE ACCESSION NUMBER: AK101626
  ref <309>: DATABASE ENTRY DATE: 2002-08-28
ggccggcagtccggcatcctccttcggctaccccgccggcggcgcccctctccccctcccctcctctctccgccgacgtcgacgccggtccgagcgtggtcggcgagagggatcgcggggcggtgcggccggcgacccagtctcctcccacggccggcggtcctcatcttctccccgaccggcggccctcctcccctggccggcaccctcagagctcgtcgacggctaccaggagaaatcggcaccggatctggcggctcgccggcggcgtggttgagtggcctcggcggcggaaggctcctcttctcccccgctgcttgttctcgcttccgccgccatcttgtgctgccgctctcgttctctactcacaaatttcgttcagtccatctccgtcaccatcgctatccacttctgctaccgccgccatcgccatccgcttccgccaccgctgcagtcgctcggtcacatccaccggcgccgccatcaccatccacttccaccaccgccggtattactcgtatccacttctgctaccggagccattgctccgccacatcaacccacctccgccgccatcgccatcggcttccgccaccgctaccgtcgctcggccacatccaccggtgccgccatcactttccacttccaccgccaccggtattactcgtccagatgcttggcagctgctctgatccacctccaactccacaagcagctgtgaaaacttctttttattatcagtgagaagccaaacatatatttttatagggtgagagaggagagaggagagagacccgatcaagattccgagacggagccagcaagcgctgcgataatggcgacggcggagaaaaagaggcctcggagcagcagcagcaacggcggcgcggggaagaggctgagcaggaaggagatattggggagaaagaaggctgtcaaagaacttataaggaaagctgtagccatgaaggatcatctagcgcaatttcctgattttcacaagtatcagagcaatggtcttttggtctacttggagtatggatatggaaatcaacttccattaccaacaaggaagtatatccaaaatcttctcaaggttaacatggagggacaatatgggccagaatggccttcagaagagaaagttaagcgccgggaaatggttgccccagaagcacgatatatctttgtccggcaatcttcaaatgccattaccacccaaaatattatgaagcaagattcaagactagaatttacacatgaagcatgtaatgaagatcgcttgattggttttgtacactacagatttgttttggaagaagatgttcctgttgtttatgtctatgagttacagatggagtcttctgcccaggggaaggggctgggaaaatttctaatggagttggtcgaacttatagcctgtaagagccaaatgggagcagtaatgttaacagttcagaaagctaataaccttgctatggctttctacaagaagttgagatatgtaatatccagtacttcgccatcgcgagtagatccattgattggacttgaaaaaaactatgagattttatgcaaggcatttgaatctgaagcaaagtccatattagaggaaggcaactgaaaactcccagcgcaatgaccaatcttgttacaatgtgatgtgatgatggatgttgttcttcactacagtattgacaccttaccgggtacagcgctacagctcacgcttgagcggcatatcgtcaggccaccgtgttactgcaatgcatacagattgcaccgtttttgtctgaatgaagctgttcctgctaatccattctgggaaacaaacacgattggctggcccatattctttccttgcaaaacgcaattgtacactgttcttgcc

SEQ ID NO: 26185 - DNA, 1544 bp, Oryza sativa
  ref <308>: DATABASE ACCESSION NUMBER: AK101627
  ref <309>: DATABASE ENTRY DATE: 2002-08-28
gggctgtttcattcgcgaatccttcacggtcggactcgtcttctccggtctccccaagtcgccaaatctaacctctcgcctcgacccccaccccctctacgcctcgccatggcgtccgacaccaaggcagtagccgctctcttctccatgtacaacgacgacgaggaagaggatgacggcgacgagcccagacccccttcgccgcccgccgccgcaacctcctcgtcgccgtcacctcagaccgaaggcgagggctcaaaccctaaccccaacgctgccgcttcttcggcgcccccatcccctcccctcgccgaggatccggccggccgcagaaccctagccagcccctacccctcgccggggctcccgccgctgccttcgcgccgctcgtcctcgcccttcgcgatttcgtccccctccccgctccgccccgccgcggccatgccgccggccgacctgccgcgcccccctcggcgtggcccgcttgctatcgtggactacgctcatgacgaaacggccatgtcgccggagcaggaggatggggagatcaatggcatagacagatcgggtttggatgctcaggttgctgaggggaattatgaagaaaagactctctcagaatcaagtaggggcagctgcagcaatgagtgtaactggagcagaaatggaagatgttcaggtggaagaagctgctgataacatgcagaatgatgatcctctgagtcgtttccttcctcctcctgtgactgcaaaatgttctgcagcactacagcaaaagatcaacaagttccttgcgtacaaaagggctggaaagagcttcaattctgaagtgcgcaatagaaaggactacaggaatccagactttttgcagcatgctgtgcggtaccaagaaattgaccagatagggacctgcttcagtaaagatgtttttgatccttatgggtacgatagaagcgattactatgatgagatcgaagctgatatgaagcgtgaagttgagagaaaggaactggagaagaaaaagagtggaaaggttgactttatcactggaggagtacaagctccaattagtgcggcaataccgaaagttgcagctgctgtatcagcagcagctgctgctggtgcaccattggtttcgatatcgggagaaggcgtacagaaagaggctaggccaaacaagaagtcaaaatgggataaggttgatggggatattaagaaccctgtggctccaagtggacttgataatttgtcagcagccgcgcttctaacttcagcaaatgttggtgctggatacgctgcttttgcgcaacaaaagaggaaagaagctgaagaaaagaaaacaagcgatcataagtcagacagaagatcgtagtgcttctctccttttcttttgagttaaggatgtactatttggaggttttcaattacatagccttataatgtgaaaaaaaaaaccttcaagaattggccaaaaaacatgcttacacaatgtgttccctatgtgttgctatttttactataagctgctttttgggcgtattggc

SEQ ID NO: 26186 - DNA, 1580 bp, Oryza sativa
  ref <308>: DATABASE ACCESSION NUMBER: AK101628
  ref <309>: DATABASE ENTRY DATE: 2002-08-28
gcgccacaggcggcagctctcccacctccgcaccctcaccaatggcgaccaccgcctccttctcccctcccctcgcctccccctccaggtggtccccgccttcccggcgcctccgcctccgcgtacgggcgggctcctccctcaaggagtggggggacttcgaggacgccgtgaggagcagggacctcccccgcgcgctccgcttcctgcagtccgtcgacgtcgagactcccccggcggcggcggcggcgggcgcggccgtggcgcgggtggcgctccccgtgccccccgggagggactgggaggtgctcgacgcctgcatcgacgccgacgacatgcggctcgtggggcgggcctaccagttcctcgccgaccgcggggtcctcgccaacttcggcaagtgcaagaacatcgttctggaagggccaagagaagtcacaccaactgttttgaaggagatgacaggtttggaagctataaagctcgcaccaaagaagtggggtctctcaggaaattcttcgtatgttctaattggatttcttggaggtgtatcttatcttctaaatcaaggagtagatgtacgggctaacttggctgccatattggggttagtagcagcagatgcaatgtttcttggtggtacctgtgttgctcaaatctcatgtttttggcctccttacaagcgccggatccttgtacatgaagcaggccatcttcttactgcttatctaatgggttgccccatacgaggagtcattttagatccatttgtggcattacgaatgggcattcaaggccaggcagggacccagttctgggatgaaaaaatggaaaaagaacttgctgagggccatctgtcaagcacagcatttgacagatattgtatgattctatttgctggaattgccgcggaagcactcgtttatggcgaggcagaagggggagaaaatgacgagaatctgttcaggagtttgtgcattcttctggatcccccactctctgttgctcagatggcaaaccgagctcgttggtcagtcatgcaatcttacaacctcttgaaatggcacaagaaagcgcatagagctgccgtcaaagcactggaaagtggacatagtcttagcactgttatcaggagaatagaagaagccatctcctctgacagatagctggacaaactgatcatctacattgttcctatcaatcaatattttccaccagcttgcatgatatgcatagatggacttggtaatttggttcttttgtagcggcaatgaaagattggtagacagcaactagaatttgaagttgtgaatatcacagtgctcctggcagtaaacactcctttgatgtgggttaaggaggccaaatcatgtggggatttatcaaatcacctgctacgaggattttttagctggagagaagatacacagcttagctggtatgaagctttatgagttggagagaattgtatgatcatgtgattcagctactatgaaatgtacatagataggacatattgacccatcaagaatgtaaaaagaacacataggtgtggaatataaataagctgaaattgtacc

SEQ ID NO: 26187 - DNA, 2540 bp, Oryza sativa
  ref <308>: DATABASE ACCESSION NUMBER: AK101629
  ref <309>: DATABASE ENTRY DATE: 2002-08-28
ttggctatgaaatgaaatgaaaccaccaccaccaacgacttcctcctccacccgcttcgtcttcgtcttcttcctcctccacctccacttgatcccagcatccgcatccgcagctgcagcagcagcggcgaggtggaggtagctagatccgtgggaggtggtggttgtggtggtgagggggagatgaggggggaggcgaacggggaggaggagcagcagccgccgcggcggcaatcatctgcgggacgacgcggaggaggaggaggaggtggagcggagggcggcgaggccggtttccggtcagcagcagcagcagcagcggcggcgaccgacggatgtggggggaggggcggcgatgaggaggcgtggggtacgtcgggaagcaccgcctctccgccgccatcgcccgcctcgaccaggagctccagtcgctgcaggtcagcgccacccccctccctcctcttcctctcatctcccatgaacttgattctccgtgtgcttattgcttatcaagcactagtatgtgtgcctttactgtctctgtgctgtggcctgtggatgtgtagcgagtcagcagttcaagctgtggcgcgatctagatcttgagaaaatccagaaaccgaagtttcttttttccgttctatcaatgccttcttggcttcttctgttgcgtatgcatgtactgatgtatgtgtacaatcagtacatgcaaagggaaacaaaagagttcttcctttatccacagcttttgttcttacattgaaaaattatgaaagcgttgaaccaaatcacccagactactagacttatagtgctttaaaattaggagtttgtcctaatttgttttttttacattttgtccatgaaacatgtccaccattgcccatattaagccacataatctgcctacttttgtttaagcgggttgcgagtttgagagctttcagggggtattgacaagaacacaagtaacaggattctggtggtctcaatgcatatatagatgtctcctactggacagcttgagctgtgctgaaaatatgattctgcacaactttctgaagtgcagcaagtgttacgcataatgttccaccccctcagtgatttagatcctaaagcagcaccagtggacaagttgaggtacttgcatcccttgtcttcacttgctcttctggcctgtgaccctcagaaacacacatatgttgcttgcctctatatggtagctttctagagcttgttagtgaaacatttgatgggaactgttgactgaggcttataatttgaatggttgagtttgatgaatctactccattacaagtatttgttattttccactatgttctctgattttcagcttctctctcctaggaggaccttgtttttctcctaggggggtaggggatccacagtagtcttctattctcttgggtttaattctctgtattttttctaagttagtggaaaacaagctatgcgcagagagaactacatacattggcaagaagaaaattcagtttcccttaatattctgcatcatagacaggttggatagattattgtgcaatgcaagattcttcaagaatctctccaggctgcattcgtattaaaggttggtgtgcttagcgtaatcctaatagtataaccacctctataaaatcctattcggtccttctggtgctaggccctggaattggtaattaaagtcctggatttagtaatcggaatgaatatgtgctattactcaccagattacgtgtaattatttgtgagcacaatcagttcaactattcttctcatttctgttcgcaaaaacatcttgtttcatcatatcagttgaaactatacagtgagaaattcacttacattttctactggtattttgtttttacttagccacgtttattagaaatattaggctaaaaatcctaactaactcatcgagaggacttttcttatgatttcatttggtttattgtcgccatgctttagttttttttttttatttattgtgatgtatagtatatgtgcatttgacacaggatgaactgaacgagcttgaaaccatggaaccggcatctgctgcatgccaaggagtgatcacaagtacagagggaaaatccgacccgcttcttcctgtcaccattggtccagagaacgcttcttgggagagatggtttcagcgcgtgcgtagctctcgcagtaacaaatggtgggcatccaaaggctcagatttttcctagccccctcctgcaaagatgagactaccagctttgtgcagattaaaatcacctgaactgtatcatccacggatggcttggcagccaacaagaacacaacgtcgcttgccgccttgcgggctgtctagttcttctcaggacacgcaatagtttttggagagaattgctattgttgttaatgtatgtaatccctaacacgaacatggacgaatgtaccgacattatcttccagagctcttgattagctctgcttgattgattctaatgctttcctgcaatgccatgcaaaacattcagattgcg

SEQ ID NO: 26188 - DNA, 2314 bp, Oryza sativa
  ref <308>: DATABASE ACCESSION NUMBER: AK101630
  ref <309>: DATABASE ENTRY DATE: 2002-08-28
ggccggtccacgcgctgtcgccctcgcccagacgccaccgccgcaacgcgttgctgcgtggaaggaagccctcctcctcctaatccccttctccgccgcgcccaaccaccaccccgaagcgaagccgcgtggaggtggaggcgtcgtgcagatcggggctgtgccgctcgccgtgggatgccgttccagcactcgatgccggagtctccgacgctgccgctgccaccgccgccagcggctgcggtgtcggcggcggcggccgcggggaggccgccgcccgtgacgtcgatggagcggaccgtccgcaccctcgaccgccagatctcgcagttcgtggcgatggacaggctgatatgggcggactccgcggacgccgacgcgttccttgaggcggtcgacgacctcatcggcaccgtgcaggagctggaagccgcggggaccaaccgcggcctgttcgaccgcgcggaggagctgctcagcaggtgcatggcgcgcctggaggaggagttccgggcgctcatcgagcgccccgacgacgcggtccccgcggcgcccggtgggttccggtcggacgggagcgacgacgaggaggacttcggcggcggggacggctacggcgacgagccgatcccaatcgccaagccggtgacggactacgacgtggtgatcgacgcgctctcgccggggtcggtggcgaatgtgcaccagatcgcgcggaggatggtggatgccggcttcggccgcgagtgcgccgaggtctatgccgccgcgcgtcgcggcttcgtcgacgagagcgttgctcgcctcggcgtccgcccacgaactgctgaagaggtccatgcctcctcctgggaggagctcgaattcgacatcgcccgctggatcccggccttcaacatggtgttccgtattctgattcccagtgagcgccggctatgtgaccgcgtcttcgacggcctcgccccctttggggaccttgcctttgtcgccgccgtgcgcacacaagccttgcagctcatatcattcggcgatgctatctcttcctccagccgcgctccggagcgcctcttccgagtggtggacatgtacgaggctgtgcgggaccttctccctgaccttgatcctgtgttcgccgacccgtactctgctgcgctccgtgcagaggtcacggcggtgtgcaacaccctcggctcatcgatcaaaggcatattcatggagttagaaaatctcatccgccgtgatcctgctcgagttgcagcccaaggtggaggcatacatcccatcactcggtatgtcatgaactatctccgtgctgcttgtgggtcgcggcagacattggaagaggtgatggaaggtgacttcggcgctgttggtggagcggctgctgcagttgaccctgatcgtcccacctcgtcgcttgctgtgcacatagcatggatcatggatgtcttgcacaagaatttagatataaagtcgaagatataccgagatccatcactcgcttgcgtcttcttgatgaacaatggcaagtacatcattcagaaggtgaatgatagtgaacttggtgttttgcttggtgacgagtggatcaagcaaatgacaaacagagtgcggcgttggagcatggattaccagcgggtaacatggggcaaggtcacaacagtattgcagactggcggtcctggagtaggtggactccctgccacggcaatgaagcagaaactccggatgtttaatacctactttcaggagatctatgaagtacaatcagaatgggtgatagcagatgaacagctgcgggtggatgttagggcagcagtggcggaagctgtaatgccagtatatacagccttgatttctagattgaaatcatcccccgaagccaggcatgacttgtacatcaaatacaccccagaagatgttgaggcatgcatccagcacttgtttgaaggagcagctaagtgatcagttgatcagtacgttatggtactggcgtgctgcagcctgcagcttctactacagggtttgtggagttctatcatggatcctggtgaatatctgcgtcccattattggtgattttcatagcttaacctttcatcctcattgtttgtattttgtcctccatgaagaaatcatgaggtaagacaaatggtgtacaactgtacatgactactgtaggtgtatctgtaccaattagtaaggtgattattttgtaacaatcaggactatttttccatttgtttcaactatttcagattaacagctaagtgtttatgtgtgaatttctgttatttactttaggaagtttcatg

SEQ ID NO: 26189 - DNA, 1875 bp, Oryza sativa
  ref <308>: DATABASE ACCESSION NUMBER: AK101631
  ref <309>: DATABASE ENTRY DATE: 2002-08-28
gggttcgagtcgagggtttctccttctcccagtgcgccgccgtcgccaacatctggagcctcgcggagccgctgattcagcgaattcctctgcaattagagagatggggagcgtggagctcggagcggaggaaagggaggtcgccggcggggagggggggagcaagggggcggcgcctcctgctagggatattaggcggtacaagtgcgatttctgcagtgtcgtccgttccaagaaggggttgatccgtgcccacgtcctcgaacaccataaggatgaagtggatgatttggatgattacttgggacgtggtggcggcgagacgtgcaaagagatggaccatgattgcaaggtgtgcggtgctagttttaagaagccggcccatttgaggcaacacatgcagagccattcacttgagactatttcactattttgttacatatggatgtgtgaagcattggatcccagagaactccaaaatgcgagaaggccttgagtggactagtaccaggatggggagacccttctgggaagctccttcaagaatgcctctttcacgctcttcttcagactatatatgactgcgtgaagcattggatcccaaagaactccaaaatgcgtgaaggctttgaatggactagtatcaggatggggagactctcctgagaagctccatcaagaatgcctcgttcacacactttttcagaggcccttttcctgccatgtagatggttgccccttcagctatagcaggaaggaccatttgaaccggcatctacttacacatcaaggaaagctatttgcatgccccatggaaggatgcaaccgtaagttcactataaagggtaatatccaaaggcatgttcaggaaatgcataaagatggctctccttgtgaaagcaagaaagagttcatctgtcctgaggaaaactgtgggaagacttttaaatatgcttctaagttacagaagcatgaggaatcacatgtcaagttggattatagtgaagttatctgctgtgaaccaggctgcatgaaggcatttaccaacttggaatgcctcaaggcccataacaaatcttgtcatcgacatgttgtctgtgatgtctgtggaaccaaacagctgaagaagaacttcaaacgtcatcagagaatgcatgaaggttcctgtgttactgagagggttcgatgccacctcaaggactgcaagttgtcattttcaaagaaatccaatctggacaagcatgtgaaagcagtccatgagcagaagcgaccctttgtatgtggattctctgggtgtggcaagagtttttcgtacaagcatgtaagggacaaccatgagaaatctagtgctcatgtgtacgttcaggctaatttcgaagaaattgacggggaacgaccacgtcaagcaggtgggaggaagaggaaagccatacctgtggagagtttgatgcggaagagggtagctgctcctgatgatgatgccccagcttgtgatgatggaactgagtatttgagatggcttctctcaggctgattcgtcgtgaaccagaatacagaaatgtgagatctttggatatcaagggtgttgatatggtttgagatactagtagcaacgttcttttcctttgtgcatgtataggtaaaacatggaagtaattttgataagacctctatgtactgtctcagacatcaagttaccagaagtccagaatgcagaaacgccagatctttatatgctcaagggtgtttatgtgctagttaggtagcaacgttctctctttttgtatgtataggaaaagtgaaaggaattttagtagaccctaatgtcttgtgacaggcatggtaatttatcaaggttggtttgttctacagtgt

SEQ ID NO: 26190 - DNA, 1804 bp, Oryza sativa
  ref <308>: DATABASE ACCESSION NUMBER: AK101632
  ref <309>: DATABASE ENTRY DATE: 2002-08-28
gagctaatccccttcttccttcctccatttgctgctagcagtggctatcttctccctcaaatccccactctagtactgttgctgctgccaccatgttgctctcggcaacctcaatgcccaggctaccaacaagacctgccctcctaatcctcctccttgagctctccaacccacagctcaaagaagtggactcccatggctagaatggagtcacgcatggagctctaagcccagatgccctgaccagtgccccatagagctcgacatcaccgtgcaaccatcccctaggtccagttcttccccaaaccggcagtcctccttgctactctccctgtcctcctcctagccgagctgatggtggtgctctacgtcaccattttcaggttgattggctacaaatcttgggaatggttggcaaatgaggtgaaggtggagaggggttgtgttgctcgatgtgttcactggttgaaggtacattcttcatgcaagggaactgccaatattgagcatgattgagaaaataaagacctaaatcatgactagagtgtacatgaagcaaaaggaggttgaggagaaatggagtggaaatatatgcccaaagataaaacagaaactagagaagactgccgagttagccaatacatgctacacactgcctgctgggaagggtattttccaagtcaccgacagagatcaccagttcatagttgatatcaatgtgaagtgttgtgattgcagacgctggcaactcacaggaataccatgtagtcatgccatatcatgctttaggaatgaaaggatacaacctgaggacatggtatctccatgctactcattagagtcatttcgtgctgcatacaaatataacatagtgccttcaagggatcaatctaaatgggaaaaaatgaatggtgtaaatgtccaacctcctaaatatgaaaagaaagtagggagaccaaagaaaactaggaggaagcaatccattgaattggagggtggtacaaaattgtccaagcatggcgtggttattcattgtagttattgtgatggggctggacacaataggaataattgtgaattacttggtacaactaaaaagatgagaccaaaaaggaagaggagtgtacaagtaatgcaagatgacaaagatgtttacatgaatgaggtatagttaactatatcctttatgtactgtcaccttcggcaagcatttcttaatcttttatgtcaaacgtttccaattgttccagaagaattagtacaagagggccaacatagcacttcagtgttgactactttattagaacaggttagttgcatgcatggtttaacatttttcactgtcactatctgctacctactcatgtttcatactaatttgcttgttaggcaacatcaactcaatcctccattaaccagctaggccctttaccggattcagtcttcattgaagctaatagaaatacactaccacagccaagagcgacaacatctacacacgtgggcagagcaaggatgaagagaagcaacacaagatcaacaacggccagatcatctagaccacctagccagaagaaaaaaaaataggagttatatgggtgctttctatcttgttttttcaatgttgcaaaatgcaaaataaaaggtgcacaattcaacaattggatttattccccttttgaaatttatggcttttggttagtggaacttagtgttgactgctcatggatgttatcagttaatgtaagatcgttttctatgtgattttgagatgtggaacatcattaagaaatgttgatttatg

SEQ ID NO: 26191 - DNA, 940 bp, Oryza sativa
  ref <308>: DATABASE ACCESSION NUMBER: AK101633
  ref <309>: DATABASE ENTRY DATE: 2002-08-28
gatgtgcaacacaagtacgcagagccaagaaacagagcaagagtgagtgagagagagcttgcaatggaaagaagcggtgagcggcggcgagagagggtggtggcggcggctcttgcggtgctcctcctcgtcttcgcgtccgcgttcgtgcggtgcaggggcgacgccgacggcgagggggacggcgccggcgcggccgagccgggaaagacggggccgccgctgccgcccgggtggaagggcggctcggggtccggccaggggtccagccccgacggtgcttggaggtatggctggggctgggccgctagccctggcggcaagggctccgggttcgggtttgggtacggtggcagcagaggcgaaggtggcggcggcggtggcggcggcggcggaggaagcggtcgagcatatggtttcggtggaggatacggtggccaccccggaggctttggaggtggcggtggcggtggcggcggcggcggcggccgcaactatggtggcggcagcggcggcattggaggatatggcaactatggtggtggctataatggggaacctggagggggtggtggcggagccggagaaggtggtggatatggcggggattatggcggcggcgatgtcggtgcaaactggagcaagcgcgggagcttccgcggcggcggcggcaagacacagcagaaggacggtggcggtaacaactgaagccgcccgtcctcgtcttcctcctctggccatgagacgaaccatgagcttcataactagagcaatgtataggaatctcctaagatatatatagtgtcatgtcatccatgctacgttatcaactggggaacgctgatgtacgagcttcaatttgagcatagcggtaccgtacgtgctgtgttcttcaggctttgtaactggtagtaccttctactacgatggttcatgcccc

SEQ ID NO: 26192 - DNA, 3382 bp, Oryza sativa
  ref <308>: DATABASE ACCESSION NUMBER: AK101634
  ref <309>: DATABASE ENTRY DATE: 2002-08-28
gtaaggcggcgctgaacgcggtgttcgcgaagctcgggcagcaagcggcggcgtcatggaacctcagcggcgacccgtgcaccggcgcggcgacggacggcaccgacttctccgaccagaacaccaccgcgatcaagtgcgactgctccgaccagaacaacaccgtgtgccatatcactaggctgaagatatatgccagagatgcagttggccagataccagaagagctgcagaacctcaagcacctaacccatctgaatttatcacaaaatgttttggcagggcctataccgtcattcattggggagttgactaatatgcaatacatgacttttggcatcaatgcattatctggacctattccaaaggagctcggtaaccttacaaatctcatatcactgggttttggctcaaacaattttagtggctcccttccttcagaactgggaaacctgttcaaacttgaggaattgtatattgacagttctggcttaagtggagcactaccatcatcgtttgccaatcttacaagaatgaaaatattgtgggcatcggataataattttactggacaaataccagattacattgggagctggaatttaacagacctgcggttgcaagggaattcttttcaaggtccacttccagccactctttctaatcttgtccaattaacaaacttacgaattggcgacatagcaagcggaatctcctcttcactggcattcatcagtagcatgacatctttgaatacactgattttgaggaactgtatgatatctaatagtcttgaatctatagacttctcaaaatatgcaagtttaaccttactggatttcagttttaacaatatcactggcccaataccgcaagccctgttgaatctgaattcactcaactatttatttcttgggaataatagtcttacaggaaaacttccaacatcaataggacgttcgttcagagttttagatttttcttacaaccagctttcaggatatctcccttcttgggttagtgggaaagatttacaattgaatttggtggcaaacaattttgtggacaatgaattaaataatagtatcttaccttcaatgcagtacctgaactgccttcagagaagtacaccctgttttcttggttctccaaagactgcctccttcgctgtgaactgtggtggccctctcacctcaggctcagataatttgcggtatcaaagtgatgaagtcaatcttggagatgcatcatattatattacaggagaaccaacatggggtgttagcactgttggaaggttcatggatgcatcaaatggaggttacacaatccgcagctcgcgccagtttcagaacacattagattcagaaatgttccaaaatacaaggacgtcagcatcatctttaagatactacggtattggacttgagaatggaaactatacagtcactcttcaatttgcagagtttgggtttgaagacacacagtcttggaaaagcctagggagaagggtttttgatatatatctccagggtgaacgtaaggagcagaattttgacatcaggaaggcagcaggtgataaatcttacactgttgttaagaggtcatataaagttcctgtgaccaaaaacttcgttgagattcatctattctgggctggcaagggtacttgctgcattcctactcaagacaattatgggccctctatctcggctctgagtttaatccctgcaggtactcctctgaacaacaattcatggttccattttgaaaacaatgtattttcagtgatcaactattgagtttcattgtaggccttcattgtaagataacattttattctaacaaatggacttcttttcagatttcaccccgacggttagtactagcatttcaccagaaggaaacaataatactagtaaagcaggtgtgagtactagtaaagcaggtgtaattgttggagttgtagttggtgtaacaattttaggtttgatagcacttgctgcaattttgatatggaggcagaacaggagaaagagaaagttatcattggagcaacaaggtacaggaccactaggttcaaccgagtaaatgggaagctcataaagtgatgtatctttttatgtttgcagagttgtacagtattgttggaagacccaatgtaatcagttatggtgagctaaggtccgcaactgaaaattttagttccagcaaccttcttggtgaaggaggatacggggcagtctataagggtaagttaactgatggaagggtagtggcagtgaagcagctatctcaaacatctcatcaagggaaagtgcaatttgcagctgaaatacaaactatatcccgagtgcaacaccgtaatcttgtgaagttgtatggttgttgccttgaaagcaataacccacttttggtttatgagtacatggataatggaagccttgataaagcactgtttggaactgggaagttgaacatagattggccagcacgctttgggatatgcttaggcattgcaagaggtctggcctatcttcatgaagagtccagtatccgtgttgtgcacagggacatcaaggccagtaatgtcttacttgacgcttatctcaatcctaagatctcagattttgggctagctaaactttatgatgacaagaagacgcatgttagcacaaaagttgctggtacctttggttatcttgcacctgagtatgctatgagaggtcgtttgaccgagaaagttgatgtctttgcatttggcgtggtcttattggagactttagctggccgaccaaactatgatgatgctcttgaagaagacaagatttatattttcgaatgggcctgggagctgtacgagaacaactaccctctgggcgtcgtagacccaaggctcacagaatacgacggtgaggaggcgctccgggccatccgcgtcgccctcctctgcacccagggctcacctcaccagcggccgtccatgtcgagggtcgtaacgatgctcgccggcgacgtcgaggtgcccgaggtggtgacgaagccgagctacatcacggagtggcagatcaagggcggcaacaccagcttcatgggcagcgacgtcagctggcggtcgagctcggcgccgagggagatcatctcgccgcaggattcgtcgccgttcttgagctccgtggagtagggagaggtatggtgatttcgcgctgcgctcaggtgcttcattcatcggatttaacttgccctgagagtggcacacgatcttattgtgtgtgcatgttcttccaaactgtgtcgcgtaaggtgcatattcgaagtactccctttattctcttttgatcatcatatttgttccatgcagcaagaccaaagagagagaaac

SEQ ID NO: 26193 - DNA, 4178 bp, Oryza sativa
  ref <308>: DATABASE ACCESSION NUMBER: AK101635
  ref <309>: DATABASE ENTRY DATE: 2002-08-28
gcttctcctccctctgctccgatccgcgcgctcccaccacctgcgcctcgcatcctacctcgcctgccgcttcaatccggtaccttctccacctgcatcctcctcgtcttcagctccgcccagcgaaacaaccggcgtggtcgcgtccagtcagctcgtctgccttggcccgcagccagcgcctgactgccggcaaggtgttcgacacaactcccctgaggaggtcaatctgttatgttcttggccacacgaccatctgggtcgtcgtctctcattaccaggctctgcgtgctccacaccgtttcctggatcgtttcatcgaggcaggtagcgaggttcagcaccggcgtcgacaatgccaatccaggggctcactgccggttgtctgagcttttccggccagttcgcacagagaccagttgcgttattattgggcgagcgctggagtgtgggaggtggtcagagtcggttgagctggagctggagggcctccatgtcgagctggatcctttcgtcgtcaacaaggtgctccgtggcttgttggactcggggatggcagttcggttttactggtgggcagagtcacgccctggattttatcataacaattttgccatagcgtacatcataagcttgctgtttgtagatgacaatttcgccctgctttcggagttcctgggaagagtaaggagccagggggtagcatttcatcgctctctctatcgggtacttttggctggctatgcccgagctggcaagtttgattccgtcatagaaacatttgatgagatggtcacatcaggttgtcgtgagttcggtgtcgattacaacaggttcataggtgttatgattaagaactgttgctttgatttggtcgagaagtattacaacatggcacttgcaaaaggattttgtttaactccattcacttactcaaggtggattactgcattgtgtcaatcaaacaggattgagcttgtagaggagcttctgactgacatggataaatttgggtgcttcccagatttttgggcatgtaacatatacgttcactatttgtgtggtcacaataggttatatgatgctttgcaaatggtagagaagatgaccatgaaaggaaccggcccagatgtcgtcacctacacaacagttgttagctgtttatgcgatcacaggaggttctcagaagcagttgggctctgggaagaaatggtgaggaggggacttaaacctgatgttgtagcttgtggtgcattgatatttggtttgtgcaagaatcaaaaggttgatgaggcttttgaattagcatcaaggatgctaactctggatatccaacttaatgtttcgatttataatgccctaataagtggtttctggagagctggcagcatagagaaagcctacaaaactgtgtccttcatgcagagaaatggttgtgaaccagatgttgtgacgtacaatatccttctaaaccattactgtagtataggtatgacagataaagctgaaaatttgatcagaaagatggaaatgagtggggtgaatcctgacaggtacagctataatatactgttaaaagggctatgcaaagctcatcaactggacaaagcatttgctttcgtttctgatcatatggaagttggtgggttctgcgatattgtatcctgcaacatactcatcgatgcattttgcagggcaaaaaaggtaaattctgcactgaacctattcaaggaaatgggttacaagggaattcaagctgatgctgtgacttatgggattctgattaatggtctttttggcataggatactcaaatctagccgaagagctttttgaccagatgctaaacaccaaaattgttcctaatgtaaatgtgtacaatattatgctgcataatttatgtaaggttggtcatttcaaacatgcacagaaaatattttggcagatgactcagaaagaagtatcaccagatacagttacttttaacacactaatatactggcttggaaaaagctcaagagccgttgaggcccttgacctttttaaggaaatgaggacaaaaggggtagaaccagataacttgacatttaggtatataatcagtggtcttctggatgaagggaaagctacgttggcttatgagatatgggagtatatgatggagaatggtatcattctcgatagagatgtttctgaaaggctgataagtgtgcttaagttgaagaacaactaagtttttcgaaaacttgagcttctagatgctttcttgcttgtgttgcctacatggacataccaacaagcttgaaggtccgatctactcttaatggatctaaggctctaagctggtggatggttgaacacagatttcatgaacacctcggcttgatgcatgcagtactttgcaccttctgaaccagaccatggcacacacaccaaggtagcaaagcgacaagattcaatataacataagatgacagctatgtgttttaaccaaatctggactggagaaatcagcaaaagctggcagtaaggcaattggtgacagttcaaccgtatttttatcgggtagcagtatattacttcatgaagcaactggttgtgctgttttttaatggcaacccggaaggtgtcatcgaaatagcatccgaactacattgtggtgttgcggtaatcgatgattttgcctcaagttatatgtcagctaaaatggtgtataagacagtggatttggaagatttgctggtggaaggtttactggtatgtggcgttgtcaaggcagttgatgaccatattcccatatgttcaatcaaagcctattcaggtctgttaactttcggcagataaatagtctgtatggtttgcttgttgggattccgatggtcagctaatgaccttttagtatccttgcatttctaacctttttattacttcatttcttgtatctacagggccaaatctttttaagtttttgaataaatttcacaaaactacatatactttgaccaaattatcacaaaactacagatttaaggatatatatcacaaaactacagatttagcaacaaatttatcacaaaactacaggtttaagactaattatcacaaaactacatatttaataataaaattatcacaaaactacatattttgggggttaaattcgttgcactaatattatgtttgagttgaaaatgttcaagttttatgattaattgatattaaacatgtagttttgtgatatctttgttactaaaatctatagttttgagatattttatcttaaatctgtagttccgtgataaaattagtgttaaatctgtagttttgtgatacatcatgttaaatctgtagttttctgataatttgaccaaaatacctgtagttttgtgaaatttactctaagtttttagttcttcagtctaagatttgcgagattcctgagctgcatactgcaaagcctgtatgcaatgcattgagaaggacgattcaggaggttggcggcccatctgataagatgggctaggcctctgcctgtcagggaccagtcctcctatccttaaaaacccccctctcttttttcccgtttcgtatgtagtactgtatacagaggggggctgccacctgccagtccgttttcgtatccagcatgcatttgtgtgggagcagtacaaactgatgaacatcctggcagctttacttatattgatataacagtcatataaaaactgcaacatttcagacaaccagaattgatgtgcatctcacaatgaggattttaatctcaactctgaacactagctcctaattggtcaacaatcactctacaagaacaagaaaagcaagagggcttgaggcagatcatgttgatcggacatttggaaattatcctggctaattgaattgacaagttacaaaaaggaacatctcttggtagcagcattcgtgactgcagaaggtcttctcacccctggagaagaaaatcagtaattcagaattggacagatgatcaattaattcttttgtagataatgatcacttgatcaaatggcatcgaaggatgtgaacaatattgtatcttaagtgccagatgatacttgatagtagttcagttggttggcgatgtagtcatcaatgtgtaaatatgcatattagacatgataagcttttcacttgatcgtc

SEQ ID NO: 26194 - DNA, 1176 bp, Oryza sativa
  ref <308>: DATABASE ACCESSION NUMBER: AK101636
  ref <309>: DATABASE ENTRY DATE: 2002-08-28
gaaaatgtctctccggcccctctgaatccatccttaaagactaaaccctccataagcctcctctctctctttcttccaggagacaggtgacaagggggatagatacacaacgatactccgcagcgcaggaggaggacacatccttgatttctgccatcggaggagctcctgcctcggagatacacgaagctgctacatcttcttccagctcaatcgtatcgacgcttgcatctcttttgctcagagtgatcgtcgtttttcacagcttgcaggaaaaaaagggcaagaaagactgagagcagcagaagaggaagatgatgatgaccgaggtcgccaatcacagcaaaaggaaccacaatgaaagctacttcaccgggaaagcagcagtcaccagcagctcggaggagtttgggagcatgacatccaagaagccgaggaacacaagcccgagagacgctcccgtctccccgaaggagaagaaggataagattggtgagagagtggctgcactgcagcagctagtgtcaccatttgggaagacggacactgcttctgttcttcaggaggcctcagggtacatcaagtttcttcaccagcagctcgaggttcttagctccccttacatgcgtgctcctccggtgcctggcgctgcgcctgaggatcccgaccactacagcctgaggaaccgtggcctctgcctggttccagtggaccagacgctgcagctgacgcagagcaacggcgccgacctgtgggcgccggcgaacacgaccaggcgcaggtgaacggaggaaccggcctggaggctcgggggtctaagaggcctagaggaggaggggagcacttttgtctgggggcggtgtagagttccaacttccaagtgtctgacccgattcatcaaatctcctaacaaagcaaaaactaataagcaaaccgtgtttcactctcgtcggatctcttgcctgtaatatagtagtagctgcaaccctgcctgcaggtcggtgtgagaccgtgagagtgtgctactgatgagtctgtgttagcgccggacatatgtgtgtaatcatcatacatagcgaggtgatagtactagactacctgatgtgcccatatgtgatatgtaactatgtgtctcttcagtaacatgatagtagcagcatgttgctgctagcaacc

SEQ ID NO: 26195 - DNA, 3259 bp, Oryza sativa
  ref <308>: DATABASE ACCESSION NUMBER: AK101637
  ref <309>: DATABASE ENTRY DATE: 2002-08-28
gtctgtgttgggttcctgttgtgttcgtgagtaggactgcagcgttgagaggtcgctgcagccagcgcttacgctactcatggtgaaattggtgatagcgtgggccttgataacaattagtagcaaagcttgcttcgaccgattagctgtgtgacccgtgcaggcattcaaccccagattttcgagcaagagctcacttgaagatagataggtcaatatgaacgttgccacaggggcaatgaacaccctactccccaagcttggggagctgctggtaggcgaatacaagctacaaaagggtgtcaagggagagatcgaagaacttgagaaagagctgacaagtatgaccgcagccctccacaaggtggctgagacgcctgcagataaacttgataagctggcgaagatctgggccagcgatgtcagggagctgtcttacgacatcgaagatgccatcgacaccttcatgataaagggcaaggggcatgaacttgccacgagcttcaagaaggtcaccaatttgttcaacaagttcaaaactaaccatcagattcacggtgtcatcaaagatatcatggaccaggtcaagaaggtcagcgagcgtcgtagtaggtacatagtcgacgacatcgctgccagaccaactattgtggatgttgatcctcgcctagaagctatgtaccggaaggcaacagaactcgttggcattaatgagccaaaaagtgagctaactaagcgactcttggaacatgactactcatccaggcagcaatcaaatataatttctattgttggattcggaggcttgggaaagacaactcttgccaattcattactccaggagcttgaggcaaaatttgattgccatttttttgtttcggtatccttgaaacctgatataaacaagattctcaaaagtattcttccccaacttgacaagaaaaggtatgcccacataaatgaagcatgggaaacgaagcagttcattgatgaaattcaagacttcctcaagaataaaaggttcttgtgcgtgattgatgatgtttgggaaaaatcagcgtgggatgatatcaaacttgctgtgcaagatgctaaacttggtagcaagataattgtaaccacacgaaacatggtcgttgctgaacatgcaggtggtggtgtttatgaaatgaaacccttatctaatgatgattccagacaattgttctgcaaacgaatatttgactctaacgatgactgtccaggtgatttgtgtggtgtcactgagaaaattttgaagaaatgcggtggtgtaccgctagccatcattactacagcatgcctacttgctagcaaaccaaggaattcagaggaatgggacaaggtcaataagtctatcagtttggggcttgagaacaaccttgatgtggacaacatgcggaagatattaagcctcagttacaacgatctaccttttcatttgaagacttgcttgttgtctctaagcaaatatcctgaggatgagctaattagaaaagatgttttgatatggggttggttagcagagggttttattacagatgaaacacgacttgcagggacaagcttgcaggagattggagagagctacttcagcgagctcatcaatcgaagcttgatccagccgatggatacttactttcaatacgaagatggtaaggtacatgagtgcggagtacatgacatggtgcttgagctaataaatcagctgtcagcggaagaagattttgttacaacgtatttatcagatggtcaacaagcaggtaaatgtacatgtacaacacagaagaagaagaagattcaccgactctctctccataacagcaacaaatcttatgcctcaccagaagcaagagaacaattgtccaaagtaaggtcactcactatcttcggcaaggtcgactcgataccacccttgtcgagctttcatgtcctgcgtgtgttgcagattgaggactgcagtggtatgggcaagaaccattttagtgatcttggcaagctacgcctcctaagatttatgcgtctagggtgctatagtgccaccgagctccctgaaagcattggaaaactagaatctctcgaaaccctggacataagaggtgctagatcaagaacaccatattattcttttaaatctcctaaggtagtgtttccaatgtcttttgtcaaactaaggaaactattgcggctatttgctggcgaagtgaagttggcgcaaggtctgatgctaggaaatatgaaatctttacaggagcttgaagtagaagccacaccggaggtaataaaagagattggttatttgaaagagctaaggactcttaggatcattgtgaacagtcaaatcagtgagacattagagttagtggaatccattcaaacatctataaaaaggctcaccaatttgcaagacctggatttgagactaagtggtgtacgagaaaccatagacatgcaacagattccttccggcctccaaaggttgttcatgttccgtttggacatggaggcattcccatgttggatcaattcgtcaatgctctcccgcctcaccgccttatccattttgctgaagtctgaatatctccagcctgaccaccttgatcgcctcgctaagcttccatctcttcgttttctgaggctagaattagaaggtgatccgtttcggctgaaacaactcactatccacagaggtgcatgtgcattccggagtttaaaatattttcacctttatagctacatgatgccatcgtttcaaccaggagctatgcctcaccttgaaaggctttgtcttctgattatgacttttatagtgaggggtgacttgaatgatttaggtttggagaacctccactcccttcgtcatgtaaccattcattcctgtaatgacgaaaccaaggctgttgttaaagaggcacttaaggactgtcctaatcaagcagctctcgaattatactgaactaaaagcttcactcaggtacttagctgatttcttcccctaatcaacaaccttctttcatgtagccgttatgtaatgctaggtcctccaagcctcccactcaacgtttttaattaatatgatgtatctttatgaacattaatttgttcagaactttagttactatatgtatgttttctatcttggcttggtgtacagtaatgaatgatgggctttgtgcgtctttgatgcagctgccgcgttattcattatcttcaataaaaaaaaatatttacaaacgttagc

SEQ ID NO: 26196 - DNA, 1579 bp, Oryza sativa
  ref <308>: DATABASE ACCESSION NUMBER: AK101638
  ref <309>: DATABASE ENTRY DATE: 2002-08-28
gagtggcggtggcgacctccgccgagcggcggcgcgcgaacgagaagcggcctgctgctgccgctagccaactacgctacgagaggcctccgcgtgaatccccgcccctgcctacctccgcgacatgccgacgaggcaggtggtggtggagggcttggcaggcgagacgggacccccacgctgtaccggcgacggaagaggcggagagggggctggccatccggcgaggcttgggcgcagggggaatgggggatgagcagtttggacccccttcgcggtcccagccggccaccgtctcgccggccaggttgacggcgctggctcttgttcgtcgagatcagccatctcataacctggaagacaggaacaccgaggaccaggagaatactcacatatgctatttctcccacatagtccatgaacgtcacagtgctgcggcatggcctcccatgtgactatccagcttttttccactttatttaagctgtacaacttgagattgccatcttgatcaattgtgagccttctgtttattccaagacctgagtcagaagcaatgatgtttaggccatcacttgacgtgaaatgaccagtattgtcgaggactccaatcctggagctgttgtagttagttcgtccaaaatcaaaaattgactcagatgggtttggccaatagggacttgaaatctctggtccattatatatgagccggaggacattatcagtgtcatagtagaggctatagtaaccagacaccaaccttttgtccttggtaaggagctgcaaaggtagcaaggtatcagtgggtgaatcaaagctttgccacacaacactacccttggaatcagtgatgacaagattgcctgtatcaagtagagcaactcgagaatcctgtcctagcattgtcttgctatcccacacaacgaagcccttctcatcgctgaggactaagctaccctcctgagtaaaggatagcttggagccatgaccattcactggtgattctgagtttgctgcccaaacaacggttttttcgactgtattggtgaaccagatggagagggagaaggcgttgtcacctgtttcgtagaaaccaaaggagaaagtattgctgggtgagatgagaaatggtttctcatattcttctaccgataagaatgagccggtacccagtgtatgctctggtgatgcagaagagaatgccagaatctgtagtgacgaaaagaggatgaggcagggaatttgtttccattacatcaggtgcataagtgtatgagatatatgattggcttcagagatggaagaaggaagggaatgatgcatttgttctgtatttatgtagcactagaagagcgctattctaatctggggtcaaggatcatttaagtcttcctccacaagcatttttgcttctgaagactggtaaatggccaaaagtttatccatttgtttcttactgatcatttgataattttctttatcctttttttcaatgagaacggtccttgttttgattgtgtggactgtggtgtggaacgagctttgtctaggactaaatactagcgaaaatatctttctg

SEQ ID NO: 26197 - DNA, 1734 bp, Oryza sativa
  ref <308>: DATABASE ACCESSION NUMBER: AK101639
  ref <309>: DATABASE ENTRY DATE: 2002-08-28
gttggtacatcttgtcacacctgttgccgggcacatgttctccctgttgcagcacctacgtgtagtttagctgcatctcttcttccggttctacgtacccttaggctgtaaaaaaatggccggcggcgaccagcgcggggattcgccgtcgtcgcacgagctgagcggccggctggaaggcatcctagccgacggtgaggcgccgtgggctcgtcgggcttgcaaggcggccgcgttggaggtcaggctgctcgcgcccatcgcggcgccggccatcgtggtgtacgtgcccaacaacgtgctctccatctcgacgcagatcttctgcggccacctcggcaacctcgagctcgctgcttcgtcgctcggcaacaatggtatccagatcttcgcctacggcctcatgctgggcatggggagtgcggtggagacgctgtgcgggcaagcgtatggcgtgcacaagtacgacatgctcggcgtctacatgcaacgatccaccgtgctgctgatggccaccggcgtcccgctcgccgtcatctacgccttctcccgccccatcctcgtcctcctcggtgagtccccggagatcgccagcgccgccgccgtcttcgtctacggcctcgtccctcagatcttcgcctacgccgccaacttccccatccagaagttcctgcaggcgcagagcatcgtggctcccagcgcctacacctccgcggccacgctggtgctccacctggtggtgggttggctggtggtgtaccagctcggcatgggcctcctgggcgcgtcgctcgtgctcagcctcagctggtgggtcatcgtcgccgcgcagttcgtgtacatcgccgccagcaagcggtgccggcggacgtggacggggttctcctggatggccttctccggcctccccgagttcctgaagctgtccacggcctccgccgtgatgctctgcctggagacctggtacttccagatcctcatccttctcgccggcctcctcgacgaccctcagctcgccctcgactccctcactgtctgcatgacgcttgctggatgggtgatgatgatatccatcgggttcaacgctgcagcgagtgttcgtgtggggaacgagttgggagcggggcacccgcgggcggcggcgttctcggtggtggtggtgacggcggtgtcgttcgtgataacggtggtgatggcggtggtgtttctcatgttccgcgactacatcagctacatcttcacggagggggagaccgttgcacgagccgtctccgacctctgccccttcctcgccgccactctcattctcaacggcatccagcccgtcctctctggtgtggctgtcgggtgtggatggcaaaagattgtggcgtacatcaatgtcgggtgctactattttgtgggtattcctctcggttttctcctcggcttcaaattccatctcggagcaaaggggatatggactgggatgctcggtggtacctgcatgcagacgttgatattgttctggatcactttcaggacagactggaacaaagaggtggaagaagccaagaaaagactgaatcaatgggaggacaagaagcaaccgcttcttgcaggcacggttgactactgattcgcatgacaaatgttgggtaaaatgcttatgcgcacttatgcatatatttttttttgataatggaagcttttattaaactcagtcaattacatcaaggtgatacaattatcctg

SEQ ID NO: 26198 - DNA, 1436 bp, Oryza sativa
  ref <308>: DATABASE ACCESSION NUMBER: AK101640
  ref <309>: DATABASE ENTRY DATE: 2002-08-28
ggctgccgccatcgaaaccgctcttcttccctgctgcggggtgagggatggagcgcgtgaggagggcttcgcacgccggctcttggtacaccaacaatgccaggaaactggatgaggaacttgatggttggctgagggctgctggtctcaccaagtcccctgatgtgagggcagtaattgcgccccatgctggctattcatactcagggcggtgtgcggcttatgcttttggcaacattgatccaactaacatttctcgggtcttcctgttaggcccttcacatcactactatactccaaaatgtgcattaacaagagctactatttatagcaccccaattggggatttgccagtagaccatgaagtaattgaggaactcaacgctacaggaaaatttgattttatggaccttagtgtggatgaagctgaacatagcatggaaatgcatttaccctatctttctaaagtttttcagggacataacgtaaaagttgtccctatccttgttggtgcccttaactcccaaaatgaagccatgtatgggcagttgctctctaaatatcttgacgatccgaagaacttcttttctatctcctcagatttctgccactggggaacccggtttagttacacatactacgataagagccatggtgctatacataaatcgatagaggccttggaccgcatgggcatggagataatagagactggtaatccagatgcattcaagcagtacctgcaagagtatgagaataccatatgtggacgccaccccatcagcgttttcctcagcatgctgaaacattgtttgacaaagatcaagatcggatttgttcggtatgagcagtcaagccagtgcaagagcatgagggacagcagcgtgagctacgcttctgcggcagccaaggtggatactccagccgaagaagagaaggattagattgtggattttgcacggatcacttgtacaacccccgcctgcagctagcatgatcggtttgcaatccattgtatctgcctgccaaactctataaagtaataacaggttcttgttgaagaccgatcgttgcagcaaggtgaacaccaggtaacaacaatgaataaggaatactcatatttctggatacatttaccctagcatctacgagctgaatattctttttggggtttgaggcctgcttgatagcggtggggttttttttttttcgatatagattctacagcagcaagctcaacaaggcaacaactataccactagaaaaaaaaatactagcacaaacaactagttactcgcggtaacagtaagcaaaaatcagaagaatatggatagcatgatttcactgagatgcgaagctgatgtatttctcgaaattcaaatctttaagggcattatacctctttgttgagtagctcataaagagattgcttggtc

SEQ ID NO: 26199 - DNA, 3494 bp, Oryza sativa
  ref <308>: DATABASE ACCESSION NUMBER: AK101641
  ref <309>: DATABASE ENTRY DATE: 2002-08-28
gactgctcccctctcgcaacatccggctccgctcgcctaggccgcaaaaaccctaggccttgccccccgactcctcctctcccatggcgacgccggcgacggccgcctccgacgcgaccaacccggaggcggcggaagtgccgtccgctgccccggcgtcggaatcggaaggaccgttcgattccggcgtcgtcgcggcggcaacgacaccggcggtggtggatagtgcggtggagggagacgccccggccgctcccgctcctacctccggctccggtcctgcggcgccgtctatgccggcgaatccggcgtctcctgcaactccagggcccccgcggccgcagttcgccgggtcgcccgcttacgcgagccccccggcgccggcgttctcgtacaacgttcttccgaggccgtcaccccggccgcaggtgggcagtggtgcggcccagcagcagctagcttcccctccggccatgatggctccttcagtggctgctgcagctcttcagcctcctgtcccagggcaatattttgggaacaggccgtctttttcatataatgtagtctcgcatgctaatgctggcttgcctactggtcagcagtttcaacttgacaccggcacaaaccatgctgtccaagtttcacggtttgttccaccatcatccttgcaacctccagctcctatgaatttagctcgcccaagttcagcatttccaggagcaggagctatgccaccaaatcctcctggatctattcgcttgccatttccaggtccacccagaccatccatcaatacttttgttgcaagcccacaacaggcacagccccaggcatctcagttaccttcaaacagtgggagctcagatgttagcacttccaggtctgatactcgaagtgtcccagaggctagtccccagaccatgcagttgtcgacaggcccaccatcaacaagtactgctggaagtccttcaatcactgttcagatgccaacaaatccatcacttccaactcgcccggaggtttttggggccattggtgcttctgtacctggacaaccttccacaatcttgtctgctccaccaagcctccttgagagacctatgactccatctgcttctccttttccccaaacatcgcagtctccaactgcttttcaacagcctggtcagcaacagttgtacccctcctatccttcagcacatggggttcaacctcagcctctatggggatatcccccacagcctactggttttcagcaaccccccttccaatcatacccatctggtcttctagggcctcttggtaggccgatggttgggagttcttctgtgactgcatacttgccaagcatacaaccacccggtgtctcaacaactgacagggattccaaggagctatcatcagcaaatcctggatctgagcagcccactcaacagggaagccaaaacagcgatcagctcgaggacaaaagaactactgccattcaggattcagattcatggtctgcacacaagacagaggctggtgttgtatattattacaatgccttgactggagaatcaacttatcaaaaaccacctggttataaaggggagcctgagaaggtcgcagcccagccagttccagtttcttgggacaaactggctggcactgactggagcatagtaacgacaagtgatggaaagaaatattactatgataataagctaaaggttagcagctggcagcttccaccagaggtggctgagctcatcaagaatgccgagtctggtccattgaaaggaagttcaacttcgctgcaagatgctggcacgatagggaataaagaggaaataagtattgatattgatactcctgctgtacagacaggtggccgtgattcgttgccacttcggcaaacagttgcccctgcatcgtcttctgctttggatttaataaagaagaaattgcaggatgctggcgcttccagtgtgccttcacctcttgctactccatctagtgcatccgagctgaatgggtctaaaacaactgatgctgcacctatgggacatcaagtctcaattagcggcgagaaatcaaaagataacagtggtgatggtaatatgtcagattcctcttcaaattcagatgatgaggaacatggcccaagtgaagaggagtgtactcgtcagtttaaggagatgttaaaggaaagaggtgtattgccattttcaaagtgggaaaaggaactcccaaaaatagtgtttgatccacgttttaaggctattccaagtcactcgaggagacggtctacatttgagcagtatgttcggacacgtgctgacgaggagcggaaagagaaaagagctgctcagagagctgcagtggaggcgtataaacagttactagaagaagcatccgaggacatcaactccaataaggattacaaggaattcaaaagaaaatggggcactgatccaaggtttgaagccttggaccgaaaagaaagggatgctcttttcaacgagaaggtgaaatcgattgaagagaaagttcaatcagtgcgcaatgctgtgatagctgagttcaaatcaatgcttcgagaaagtaaagacataacctctactagccgttggaccaaagtgaaagaaaatttccggagcgatgcaaggtacaaagccatgaagcacgaagaaagagaggttgcttttaatgagtacatagcagaactaaaatccgctgaaaaggaagcagagcaagctgccaaggccaaactggatgaacaagccaagttaaaggagagggagcgcgagatgcggaaaaggaaagaaagggaagaacaggaaatggagagagtaaaattgaagatccgaagaaaagaggccgtgtcttcatatcaagctttacttgttgaaatcataaaagatcccaaggcatcatggacagaatccaaaccaagacttgaaaaggatccacaaggccgtgcagtaaatcctgatttaggtaaaggtgatgcagaaaagttatttcgtgaccatgtcaaggacctgtatgagcgatgtgttcgggatttccgtgcgctcctatctgaggtgataactccagagatagctgctcgaacaacagatgaaggaaagactgcaattaactcctggaccgaagcaaaaggtcttctaagatctgatcctaggtacaacaaactggcaagtaaagaccgggagtctatttggcggcgctatgcggacgacatgaagacaaaacttaaacagtcagatatgaaggagagatcagatacagatggaaagcagcgtaggtcctctgatccgccaaggcggagatagcttttagaaatgcccacctgtaattcgctactcaacattattgttaacagtagttcagattctgtttacacttgtaacaatgagggcgtcaaattaactggaaattttgaagcatccatgttctgtgagttttttggccattcaattctatgagccgtgcatccagattgcagt

SEQ ID NO: 26200 - DNA, 1387 bp, Oryza sativa
  ref <308>: DATABASE ACCESSION NUMBER: AK101642
  ref <309>: DATABASE ENTRY DATE: 2002-08-28
gatctcgttcttcccacacacgcgcgcacacacacatcttgtgtgagacttgtatgatcgattgctagggctatttcgattcgtcacgttatacgcatacgcgttattagcttagttcattagctcaaggttaattaattaacgacatggctgctcggtcgtcgtcgtcgccggcgaagacgacgacgacgctggctttgctgttggtggtcgcggcggcggccgctgctgtggcggcggaggcggcggccgtggcggcggacgcggcgcggggcgtccggcaagtgaaccggcggggcccgtacctgggcgtggtggtgcccaacgggttcgagatggagccgctcctccgctcgccggccttctcgccggccaagaagctgccatacctcgacgtcgcaggaaggagatttcgcttcggatcgataggagagaagaaggtgatcatcgtcatgacaggcctcggcatgctcaactccggcgtgaccacccagctcctcctcaccctcttcgacgtcgagggcatcgtccacttcggcatcgccggcaacgccgaccccgacctccacatcggcgacgtcaccgtcccccgctactgggcgcacaccggactctggaactggcagcggtacggcgatgggccggagaaggagctcgcgctggagtccaatggcgactacacgaggaagtacggggcgctcaacttctccgactacggcgtcgccggcggcggcggcggcaacctgctgaacggcgtgtggtaccagccggaggaggtgttcccggcggacggcacgccggagtctcgccgccacgagttctgggtccccgtcgacggccggtactaccagctcgcccagaagctggaggcgatgccgctggagcgctgcgtcaaccgcaccgggacggcgacgtcgccggcgacgtgcctggcgcgggcgccggcggtggcgcgcgtggagcgcgggtgcagcgccagcgtgttcgtggacaacgcggcgtacaggcagttcctgcggtccaggctgggcgtgacgccgatcgacatggagtcggccgccgtcgcgctggtggcggcgcagcagggggcgccgttcatcgccatacggtcgctctccgacctcgccggcggcggctccgcggagtccaacgaggccggcgtgttcgcggcgctggcggcgcagaacgcggtggccgtcgccgtcaagttcatatcgctcttaagctaagaagctgtcttaaccatcgtcgatgaaggttgagaatgataaccctataatggtaattaattagaagtgttacctcgtgtgttgttcacgatagacgttattgttctgattaaactttatattattgacacattttttaaaaaagaaacagttaaatc

SEQ ID NO: 26201 - DNA, 2861 bp, Oryza sativa
  ref <308>: DATABASE ACCESSION NUMBER: AK101643
  ref <309>: DATABASE ENTRY DATE: 2002-08-28
ctctctgccctctcgtcccccactctctccctctccctttccctctccctccgccgtctcctcccccaccctcgcctccgccttcccgtcgcgccattgcctccgcctacgcagccgctgtcgtcgcgtcaccgtctccaagcgcctctgcttccgcctccccctcgcgtcgtcgccatcgtcgtccccgtctccctgcgacgctggcgccatcgcgtcaccgtctccgaccgccgtcaccgagtgcagccgtctccgcctccggcctccgtcaacgacgaggtcggagcgccgacggctgcatcacaggcggcgcgaaaagctgagggcccaatcctggcggcgggactgccgcgaggttccggacgcatcaactcgagggggagacggcggagggagtgggggttgaggcgggcgcggtcttcgtcctcccggcgccagatctgcttctcatctccacaaggacaccccagcccaccactcatcggcgtcgccatggtcgtcggcgtcgccctcattgtcgccgtcgccaacagactgcgttaagaagccactccaccaccaccagcagcaggggcatccaccgtacgccgcaccaatgccttccccttccctcccatttgtgccctctgggtcacaggtagtcgcttcatcggcagccgcgttgccgtcaatgtacaaggccaatgaccagcagcgagcaactcatggcaccagagacggcggcggcgacggtgactactaaactcttggcacaggagattacaaaggacgtgcaggtgaactcaagaagaaagttcgaaaaatgggacattgcaatcacaacattggaacctaatatcaacactatgctcattgccatagtgccaggtaaagaaagggactacaatgcttattcaaaggattatatgtcttccatagtgaagcagtcatgcactaatactagaagctgctttagagatggagacatcccgtcaaaaatctgcaattacccaatgattttgtgcctgaggatcatataaatgactctgatcaatcgtccaccttagctggttgctctgcttgctgtgaccatgccacgacatccgaaaacacagaggaccaggtttgacaactttggattgcataccagaattttccatgttcttcagctctcaataattcatcttcagaggagaaagggaagtgaggaaaatttgtaagtgacgaatttgacagattgcgacgggcaccagttatgctggtaattttcttgaacctgacactaatttcagggagtccaggagttggagccatgcaaacatacatcatgctaatgtcgtcctgagcttccagattaggccctgctgtatcgatcaatatatttaggtcagttgaggctctaaattaattctgatgataatttttattctgctgtatttgacgggcctcatgcatctgaagatctggattactgtggccgaattcgtgttttgattttggggtgtaaaatactgaaatcaataccgttgtccttgctttcatggggggtatttggtgatttggttacttcgattacatcgagttggaatgtcaatgctctctgaacctcgaatttattactgggttaccgcattagattattggcttcgcaagctgggccttgtgcaaatgatcctgcgtgaaatatgcacataatttacttccctagacgagtttctgctaactattctatagatcatttgcataacccagcagccagctgtttctctcttcttccttttttcccctctgaacatgtttacttaggtcaatttccagacattgaaatgtcttgcaagatcaaaattcaaggttactccgctcattctgttttgagagagttcaaggctagaagagtaaagttagtaagcaaataaaaatgatgcaaagaatatacttgatcagagctatgaatgctctcataagtcataagtctgaactcccagaaataaaacgtcaagctcttagaaacatgatatatgccatttaaaccttaagtgcccctttcagttttaagggtagaagccatgtcttcttggatgctgtcttttgattttccgtcaaatggatcgtctcctttctagagatctaaaatagacttgcacaaaagcatgctgtgtatgctccccaattcttctccttcaactacacaaaaacacagaagataagcttattaaagaagagcggagtgtgcctgtttaaattttacctggaactaatatgaaatgaaataagcagcaataaaacgtgacagggatttatcatggcattgaaatgctacctcacagtgttacatgattatgatgtttctttcttctttcttttccttttggcatgataaaatgaaaacaggataaaagttggtttaattatgaaaaggccatggatttactacagcattatctgtgatgacttatttgctactcttcatgcactcaatgctaggaccaaatgcatgaatagaatgagaaaatagtcctaggtattgggaaactgtatcagacacatgcccattcattctaacaacatttcagtttgattctcaaaattcttcatgccatcaaagtaaatactatctgcactgtctcaaatcaactacaaagctgtcaataaaaaaatgacaaagaaacagaagaaaaggtgaagatagagcttactacttattttaagcacatgtcttgattctcttgagggctcaatcacggaccccttcggtaatttgtattcatccttgaaaagtgaaatgaaactgtggagaccaaggtgtcaaagacagaagaaacttgtgtagttatcattttaacttgacaaaggtatgctaagattggaacttacgcatt

SEQ ID NO: 26202 - DNA, 2908 bp, Oryza sativa
  ref <308>: DATABASE ACCESSION NUMBER: AK101644
  ref <309>: DATABASE ENTRY DATE: 2002-08-28
ggtcgtctcctccgctccttgcgccatctcgcggccgaacaggggagaggaggggaggggatcctggtgaggtctctgacgcggagcacatggacgcggagatggcggctcctgcgcttgcggcagctcatctgctggactcgcccatgaggccacaggtgagcagatactactccaagaagaggggtagcagccacagcagaaatggcaaggatgatgccaaccatgacgagtccaagaaccaatcacccggcttgcccctgagcagacagagcctgtcctcatctgccacccacacctaccacaccggagggttctacgagatcgaccacgagaagcttccccccaaatccccaattcatctcaagtccatacgcgtggtaaaggtgagcggctacacaagcctggacgtcacagtgagcttcccgtccctcctggcgctgcgaagcttcttctcctcctccccacggtcgtgcactgggccggagctcgacgagcgcttcgtcatgagcagcaaccacgcggcccgcatcctgcgccgtcgggtggccgaggaggagctcgcgggcgacgtgatgcaccaggacagcttctggctcgtcaagccctgcctctatgacttctccgcgtcgtcaccacatgatgtgctgaccccgtcgccgccgcctgccacagcgcaggcgaaggcgccggcagccagttcctgccttctcgacaccttgaagtgcgacggcgccgggtggggcgtgaggcgccgtgtcaggtacattggtcgccaccacgatgcttccaaggaggccagcgctgccagcctcgatggctacaacacagaggtcagcgtccaggaggagcagcagcagcgactgcggcttcgactgcggttgcgacaacgccgggagcaggaagacaacaagagcactagcaatggcaagaggaagcgggaggaggcagagagcagcatggacaagagcagagccgccaggaagaagaaagccaagacttacaagagtcccaagaaggtggagaagaggcgcgtcgtggaggctaaagacggcgaccctcggcgcggcaaggaccggtggtcggccgagcggtacgcagcggcggagaggagcctgctggatataatgcgctcccatggtgcctgcttcggtgcgccggtgatgcggcaggctctgcgggaggaagcccgcaagcatatcggtgacaccggcctccttgaccacctgctcaagcacatggccggcagggtaccggaaggcagcgcggaccggttccgtcgccggcacaatgcggatggtgccatggagtactggctggagccggcggagcttgccgaggtacggcggctggctggagtgtctgatccatactgggtgccgccacctgggtggaagccaggtgatgacgtgtccgcagtcgccggtgacctcctggtcaagaagaaggtggaagagctcgctgaggaggttgatggtgtaaaaaggcacatcgagcagctcagttctaatttggtgcagctggagaaggaaacaaaatctgaggcagagcgatcttacagctctaggaaggagaagtatcagaagttgatgaaggcaaatgaaaagctcgagaaacaggtgttatctatgaaggacatgtatgagcatctggttcagaaaaagggtaagctgaagaaggaggtgctgtccttgaaggataaatacaagcttgtgctggagaagaatgataaactggaggaacagatggctagtctctccagctccttcctttctttgaaggaacaattgctgctgccaagaaatggagataatctgaacatggaaagggaaagggtggaagtgactttgggcaagcaagaaggccttgttcccggcgaaccactgtatgttgatggtggtgaccggatcagccagcaagcagatgccaccgtcgtccaagtcggcgagaagaggacggcgaggaagagcagcttccgcatctgcaagccacagggaacgttcatgtggccacacatggcgtctggcacgagcatggccatcagtgggggaggcagcagcagctgccctgtcgcctccgggccagagcagctccctcgcagcagcagctgccccagcattgggcctggtggcctcccgccgtcgtcacgagccccagccgaggtggtggtcgcgtcgccactggacgagcacgtggcgttccgcgggggcttcaacacgccgccctcggcatcgtccaccaacgccgccgctgccgccaagctgcctcccctgcccagcccgacgtcacctctccagacacgggccctgttcgccgctggcttcactgtcccggcattacacaacttctccggcctcaccttacgccatgtggactcctcgtcgcggtcgtccgcgccatgcggtgctagggagaagatggtgaccctgttcgatggagactgcggggggatcagcgtcgtgggcaccgagctggcactggccactccgtcctactgctgatcaagttcttccctccccttctgcttcgccacccgcccccataattaattaattaatcacggaaccaaaagatttattctagtttaaggtagagaaatgataacataagaagacaataacaacacacacacacacacacaaaaatataagatagaagaggaagagttatttttctcggttacaaactcaaagttgcagtttagaacttggtaagtagatgtttcaggctggttggtcagttaatggtttgagtccccatgtctgtactgatcgatgtaagcctgacaaattttggtaggctgatactctccctagcccttcgcgtgacacattcgaagtggaatgtgtccagttttctgacgggctaggtccgctattttgtcctggatacatattcattattcacc

SEQ ID NO: 26203 - DNA, 1888 bp, Oryza sativa
  ref <308>: DATABASE ACCESSION NUMBER: AK101645
  ref <309>: DATABASE ENTRY DATE: 2002-08-28
gcgacgcctgcttctcttctctcctctcctctcacgcacacagcacagcacactcatctcctcttcctcccgatcgctaccacctcctctccagctcacacccaccccccacgcaaatctagaaccttctggatccgccgcttcctcgatccgatcgcctcccccgccgcccgcccgatcggatccccaagggtttccggtttgccgcccccgcgatttagatggtttacgatggcgccgtgaaggaccaggagagctcggctaacccggcgtcggcatcggctgctctgtcggaggcatcggcggcggcgtcggaggtaacagcggctgccgcggcgggggcgggggctggggcggcggaggagggggcggctgtgagtgggcgaccgccgaggcctccccacgacaagcggctcggcgtgcggcatcccttgaagcaccgcaggttccgcgccggggggaaggtgatggtggagcccggggatccgccgtccgcccaggaggtggcggatgaggaggccagcgaggtggagcaggaggcggcgccggtggagagggaaccaccacaggaggagggtggtgatgtagaggtgtcgtctgcaccggcagagatggaggtggtggagggggatgcaatggaggtgtcacctgagccagcagtggctgtgggggagtcggagttggaaggccgaccaggcgaggaggaggaggtgtcctcgcctgtggtttctcaaggggagaggaagcaggagactgctgctgctgctcctgtgccagcagtggaggagaagaaacacaaggatcaagagaataagcacaaagagagggaaagggagaaggagagagagagggtggatgaagtgggctacatgagtggtggatggaagagtgaggatggatttctgagttgtggatattcgagttttagaggaaaaagagcaagcatggaagacttctatgatataaaatcatctaaaattgatgataaacaaataagcctctttggaatatttgatggtcatggtggttcacgtgctgctgagtatttgaaggagcacttgtttgagaacctcatgaaacatccagagttcatgacaaatacaaaattagcaataagcgaaacatataaaaaaactgattcagagtttttggattctgaaagccacactcatagagatgatggatcaaccgcatcgacagcggttttggttggaaatcatctctatgtggcaaatgttggcgactctcgtgctgtaatatcaaaggctggcaaagctattgcactctctgaggatcacaagccaaatagaagcgatgagaggaagcgaattgagagtgctggtggggttgttatgtgggctggaacttggagggtaggtggtgtacttgcaatgtctcgggcatttggcaaccgcttgttgaagcaatttgttgttgcagatcctgagattcaggaacaagaaatagatgatgaattggagtttctgattttagctagtgatgggctgtgggatgtggttccgaatgaggatgctgtttcactcgtgaagattgaggaggaacctgaggcagcagctcggaagctgacagagactgcattttcccgagggagtggtgacaatatcacatgcattgtcgtgaaatttcaacatgacaagatggacggtgattcctcaccaacaagcgataaaagctgattccatttgttgtttgttatacatgttgtcggtcgtttaacttcagctggattttcccggcttcatatggtccctacaatggcgtagctggtactaaagactcgcttcatgttcgcctgtctatatatccctaattttggtgcctctggtggtttacaagttggtattgctatctatacttctctttagtc

SEQ ID NO: 26204 - DNA, 2667 bp, Oryza sativa
  ref <308>: DATABASE ACCESSION NUMBER: AK101646
  ref <309>: DATABASE ENTRY DATE: 2002-08-28
gatcggctcaccgccattgctgaggaacacagctttctcttttttttcccacgatgtggcgccatggcgagagatgtgtgatccttgctgtcgccgccgtggctcttgtcgcggcggcgacggcaacggcggcggcggccgttgggggtgagaggaggacgtacatcgtgcacatgtcgcggtcggcgaagccgaacgatttcgtggagcacggcgagtggtacgcggcgtcgctgcagtcggtgtccgacgcggccaccgtgctgtacacctacgacaccatcgtccatggctactcggcgcggctgacgcgcgcggaggccgaggcgctggagtcgcagcccggggtgctcctcgtcaacccggaggtgcggtacgagctgcacacgacgcggacgccggagttcctggggctggaccgcacggacgcgctgttcccgcagtcgaacaccggcagcgacgtcatcgtcggggtgctcgataccggcgtgtggccggagaggccgagctacgacgacgccgggctcggccccgtgccggcgggatggaaggggaagtgcgaggaaggcaacgacttcaacgcctccgcctgcaacaagaagctcatcggcgcgaggttcttcttgaccgggtacgaggcggcgaagggccccgtcgacacgtccaaggagtcgcggtcgccgagggacaacgacgggcacggcacgcacacctccagcacggcggcgggatccgccgtgcgcggcgccgacctgctcgggtacgccgccgggacggccaagggcatggcgccgcacgcgcgcgtcgcgacgtacaaggtttgctgggtcggcgggtgcttcagctccgacatcctcaaggccatggaggtggcggtgaacgacggcgtggacgtgctctcgctctcgctcggcggcggcaccgcggactactaccgcgacagcatcgctgtgggcgcttacagcgccatggaaagggggatcttcgtgtcctgctcggcggggaacgccgggccaggctcggccacgctgtcgaacggcgcgccatggatcaccaccgtcggggccgggacactcgaccgcgacttccccgcccacgtcgtcctcggcaacggcaagaactactccggcgtctccctttacagcggcaaacagctgcccaccacgccggtcccattcatctatgccgggaacgcgtcgaacagcagcatgggcgcgctctgcatgtccggcagcctaatcccggagaaggtcgccggcaagatcgtcctctgcgaccgtggcaccaatgccagggtccagaagggcttcgtcgtcaaggacgccggtggcgccggcatggtgctcgcgaacaccgccgcgaacggcgaggagctcgtcgctgacgcgcacgtcctcccgggcgccggtgtcgggcagaaggccggcgacaccatgagagcgtacgcattgtccgatccgaacccgacggcctccatagtgttcgccggaacacaggttggcatccagccatctcccgtcgtggccgcgttctcgtccagggggccgaacaccgtgacgcccggcatcctcaagccggacctgatcgcgcccggcgtcaacatcctcgcggcgtggtccggatccgtcggcccctcggggctcgccggcgacagccgccgcgtcggattcaacatcatctccgggacgtccatgtcgtgcccgcacgtgagcgggctggcggcgttgctccgcgcggcgcaccaggactggagcccggcggcgatccgctcggcgctgatgaccacgtcgtacaacggctaccccaacggcaacggcatcctcgacgtggccaccggcctcccggcgacgccgctcgacgtcggcgccggccacgtcgaccccagcaaggcggtggatccgggcctcgtctacgacatcgccgccgccgactacgtcgacttcctctgcgccatcagctacgggccgatgcagatcgccgcgctcaccaagcacacgacggacgcctgcagcggcaaccgcacgtacgcggtgaccgcgctcaactacccgtcgttctcggtcacgttcccggcgaccggcggcacggagaagcacacccgcacggtgaccaacgtcggccagcccggaacatacaaggtgacagccagcgccgccgcaggcagcacgccggtcacggtgtccgtcgagccgtcgacgctgacgttcaccaagtccggcgagaagcagagctacacggtgagcttcgcggcggccgcgatgccgtccggcacgaacgggttcggccgcctcgtctggtccagcgaccaccacgtcgtctccagcccgatcgccgtgacatggacctgaccgtcgtcgcgctcatagctagatcttctggatgatccatcaatggcgggcgcaagagattatccgggataattagcgtgtaatctgccgattagtgtggcgaagtatcgtttcaatttcttagctccagccttgtttagttgttcgaactgtggcatagcgaggaagtgagtgagtgagtgagagtgatccgagttagctccactcctaacaggagtccaaaaaaattaaaggataatgaatggaccagcaaagcaagtggttgctcgtagtagtacagatcaatctcaggtgatttatatctgcatttcgtacacct

SEQ ID NO: 26205 - DNA, 3322 bp, Oryza sativa
  ref <308>: DATABASE ACCESSION NUMBER: AK101647
  ref <309>: DATABASE ENTRY DATE: 2002-08-28
ggtcgcctacacaacccccccctcgccccccgccgcgccctcctctccgtacgtggagcgcatgcaaatcccctcgcgctcgattcttcgcctcctccgacgccccatcgtcgcgccttattctgccctgcggcaccgcatctcgatcccctcccgcgatctctcctctcctccatggctacctctggtccggctcgcgggtggctaccggcgcttgcgcgaagaatcgcttcagtcacggggacgcttaaccctcctgccagtcgtgtttctcgatttcctggatctcggaacatggccagcggcagtggagtggaaggcgagggattgggtataccatacaggcgccgcttcatcccatttgccaacgatcctatccacacaaccaaagataatatcatttctatggacaagcaccttcccatcacccaaggcaaggacagtgctgcaactaaggagttcatctcttgttatggccattgccgtcctaccacgtatggcgatgaagatgcttctaggacagctgtggaggtcaccggtggtaaacaagatccaaggggggcagttcagaacctaatagatggtgaagtggcagttcaggagctaatagatggtgaagaaattgcaaggaaccaaagggccagtgaggttagtgacaacgatggatatgaagagttcaatgatcgtgctgttaactaccactgtgactgtcatgtttggacgccacttattgcaagcagccaccgtgacggttctatatacgataccaggggcacctttggatctgggtggaaatgggattatcgtattgcagatcgtaacgagactcggttggaggcaatgatgttatcacatcccacgaaagattgctacatgagggatggaacttgcatatggcatcctgcaaatggcatgttgcaaattttctcagtaaagttggctaaaactcctgtagttgatggctcaattgaattgtatggatacattgctgtgcgggaccttcaggatccattacttaattatatagtcaaaattggcagggatgatcccatcattgtggagcagggttccctcatcgaaatgactggacctaagcgagggatcgacttttcttgtgctgttctagttgaatatgacatgagaatcaagacaggagaacgagaggaagatgatctacaactgattgatggtgcaacagatcttgaccatatattgacatcacatgtaccagtgagaaatcgcatttatggagattgcggcgcagttgacataactcaagcgaatcttttgtatgcatttgaggcgactgtagaagtcgtcatatcagaagtgcagactagttttgatttgtgtctcagctgttttaccagtgggttacatgaggaaattcggctctttgatggtgcgatcagtgagtcacgtgacttgaggaggtatgtgattgctgtcatggaacatgagtgtatggatttgaagttcaaggtaggtttagggtctgggtgtttcgctgaacattgtcgatccttcaaagcaactaatcatggatgtgccagtgaacaaataaagattgagttcgcctcaatctcggtgaaggtcacttggtcggctatggagttctagaagggtacttagcgtttggacattttttttttatttgttactccctcagttctatattgtaagactttctagcatgttcatattcatctagatagatagatagtgtgaagctagtgttgctagtgttgagtgtaggcatgtgtgtgtttcagcccaacagggcccattacaccaatgcatatgtatagtagaagagagaggaaatagtgtgaagcttctggagaaaaacaatcacctagcaacatggtatcagagggcgaccgcgtcgaggctaaaccctagctagcggcgcgccggtttgtggtgctgcagcttggagcaacggagtggtggcgttgacagcggagacggcgacagctgctacagaggatctcgacgcagccggcgtgaaggagggagcagggtgtgcgctcgctggttgagccgcgcaaggggaggacgcacggcgggtgagaggcgcactgtacgagctgcgtctagacttggctgtggtagtgttcccgaccattatgggtctagacttggctatggatacaaaagcacaagctaccgtcatctcggaaatgcatgccaactgtttagagttgagccatggagccatggtgtccatactagcaatcctgatgtcttgtcaataccaatatctaaaatggccagtgtcaaggctgctaacaacatcaccatcgaaccagtggttcagtatgttgataaagagctggacaaggcatccaatagggatagaggggccaaaggcaacagaggtatggtggtggctgatcatttccaactgtggccatctccttatcagcttaattgtgaatgttctcacactgagcagcaaccatggccaccgcctactcaagcaggagacattggttgtcaagttgcgctgcgacgagtgctagggtcatcatccaaatgcagccaaggtgacttaatgccggtgacaccaccaaggccactgacaataggaaaattgcataactcgaggagccgttctgctggaaacacaactgaagccgtacaatcaattattgagtctcatgcaatatctttacactgtagaatttccaagtcaatgtgcattgcacttaattttgttgagagctggctacaaaacacagccaagaaattatgcaatggccagttgcttaacctttcagttgggatacattttgacgacagaaagatttctactacattgttttttgctgagttgcttgagcacccaataatatattttcaggtttacttaactgcttttcactgtgttcattcgaacaaaatcctgagaccatggattattgctagagctgctaatgagaagcagaacaggaaggtcaagagatgtggttatgattccattgttggttttgatggaaacaatcctattgatgccagtattgcagtaaaggtttccattgatgtgattggtacttggacagattcagagacgctatatgcataagttgcaaacaaggattatttgtctgttaaattacttgagctggtaagaaaggggtccaatacatactggttattagaactcataactaatgagctgaatccttggtgtttactcagatatcagagatggctagaaattctggggctcccacctttgactagggctgcgtggacaggacaagggaagatagaacaggacattagtgtggacataatttcagcatctcaagttatc

SEQ ID NO: 26206 - DNA, 1231 bp, Oryza sativa
  ref <308>: DATABASE ACCESSION NUMBER: AK101648
  ref <309>: DATABASE ENTRY DATE: 2002-08-28
gagggtagtgtaggaggtgtagtggagtactagttgtagcccatggggatcacggaggagcagcgccgccgcatcgaggccaaccgcctcgccgccctcgagaggcgcaagcgcttcgcggaggccgccgccgccgatgcctcggtggggtggaggctcgccaagtgcccaagattcgctccgcctcctcctcagccgacgctgcctcctcctcctccgcggacattgcctcctcctcctcctccgccgccgccgcagccgccggtggggttcaaagtggtgctggaggtgtgcggccccgaggatttctcggtggcggtggggcccgccgagggcttcgcctaccccggcgaggccgagtgcctccgcgccgtccaagattgcatctcttcggctgcaccattctctacaacacaaagtcaaagtggccatattttctccgtatttaagctcatggactatgagcccgtgttaaaatgcctgaagaagttgcctggagttgctgtgcaagatataccttacaaaacaaggaatgttatcaagaatctccctaagttctttgccgaaagctgcgcttctgataaagaagttgacgggcttctcatgaagttgccacaacacttacgagatgcactcctaccctttcaacttgaaggtgtgaagtttgggcttcgaaggcatgggcgctgccttattgcagatgagatggggcttggtaagactctccaggcaattgcaatagcttgttgctacaaggatgagggcccagtgttaatagtgtgtccagctgttttgcgttatacatgggcagaggaattggaacgatgggatccttcatttctgccaaaagatattcatcttgtgtttggtcaccaagacagtcttgaacgtttaggagcttgcccaaaggcagtggtcatttcatatcagatgctaagccgtcttcgcaaaagcatgatgaataggagatgggcactgatgattatcgatgaatcacacaacatacgctgcacaaagaaaaaacacgaaaaaaatgaggtgtttaaattattagcttgtcatgcaacaatcttatgtatcaatacaattaacataaagtattcagctcttgaattctccaatccatgagaccatgatggtgatttggtgctttgtaaatttggtagatcatattttattgtgctagaaacgcctcacttttttttaaaataaaattctcccagttgattct

SEQ ID NO: 26207 - DNA, 2420 bp, Oryza sativa
  ref <308>: DATABASE ACCESSION NUMBER: AK101649
  ref <309>: DATABASE ENTRY DATE: 2002-08-28
gaggccgtcgtgcacagcctctctccaccggcgagaggcggcggcggcggcggcggcgtgcacagcctctccctcgagccgctccggggcttcatggcgccatggcctcctgcccacgagcgtatggcaaaggtgaatacatgtgagctgctcgttccctgtagaacacagtgcgttcaacagacacaactggctgaacggaagaagaattctgcactcccataaataaaactgacgcatacatggagcccatggcattgaacaagtcctgttgattgctcctgcaagagtggagtatcctcagtgaattgtgacagatataatctcaagaacattgttccaaacaacagtgcaattacaatggtgtagaagtatttgacagcagtatatggagggtttctccagtaggacagactttgcttccataggcaagccaaacattgtgtgatgaaagtttgagagtattctgttggaaaggataggtcacttgaaccatcaggagaatcaatttccgcaggcaatcggagccatgcagagaatgcaagagactcgtagacagtaacatttggtgaatggatgtcattctgctcacagtatcctgatacacgagcaaaagtttcttgcttctttggatagccagagatggtaatgttaccctctatgtatccactggtcttcctcccagccaacacatccatcaatgttgtttttccagcaccactgacacccataagagctgtaagtactcctggcctaaatgaaccactgatgcccttcaatagctccaaccggctctctgtcacaccttgtgctttaattacctacaagtttcattggatattaaagccagttagagttgctcttaagtattatagatataggagaatcttcatactgagcatgcacatttcagatatatttatatttcagtaattctctaccaaatacctctggcatgtcaacactgtatcttatatcttcaaacgtgatggagagaggtacaaaagggagaaccattcctttcttgcctggactagaattcactgttgcatggttggaaattgcttcatcattactatcatccgcagtgtctggtaggcatatcacatatccgaggttgttgttagatggaaactcattatgttaaatcatatttagacagctaaatacaaaagcgaacagtacttgtgttggtggtaattcgtcctctcgaggatgcttctataacatcaccggtcagattagcttgttttatcttcaacgtctcctcagatattgttggctgattgctgtcaaatgctgcagtgaaagaatgcataaaaatgagaaattataaaaatgagaatttataagctctggcattccaaatataatttatttctgactcacgattgaggaatgtgaggcagattgtgtagaggatattgaatagcaggacgtatccgagcaatgcaccaacaccaatccaataccatttggcctcagggaaaactccacgggattcaagaactagttttccaagtggctccctgaaaccagggcagcagggtggctcctgctcttgtcaaatgggattgccaactcacttcttattgcctgaccaacatggaaagactgaaatgcctctgcaaactccttaacaggaacatatcggttgtaacaaagcaatgactgctgttccaccaacaatgtggatggtctgccggatggagtccacaatattgtatgttgtggagctgtcaagtccagttgatatctcatccatgaaaagggctcgtcctggggtgacaatcatctcagctgcaacaccaatttcagggtccggagaaattgactgtctcacgaaccgtcaattcacccatatgtagatcatgttgactaacataagctgctgatctccggggctcgaattcatccatgacctgaagggacatttccagccaaggccaaaagaagtgtggtttttccagcgccaggaggacccaaaagcaaggtcattctgaaaacagagagccctatgtttggagtaccaatcaggcaagtctgctgtttatcaagatgtccaagagaagtcgtgttaccaactccaaccagagaacctaatctcgttgctcttcaggatcaccggtttgactgtcttaacagtggcccagaattttgctgcactacaggaagctctctagctaacacgggcgattgtcgtaatcaaaattaatgacaagcactgaatttgtttttgccaactaagtttcacaaaaccacagatatattgactaaattaacacaaaactacagattgatacatcactttaattctgtagttttatgatatatcaccttaaatctgtagttttgtgataatttgaacaaagtatttgtagttttgtgaaatttactaattttctcctatcggtggatgt

SEQ ID NO: 26208 - DNA, 1025 bp, Oryza sativa
  ref <308>: DATABASE ACCESSION NUMBER: AK101650
  ref <309>: DATABASE ENTRY DATE: 2002-08-28
ggtccaagaaaagaaaaaccaaaaccacccaccacagcggcagcgagcgacgcatcggggcggaaggaagcggcgcgaatcgacggaaggaggcagcgcgcttcctctgtaacgactgcgctgcgcatcggcggcgtgtctcggcagcggcgcgcgcattggcgtcgcagttcccctttctcatccaaagcttgattccccaaatcaaatccagcactcgcactgtacttcagtgtatgaattgtcatggatagttttagccttcaatttgagccctaggcatgaagagatcctggctccgccactgaaggacgacgaggggcaaccggcatgagggacgtcggcacaccagcaggccgtgaccacagcagctcaggctcagcctcaacctcagctcaggctaaaaaacctgcgtctaccaacgctgaagagccatcatctcctactcgtggcgggcagcaacaagactcacgacggctccggaccctctccgaccccgagcttgatttgctcatcaccttgaaggatttggccatggtatgcacggaaaatgccagcctcgctgtgcttggtcacgactatgatcttcccacgctgcgtgctcttgggattgttttgctggaaactttgaaagaacgacttaaggaaacctcaattgatccaagtgtttttgatagactggctctcttaagtgattctgatgcgtattttcccagcattgcgagtgactctgagtctgagggagtcagatccaagacgccaatgggtgccaatggaaaaaggaagcagacgcaggctgggtggctcagcgaggaaggtagaaagaaaagaacaccggcgagtcaaagatagcagtgagcaagcatagatagaccatgattattcctggtaggttagcacttagcactggagatttggtgttaaaacttgcaatgcgattggtgtttctgtctggctggtggctcgcaaatgtagaagacatggtgtcacaactggagtacatggaaattgaaatgtttcatggc

SEQ ID NO: 26209 - DNA, 991 bp, Oryza sativa
  ref <308>: DATABASE ACCESSION NUMBER: AK101651
  ref <309>: DATABASE ENTRY DATE: 2002-08-28
gaccaccggccgccatgagatctccggccgccgcggagttctccgacgcgctgccatctccgacctctcccgccgcgacgccatcccaccccagctccggccgccacttctacctcgccgtcgaccgcctccagttcaagatgaggacgctcttggagctcctcggcgtcgtcgccgaccgccgcggcgcgctgccgatcgccgtcggcgtctcctcccgcgacgagctcgatctcgtctgcgccgacgtcgccagcctccccttcgtgtcattgtcgccgctgtacagcgatcaggctgaatcagagcgagcatctgttcttgacaagttccggcaagcaacaatccaatggaatcatacaaaagctgctgctgctgatattgcggatagtcccaagactgaaagtgcagattcaaaactaaccatcgtagtagcaacagatgcctgcttgccccaggcaacactaggagaggctccccttatggctcgcgtgctaataaactatgagcttcccacgaagaaggaagcttacttcagacgtatgtctacatgcttggcagcagatggaatcgtgattaacatggttgttggtggcgaggtagccactctcaaggctctagaagaaaccagtggtctgcttattgcggagatgccaatacatgtttcggagatattatgactgtctcaattgaatggcattcagtagttatttccttaggaactaactactcaagtgatcaaaggttatactttgtgacttctatttgtgaattgcttagaacacagtagaaaacaggactcagtgaaaataaagaggggactcctatggtttctcaatgccttgatactttcaatactggaccatagcagtttactataattttcctattgtagcctgatttgtaataccatggagtcctctaccaaatgctttcaaacactacagcaggttttggtaatatgacgtacaaatgatttttgaaaacttcc

SEQ ID NO: 26210 - DNA, 1011 bp, Oryza sativa
  ref <308>: DATABASE ACCESSION NUMBER: AK101652
  ref <309>: DATABASE ENTRY DATE: 2002-08-28
gggggaggcatcccattcgcatcactatcttcccaatctcgcgaataatcgagagagagagagagagagagagagagaggcgacgagacggcgattgctcggttctcccgcgggcggcggcgagccggcgagggcttctccggtggggggcggcgagctatcctagcgcccgccttgggagcgctctcgcggatctcctttggagctttgatagcatagcaaggtcatggcagaggttgcagatttaactggggatggaggtgttcttaagacggtggtcagaaaagcaaaggatgatgctatagctccaactgatagtcttcccttggttgatgttcattatgaaggcacactcgctgaaaatggtgaagttttcgacaccactcatgaagacaactctattttctcatttgaaattgggcaaggagctgtcattaaagcatgggatatagctttaagaactatgaaggttggtgaagttgcaaaaataacatgcaagccagaatacgcatacggaagtgcagggtcgccgccagagattccacccaatgcaacactcatttttgaggtggagttagtggcttgtaggcctaggaaaggttcaagcctgggcggtgtttctgatgagaaagccaggctagaggaactaaagaagcagcgagagctagctgctgccaccaaggaggaagagaaaaagaagagggaagaagcgaaggctgctgcagcagctcgtgtccaagccaaacttgacgcgaagaaggggaagggaaaaggaaagggaaaatagatgactagtatttgcttctgactactgtaacctagaaataatccacaacaaatcatcatctgcaagattgcttgttggctactgttcatcagatgctgcgttgttgctcctgtttgacaccatggctgtactgatagaacaaaattgtagttaacgttttcacaaatcatcacatgcaatcattgaccggttattggttaatgattgcatcttcatatctgatg

SEQ ID NO: 26211 - DNA, 848 bp, Oryza sativa
  ref <308>: DATABASE ACCESSION NUMBER: AK101653
  ref <309>: DATABASE ENTRY DATE: 2002-08-28
gactctagcatttctctctccgggtgtgtctctctctttctttctctctggaaacaatgtctcctgtgccgagtccgcatcaatcacaccatctaggccatggctcaaggaaagagaagcgcatgaggaaggtggatacctttgcgccgcacaacgacggccaccagtggaggaagtacggcgagaagaagataaacaactgtaatttccccagatactactacagatgcacctataaagataacatgaattgcccagcaacgaagcagattcagcagaaagattatagtgatccaccattgtactcagtcacctactacaatgagcatacatgtaatagtgcttttcttcctcttagcccctcagagttccagctgcagactgcatctgggaaggcagtctccatctgctttgaatcatctggggctcaagaaccaatgaccaatgccagctcaccttcttcaagcgcagcacggcgtagcacaccttcagagaacaagaatcagcctcttccacggcattcggaagcctattcttggggggttggtgttgtagaacaaaagccgtcctgcactgagctccaatcttgcagcaccgaatgtcaggatgcattttcagctggtacgattcctgaagagacagtagatgcaggaagatttggttctatcagattcttccattttttgtaaatgaattaatggaagacagtttattttatttcaaagagctaatatgatacacatgttttttcctctacaccctcaaagagtatgagaggttttccttgcatgtcaccatgaatttcttagttgaattgaaataccagtgctaatttacattccagagtc

SEQ ID NO: 26212 - DNA, 926 bp, Oryza sativa
  ref <308>: DATABASE ACCESSION NUMBER: AK101654
  ref <309>: DATABASE ENTRY DATE: 2002-08-28
gaatttctattgtcacacatatatccttttatactactcctctgtccctcctctccctaaccaatatatctccacccctcttctcccctcactcaccatttgctctcttctctcttctctcttctccacatcaccacagccacaccacactagctagtgttcatcatcatcatcatcatcatcatcatcttcttcttcttcttcttcttcttcctcgcttcgttttgctagctcgatcgtgtctagctggtcgtcgtcgtcgtcgtcgtcttcgccatggccggctgtttgcagacgagaagcaggaggaggaggaggcggccatggtggtggctggtggtagcggcgctgctgctgctgctgctgcaggcgtcgagctgcgaggcgacgcgaggcatgcagccgttcaaggggaggccgctggagagaggcgtctccaacaacttcttcgggttcttgccccgtggccccgcgccgccgtccggcccgtcccggcagcacaacgccattggagccgaggaccaaggcaacccatgaattcgatacatgtagagagagagagagagagagagagagagagagagagagagagagagagagagagagagagagagatcagagttgcatagatatcatcgaaattaatcttcttggttaattaattgtagctagcactagcagtagcacatgtagtagtagtagtagtacgtagcagtagcagtatatacacttcggcaagaagaagaagaagaagaagaagccgcaggtatagtacagtaggatcaaggatgatgtacatgaagaagcttttttttcttttccttttttttgggtagggctctctgtcaaatgtgttggctgttcatggcattctcttctcttttggaaaaaaaaaacacaaacactgggtgctctgaattttgttc

SEQ ID NO: 26213 - DNA, 1128 bp, Oryza sativa
  ref <308>: DATABASE ACCESSION NUMBER: AK101655
  ref <309>: DATABASE ENTRY DATE: 2002-08-28
gaccacaagggaagcaaacacaattacacgacgagctcgatcatcaagtggctctagctagctcgatcccacgagtgctccattttggccgtgcgatatcgcgatcaatggcttcgtttaggctaatgatagcggcggtgtctctgagcctcgtgcagctctccatggggagcaggaggttaatggagttgtacatacctccggcgagtgaccagctcacgtaccaccacggcagcgtgctcagtggcgacatcccggtgtccatcctctggtacggcaaattcacgccgacgcagatgtcgatcatcgccgacttcgtcgtctcgctcaccggcgcgccgaacgcggccacgccgtcggtcgggcagtggtggggcaccatcgaacagctctacctgtccaacgccgccacgaacagccagacctccacacgcgtgctcctcgatgagcaggtctcggacgaacagtgctccctcggcaagtctctcaccctggctcagatcgaccagctcgccgcgcgcgtcggcaccaagaggggaggcgtcgcgctcgtcttcaccgacgaggacgtcaccgtcgaaggcttctgcagcagccggtgcgacaagcacggctcggacgcgagcgccggcaccacccacatctgggtcggcaactctgcgaagcagtgcccggggcagtgcgcgtggccgttcgcgcagccggtgtacgggccacagggcacgccgctggtggcgcccaacaacgacgtcggcgcggacgggatggtgatgatcctcgcctcgatggtggccggcacggtgaccaacccgtacggcgatgggttctaccaggggccccaggacgcgccgctggaggcgtgctcggcgtgcggggagtctacggcagcggcgcgtacccggggaacgccggtaaactcctcgtcgacgccaccaccggagccagctacaacgccaacggcgcgaacaggaggaagtacctgctcccggcgttgtacaatcccgcaacgtcctcctgcgacacgcttgtgtaatccatagtgccggacacgttacgtgttctgtacctgtacgcttgggaagttgtacatacgagttgggaaagtaatggaatcactttgttcgttct

SEQ ID NO: 26214 - DNA, 1675 bp, Oryza sativa
  ref <308>: DATABASE ACCESSION NUMBER: AK101656
  ref <309>: DATABASE ENTRY DATE: 2002-08-28
gtggggtttcctcgccgttgccgtcgccgtcgccgtcgccgctgccgcttccgcttgcgtgccctcgtcgccgtcgaatcgctcgcccgtcggtcgggtccggtgacctcgctgcctccgagatcctcctctcctcgcctgcgcgctcttcccgtcggctagaagggctgcttcttccgtcccggctccgtcgccatccccccgccggcggcgacttgggcggcctcggctacttcgcccttgttttccggccaagttgaaggttccggttccgtttccgatcctcagattttgagaaaatggatcctgaagatcttactgactctgaggaagatgaagatgatgacatgatgttttttatcttgcctacactatatcttgtttctactggaagcgaagagccatgtcatacatcgaagttcagtggtgcagagtggatttgtgaagtgcttgaagatgaccgtggtgaaggctatgccaaatttcgaatggagcctcaaattcttcagaaattttcagaccttcttaggtcaaagaatcttttgcggaatacaagaggcgtttctgtggaagagcaaattggcatgtttatttatatgctctctcgaaatgccagctttcagaaaatgagtgatagatttgagcacagtagggagactatccatagacatatcaaggcatgctttgatgcaatcacctcattgacagatgagtttgtcaagcatccttcaactgagactcattggaaaatatcatctgatccgcaatatgggccttattttaagaactgtataggggcaatcgatggagttcatgtacctatcacaatatcagactatgaagcagctccatatcgaaatatagaagattccctttctcaaaatgtgatgctggcttgtgactttgatttgaattttgtccatgtgtgcagtggccacgaagggtctgcatccgacgcggcagtcctatatgctgctgtggagtctggatttgaagtcccaagtaacaagtattatttggttgataggggttatgcaaacacaccatcttttcttgctccttatagagaagctgcataccatattgaagaggaggagcagagcaattgtcagccaagtgactacaaggagttgttcaaccttcgtcactcaaagctgcgcaacaacataaagcgtgccacagcgctattgaagatgaggttcccaattttaaatgtcgcaacattctatcagatagaaactcaagcgaaaatcccagcagcagcagtggtgctgcacaatataatgcagggccaaaaagatgatgatgatgatgatgggtgggcatttaaccaggcaatgccagtttcatcccgtagaactgtagttttacccagtggggatgatgcttatggcaatgatgtcgaagaactgaacaaccaatgtagcatgggtgatgctttgagagattatattgcgaagaagatgtggacagattatgaaaggaacaggaggtaggtttccctattctgaggccaaacaacatataggtgaaaggaaagagctgctcatgtgtgatttgtatcttgaattctgatgtttatggttaaagatggaactaggcaatgccctgtagaagctgtactcagttgacacccaccagtaagatatggcattttcatgtcctccatttggct

SEQ ID NO: 26215 - DNA, 2585 bp, Oryza sativa
  ref <308>: DATABASE ACCESSION NUMBER: AK101657
  ref <309>: DATABASE ENTRY DATE: 2002-08-28
gtggcgcacatccctcctctccccattctctcctcttcggttttcttgggtttccttcaccgttcggctgcgcattgccttcccatcggagctacttgcctcaacagtttggtcggccgcatgtgctcggtcgggaggccctagggcctccactttatctgcgaaggtgatccaatgaaagccttctagattacctccgatcccatcgctccaatccctatttccatccgacctctctcatctagccttcgcctcctccaaaatccacaatatggtgtgccgctgatatgattttcccctccctcctcactagaaatcctttcttccattggtgaccatggtaatcctcacctcctccacccttaggtaccttcctggacgctatcctcgcatctttgaccaatagccacgaccagggtctgcatcacggcacggggacctagcctcacaatctgaggtgaagcaacagccatggctgctattatgcgagaggaccatagttgtaactgctgaatacatcactgccttgccttttctggtatggtaactgctctggtaatcagagaaaataggatgcagacagactcagatcgccatcttctcgagcacatgatctacacaagtagccaattctgcacaaagttaagtaaactctaaactatatacattgaattttgcttcccaatagcagtgtagaagataatagattttctaattgcttttctttgtatatgctcattactgtccttggtttgtgcttattcataacaagattgtttgcctatcctttttctctacaagatgggcacatttaaatgaactatttatcattaatccatgatggagataatgcgttgaaagctcagttagtccgttgcttattaatttaagttaaccatttttcttaggtcaattattatcttacattaacataatagagaaaaattttcacttttgagaggattcaacacaatgtttcattcaaacaagcgccttcagcaactgttcatagaagtgcattcttcttctagagcaatgtacaatgatttaggatttgacaaagtaattttcaatttatcagaactgatttctcataattacatcttcatttcatattggccagagcattgccagtgagcgcgctataactgtggtatcccaatcagtggcactaagttttaggttgactgcaatgctttttctctgcagttgctcctaactgcaatttctttttgtcaaacctcattgatgtattcaacaagtatcagtcgctgaagcaagttctgctgcagcacaaatctaacagtgttaggttctcatgttcttctggttatacttagcattctttaatgtcaatttatcacatttctggttatagtttcttactctttttttacagcatctgtatgaaacaacaacagtcatttcagcattctttcctgctggtaggaaaaatgtggactcataacaaatgtccaaaattggcgtgtttcatttgacctaaatagtaaaaagataggcattagtacagttagacatggcttgtgggtaattaggcttacctacatggtcattaacttagctataaagttgttgttacttgacaagatcagttaacagttaattgccagaactaaggcttacaactagtacatcacttcagagaacatacttacttaaacccgcaatttgcatgtaccgtattcttcagatacgttggttgcccatataaaatggggtcttaattcctttacatgcaataattcataaagtctgaattcatcttcaacagtgctttggtcacaaccaattgaagcagtagttgtagatatttcttaccacacacattttttattgtagtgttcaaataaaataaattcactctaaatatttgcttgactaaaactcagttacctttattgcatttcaggattctgttataacctgaaacatatttattcaaccctttataaagttacatgtccatattatatattcatattaatattagtttattccaaactgcactacaaataaagaatttaaccatttggtagtaatcagttgttgagcaaagctcccaaatagcatgtgtaatcaagttctattgtgttgtattcatgctctcaaatggtggttacatctttatgccacattaacttagctaagcattgacatttgacaagtgaagtccttacatgattacatatgatttaatctttgtatagataagttatatagcatatccataggttttagttttgacttacacaaagaaactgctatatttagtcactgattaattcatttatttgttgagttatttctctcctgttgactgcactaataattggtgctttattcactaggtcaacatcttctctgtttatatgtaccttaccttacccatctttacggaatcagtcactgcattgcatctttcccttttctccattgatactatcctcaatctattagtgtggtaacaccggtatatgttctatcgaattgtatgataggtgatgccttgctgaatgatattggcacgattggaaggataatagagcaaatatttaccttttgtc

SEQ ID NO: 26216 - DNA, 1065 bp, Oryza sativa
  ref <308>: DATABASE ACCESSION NUMBER: AK101658
  ref <309>: DATABASE ENTRY DATE: 2002-08-28
gtgtcctttctctttctctctctccatcgggtggacgacgagacgacgacggcggcgaaggaggaggaggaggaggagaagagcgaggaaacccgtctgcgcggccacgcgacgctagggggccgagagcctgcagcggtcgccgcggctggagcatgaggtggccgcggcccatctcgcctggccgccggctcctcccggtcgtcgtgctgttcgtcgccctctgctcgatccctgggattttttctcagaggctcgtcacacttgacagcattgatatatttactactcatgagtggttcccgagtaagccaactgtgtatttcctttgcgatggtgaggacaaggtgtatttgcctgacgtgaaggatgcaaacaatatatacacctttaagggcgaagaatcatggcagcccttaacagaacttccagaaaagaaatgcaagaggtgtggtttgtacgaagaggatacatttaaacatgatttgtatgatgaatgggagctgtgttctagtgatttcaaaaaaggaaaatacacccatttcaaggagggccagttcaatgctactttcctatgcccaaattgcactgcctctgcgggtgattctgcaaaccatgattctagctcagaagtggaaactaaaaagtcatccgttactgtaatcataatagtcagtgttctttcttctgtccttgttatcattgcattatttgggggctacaagtactggctgaagaagaagagggagcgggatcagttacgattcctcaaactcttcgaagagggagacgacattgaagacgaactgggccttggcaatgaactctgaacagcacatatagttaggttcctgaagctctgtggagagggaggtgacactgaagatgagctgcccctggcaaggaactctttccaaaacatcacgtacagtctgacctgggaccttttcagatggattctccatgtcatgtataaatggacagctttagcttagaaatttttgttatgtagtgatacaccatagtttctgaatgaatgattgacaaaaaaatgttcttcaattc

SEQ ID NO: 26217 - DNA, 1896 bp, Oryza sativa
  ref <308>: DATABASE ACCESSION NUMBER: AK101659
  ref <309>: DATABASE ENTRY DATE: 2002-08-28
aaaagttttcaggcatctgaagttttggacttgcaacacactctgctttcaagttctgaactagcattctactctgttctagctgactaggtcacacatggctatcaaggatgagcagcagccactgcacatcctcttcttcccattcctcgcgcccggtcatctcatcccgatcgccgatatggccgctctgttcgccgctcgtggcgtcaggtgcaccatcctcaccacccctgtcaacgccgccgtgatccgctcggccgtggaccgtgccaacgactcgttccgtcgcaacaacggcggcctggcgatcgaactcaccgtcgtgccatttccggacgttgggctcccgccgggcttcgagagtggcacggcgcttacgacccaggacgaccgtgacaagttcttccttggcattaggctgctccatgagcccttcgaccggtacctgtcggagcaccacgtcgacgccgccgtggtggacagcttcttcaggtgggccgcggacgccgccgccgagcacggcgtcccgcggctggggttcctcggcaccagcgtgttcgcgagggcctgcaccaacagcatgctgcgcaacaacccgctggagaccgcccccgacgaccccgacgccgtcgtgcccctgccgggcttgcctcactgcgtcgagctgaggcggagccaaatgatggacccgaagaagcggccggaccactgggagaagttccagagcttagacgccgccgaccagaggagcttcggcgaggtgttcaacagcttccacgagctggagccggactacgtcgagcactaccgcacgacgctcggccgccgcgtgtggctcgtcgggccggtcgctcttgcgaacaaggacgtggcggtgcgaggtaccagcgagctctcgccggacgccgacggctacctgcggtggctcgacgcgaagccacgcggctcggtggtgtacgtctccttcggcacgctatccagcttctcgccggcggagatgcgggagctcgcccgaggactcgacctctccggcaagaacttcgtgtgggttatcaacggcgcggacgccgacgcgtcggagtggatgcccgagggcttcgccgagctgatcgcgccgcgcggcgaacgcggcctcaccatccggggctgggcgccgcagatgctcatcctgaaccacccggccgtcggcgggttcgtgacgcactgcgggtggaactcgacgctggaggccgtgaccgccggcgtgccgatggtgacgtggccacggtacgccgaccagttctacaacgagaagctcatcacggaggtgctcgaggtgggtgtcggcgtcggctccatggacttcgcgtcgaagctggagaaccgccgggtgatcatcggcggcgaggtggtcgcgggagccatagggagagtgatgggcgacggcgaggagggcgaggcgatacggaaaaaggcgacggagctgggcgtgaaggcgaggggcgcgctggagaagggtgggtcgtcgtacgatgatgttggaattctgatggacgagttgatggctcgcaggggctccgtcaatgtgtgacagcactccctaacaaggtgattgacggcttgacgcatcaagaagatggtgatcggacattcggacatctccagagtccagactattgtctttttcctcagagttttttttttttggagtaactatatttatggcgccatatttttcatcaaaaaatagtcggtatatatttacattgtaaatttctaaattacatatgtaattttagtgtatttacaatataagtcataaaattacatatgtaagtctctaaattacatatgtaagtataatgtaattataatgtaagtgcaatgtaatttctatattttgcattgaaaatt

SEQ ID NO: 26218 - DNA, 1975 bp, Oryza sativa
  ref <308>: DATABASE ACCESSION NUMBER: AK101660
  ref <309>: DATABASE ENTRY DATE: 2002-08-28
gagtagctagcaagcctccttatttttgcacttgcaaactgcattgtttcacttgtctgcagctagtttcaatggctgccatcaaagaggaatccgactacgacagtagccggtcttcgctgacggcgccggactcccgccggagctggatcagtgacattggtagctccagctcggtctcggcgcgctccttcggcggcgacacaccggcgtcgtcatgccggtacaagccccacaaggcgaaccaggccgagtgggaggccatccggcgcctccgtgccggcgccggccgcgtcgggctggagcacttccggctcgtccgccgcctcggcagcggcgacctcggcaacgtctacctgtgccggctgcgcgagccgtggtcatcgtcgtcgatgacgacgacggcgggcggttgcctctacgccatgaaggtggtggacaaggacgcgctggcgttcaggaagaagctccggcgcgcggaggtggagcgcgacatcctccgcaccctcgaccaccccttcctgcctacattgtacgccgacttcgaggcgtcgcactacgcctgcctcgtcatggagttctgccccggcggcgacctccacgtcgcccgccagcgccagcccggccgccgcttcaccgtctcctccaccaggttctatgtggcggagactgtgctggcgctggagtacctgcacatgatgggtgtggtgtacagggacctcaagccggagaacgtcctggtccgcggcgacggccacatcatgctctccgacttcgacctctccctcaagtgcgacgtcgtcccgaagctgctccgccccgccaggagcgccgccgccggtggcaagccgccgctgccgccgccgtcgtcgtgcgtgccgccgacgatccagccggtgctgtcgtgcatcttccgcggcgtgcacaagtgccatcacgccaaggagtgcgccggtggcggcgcggcggcgggtaacaatggcgacggcgacggcaacgacgaggaggcggagaccgagacggcggagcccgaggtggtggtggtggagccggtggcggcgcggtccaagtcgttcgtgggcacgcacgagtacctggcgccggaggtgatctccggccagggccacggcagcgcggtggactggtggacgctcggcgtgttcatgtacgagatgctgtacggccggacgccgttcaagggcgagagcaacgagaagaccctcatcaacatcatcaagcagccggtcaccttccctcgcctcgccggcgccgccgccgccggcgaatgggaggagatgaagacggcgcaggacctgatgttgcagctcctggcaaagaaccccaagaagcggctggggagcaccatgggctccgccgaggtgaagcggcaccccttcttcaagggcgtcaactgggcgctcgtcaggtccgtccggccgccggaggttcctgcgccgccggcgccggcgccgaagaaggtgatgacgatgagcaagaaggagcggcaagagccgtacaactaccgaccggaaaaccacttcgattacttctgatcaagtagctgccatgcatgagcatgatgcatgatgcatcttggttaattaattaattaatcacttgtaagaggggagattagtagtgtacatagagtgctaatcaatgagtaaccagtgttagtttctcagtgagtgagtgagtggcaggcggccatgggtggtgggggtctgcatgcttgctctcatggcgcggttgcgcacgcgcggttcgtcactgggttgggctagtcggctacccgtgcgcggcagacacgagcccccaccagttccgtcggtcgatcgatcgatcggtgaagcagcagctttgtttgcgtggccccggacaccgtgcgcgcatctcccagccgatctcgctgctgcgcctgcgcgcaatttcttgtgccgcctttcgcggaaataaagccagccccctccccgcg

SEQ ID NO: 26219 - DNA, 2502 bp, Oryza sativa
  ref <308>: DATABASE ACCESSION NUMBER: AK101661
  ref <309>: DATABASE ENTRY DATE: 2002-08-28
gggttgggttggagtcggagagccgagagcgtctcgccgcctaccgctcgctcatttgggcagaaaccctagccctaggcgagcccctaaaccccaacctcgcccgcgatttcctccccgagggcgtcgaggggaggtaggttggcgccatggatgcgatgaggaagcaactcgacgtgctcatgggggcaaaccgcaacggcgacgtgcgggaggtcagccgcaagtactacgaccgcgacgtctgccgcctcttcctcgccggcctctgcccccacgacctcttccagctcacgaaaatggatctcgggccttgccccaaagttcattcgctgcagctacggaaggattatgaagaagtaaaggcaaaaggaacagaaaattatgatagggaactcgaggaaatgatagacaggctcatcgtggagtgcgagaggaaaattcagagggcgctgaagcgtcttgctgatgaggatgccaaggctgctattgcaatatctgtttctgaggttactcagacagatgaggtgttgcagttgtcaaaggagatcaaggaaaaaatgaaagaagttgatacctatgattttgaagggaaaactgatgataaaatcaagaccatggaagtggtggaagaattaagatctaaaagggctgacatgcaggctacccttctgcttgatgcctttaacaaggacagagcttcattacctcagcctactccaacacctcaaatggcatcagtaccagcacctgctccccctgatgctcgcactcaagaaatgatcaacgaaaagataaagaaagctgaagagcttggtgaacaagggatggtagatgaagcacagaaagttatggaagaagcagaggctttgaaaaagttggcagcacggagggaaccaacttcggatcctactaaatatactgctgctgatgttcgaattactgatcagaagttgcgtctctgtgacatatgtggagcatttctaagtgtctacgacaatgatcgacgccttgctgaccattttggaggaaagctacatttgggatacatgctgattcgtgagaaactgaaagaactacaggtacattcttgcatacccgacttaccgcaagtaaagtttttggggaatgataattaatttagaattccaaatgtctactgccctaaaggcataatcacaaaaagccaagaaatctacacaatcttatttgaccttatattctgtttgtacattatgatccaagtatgtgggttttgtgctttatctgaatttgttaaggtggaaattttgtacatctttatcaggtgctgaatgttatgtaccctttactgctttaaagagttactctgttttgggccttttggcatctgtgagttttcttatctcaaggaagaaccttcaggttctcaccttctctatatattatttcatttctcacattggagggcacagtggctactacattagtcgttacaggaactagtcaatgttgcataattggaatctcgtcaatgttgcataattggaatctcatgtgccaatcatccctcctatccatgggaacaacagctgtcatgtacagttgcaaatgtaagcgtaggagtgtgcaaaacatggtatggacaatcatgtttacttaattgtgtcaagctgctcatataatctgcttagtattatgttgatcagaagctggagattgttttctgctgggtgatccatattttgtagagatggtgataaatagtaccggttaagttactctgaaagtgcactccttttgccatcttttactgtaagtactaagtttgtaaattaattgctggagcaatttaaccgtaatgtatctcttgcaccttttttttatatatatgttactttttttcctttatctgtttccctcctatgcaaattggagccttgatatcatgattttatcattataaaatattctatgccgccttccaggaggagagaagtaaaagaaggaaggcacctgaagatgacaggcgatcaagagaatacagcaaggaccgcaatggtcaggcatccagggatagagattcagaaagaaaggacagagttgaacctcgagaaagcagaagagaccatgatcgtgatcgggataggcgccacgatagggaccgccgccatgatcgcgatcgggatagagattatgaccgttcgcgtggccatgattcaaggagaagggaacgttctcgatccagggagcgcaggcgccacgatagatactgaatctggtgctccatgatggctgattttggagtattctggtttttctacatgatacttgtggtcctccgagatattgtgtttgttgagcttttactgaagaactctggagcatggatatatgccgtcagactgtgctgtatgcatttgtttctgacctactatggttggccagcatatactactttatatcatacttatggtgtaccaaagacgattttgtgttaatcaaaactagtttttcccagcc

SEQ ID NO: 26220 - DNA, 1970 bp, Oryza sativa
  ref <308>: DATABASE ACCESSION NUMBER: AK101662
  ref <309>: DATABASE ENTRY DATE: 2002-08-28
gtgcgatgggcctgatggtgatctttgtctctgtggtttggtaggcggcggcaagaggatcacgcgggtggaggtgacgctggacggcggcgagacatggctggtgtgcgtgctggacctcccggagaagcccaccaagtacggcaagcactggtgctggtgcttctggtccgtcgaggtcgaggtgctcgacctcctcggcgccaaggagatcgccgtgcgcgcctgggaccagtcgcacaacacccagcccgagaagctcatctggaatctcatggggatgatgaacaactgctggttcaaggtgaaggtgaacgtgtgccggccgcacaagggtgagatcgggctggtgttcgagcacccgacgcagcccgggaaccagaccggcgggtggatggcgaggcagaagcacctggagacggcggaggcggccgcaccggggctgaagcggagcacgtcgacgccgttcatgaacaccaccgacggcaagcagtttaccatgtccgaggtgcgcaagcactcgtcgcaggactcggcgtggatcgtcgtccacggtcacgtctacgactgcacggccttcctcaaggaccaccccggcggcgccgacagcatcctcatcaacgccggcaccgactgcaccgaggagttcgacgccatccactccgacaaggccaaggcgctcctcgacacctaccgcatcggcgagctcatcaccaccggcgccgggtacagctccgacaactccgtccacggcgcgtccaacctctcccagctcgcccccatccgcgaggccatcaaggcgccggcgcccgtcgcgctctccagcccgcgcgacaaggtcccctgccaactcgtcgacaagaaggagctctcccgcgacgtccgcctcttccgcttcgcgctgccgtcctccgaccaggtgctcggcctccccgtcggcaagcacatcttcgtgtgcgccagcatcgaagggaagctgtgcatgcgggcgtacacgccgacgagcatggtcgacgaggtcggccacttcgacctcctcatcaaggtgtacttcaagaacgagcaccccaagttccccgatggcgggctcatgacgcagtacctggactcgctccccgtgggcgcctacatcgacgtcaaggggccactcggccacgtcgagtacaccggccgcggcgagttcgtcatcaacggcaagccgcggaacgcgcggcggctggcgatgatcgccggcgggagcgggatcacgcccatgtaccaggtcatccagtcggtgctgcgcgaccagccggaggacacgacggagatgcacctggtgtacgcgaaccggacggaggacgacatcctcctccgcgacgagctcgaccggtgggcggcggagtacccggacaggctcaaggtgtggtacgtcatcgaccaggtgaagcggccggaggaagggtggaagtacggcgtcgggttcgtcacggaggaggtgctgcgggagcacgtgccggagggcggcgacgacacgctcgcgctcgcctgcgggccgccgccgatgatcaagttcgccgtctcgccgaacctggagaagatgaagtacgacatggccaattctttcatcgtgttctaaactcctactactaaattatacgcaccgcattaattattttggtatacgtacgacgatgtatatacgtgtcgtgccaattagaaacgaaatgctgcatgcatgcgtatgcaagatgagagaaaaaaaaacaatatctaagttgtagtagtgtactcttgataatatcctagagtacatactgcatacataggccatgatttccctttctaagaggctagcggttgattccttcctgtatactagtagcttgtaattaccaataactgtattgttgttagccatgggaggtaaagatctggctatgtatattgttcattgtttgaagaaagagaaatgaaatgaatactttaaattg

SEQ ID NO: 26221 - DNA, 925 bp, Oryza sativa
  ref <308>: DATABASE ACCESSION NUMBER: AK101663
  ref <309>: DATABASE ENTRY DATE: 2002-08-28
gagagcgtgtgtcagtgtgtgtgtgtgggagagagagagagacagcagaggctccatcggccatggcgctcctccgctccctggcttgcttcctcttcctcctctgctcgtccttcaccttcgaggccgtaaatgggaggatgtacgggggaggcgacgtggtggaggaggaggaagacgatagcagtacggtcgccgacggcgctcgcggcggcgcgggtgggtggcccgggtacctctacaccagggccgtcgggagatgcacgccccaattctggagcagtggagctgagcaatggcccaacatcatccctcaggaagcggcggtgtcgaaggtgttcggctcaaggtccatcgacaggtacgggccacggctcaccgtgctggaggccaccacgaggaccgacgacaatggcagcagcagcgccttcgccaagctcgtcaagcaaggcagcgcggctctgctcaacgcctacgcgcgcaagggcttccccttggactcgtgggaggtgaaggcgctgctgctggaggcgctcgtgtccgaggacgccgcggccgcgcaggccgaccggttcgagcaggccaacgaatcctgcatctgaatcctggatcctaatagcgtgtttgtagtaggtcacctcttctgtgactacccccagcgatcctgaagaaaaatgttggcaccgccgcaccggtgtttaaggtgcaatgtgtgtagtagtagtagattgtatccgtgtccttgtacgcgattgttccttcgatgtgttctggtgccgtgtaggcaacgcgtcgtgtatgttgcttgttagagtgatgtccagccaggcctgctgggccttctcaatcctgtcggtgtaaggcaagttgggatattacgcttacgctgacatttcttttggtacgataacgtactgcctgagcc

SEQ ID NO: 26222 - DNA, 1100 bp, Oryza sativa
  ref <308>: DATABASE ACCESSION NUMBER: AK101664
  ref <309>: DATABASE ENTRY DATE: 2002-08-28
ggttcttccccgattcccaatctcgctctcaagtcgcagcagcactcagcatcgcggcggccggggcccggggcaacggcgacgaggcggcgcgccggcagcgcgggcgcatcggctccaagcagatactcaaatattccctgttaactagagtatcttccccttcccttggcgtaaaagaaaaaaaatctcccgtctcgtctcctccgctccttgcgccatctcgctgctgaacaggggaggggcgccgatctccatccggcgagcagagcaggggagggggaggggaggggatcctgagccttgacatggcagagaaattgggacctgagaagcggcacgccttcgtccacaacgggcagaaggtctttgagtgggaccaaacactggaggaagtgaacatgtacattgagctccccaagggtgtgcccaccaagctctttcactgcgccatccaggccactcatgttgaggtcggcatccgcggcaatccaccctacctcaaccatgacctgacactcccagtgaagactgattcatcattctggacaatagaggatggtgaaatgcacatcacactgcaaaaaagagagaaggggaaaacatggtcatctccaatacaaggccaaggtagcttagatccatatgctgcagaccaagaacaaaaacggcttatgctgcaaaggtttcaagaagagaatccaggattcgacttctcccaggctcagttcaccggaacctgccctgacccaagaaccttcatgggtggaattcgctctgactgaagcttggcccaacgtcatgtatctggctaaatgatgttgctaacctcacagtggcttgtcaaataatcaaatgtggtggctgtacatatctcgcatctgtaaattgtgaaattcgccggtttcctatggctgcctttgtgccttagaaataatggtgaatgtttggcctatcaatcgccgagccagacgtaggattctgaagttatttattcacttattgatctagcatccttgatgatgtagtaagtttgtgatcaccaggtacttgtgactgttcgaatgaaaatataccatctacccatgccgggtcatttc

SEQ ID NO: 26223 - DNA, 1546 bp, Oryza sativa
  ref <308>: DATABASE ACCESSION NUMBER: AK101665
  ref <309>: DATABASE ENTRY DATE: 2002-08-28
ggtcttcttcatatgatagcactcctttatgtggaaaggagaaaagtactgtatacaattagggtatgatgaacttggggattcatccaacttttcttggttgaagcaagcaaatccttttttactagtacatcatatcgttgctacttcgaggggtttgctggcaaacatgcacggtgacccagatttcgtttgggctttattcaatcttccttgagtgtccgtgctgcatggtcacacttttttctctcgtctgggaaagaattgagagccattataagctagtttctgcaaccaagaaattagtccttcattttgaaatctgagaagagcttttctttgtacgcagaaattaagtcccatttgctcagacaatgcaagcaatgcgggcggtggatgataaggagtgctacagccacagcatccatggcgagtcgaatgggcggccgcagcgcaagaacaatccggcatcaaggccgaagccgacgccttccaagtgggacgacgcgcagaagtggcttgttagcctgtccaacggcggaggcggcggcgttgacgggatccacagcggcaaggtgaggccaaggaactccaacgccgacgaccggcgccttctgagctcgtcctcccagaacggccgcgtgtcctgcagcagcgtggacggggcgctggagtacaacctggtggccgctcccccgacgccaccgcagctgggtgaagccgccgccgacgacgtgagtgagacgaagaagatcgactactgcatggtccaaccgcagcacggctcccccgcggcggtgctccggtcggtctgcctgcgggacatgggcacggagatgacccccatcgccagcaaggagccgtccaggtccgccactccgctgcgggcgtccacgcccgtgtcgcggagccccgtaccgtcgcggccgtctacgcccggcaggcggcggtacgacgtggccgtgggcgttaccgccgtggtcgagtccaggacggccgagccggtggcggtaggcagtgttagcgacggcggcggcttcggcgggggctgtgcggtggacgagagtagtagcggcgggttcggcaaccatgcgcagagcacgacgaccgggctcgagtcccgcgccgtggcctgggacgaggccgagcgggccaaattcacggcgaggtacaagcgtgaagagatgaagatacaagcatgggagaaccacgagaagagaaaagctgagctggaaatgaagaaaatagagatgaaggcagaacagatgaaagcacgggcgcacgagaagctggccaacaagctggcggctgcgcggcggatggccgaggagaagcgggcgaccgcggaggctaagcttaacgagcacgccgctagaaccacgcagaaggcggactacatcaggaggaccgggcacctgccctcgttcttttccttcaagatgccctccctgtgtggttgatgaatgatggtaccaaactttgcttgtgtcatgtccatgtctttccaaggcatttaagaaaataatttccgagtttttactgctcc

SEQ ID NO: 26224 - DNA, 4220 bp, Oryza sativa
  ref <308>: DATABASE ACCESSION NUMBER: AK101666
  ref <309>: DATABASE ENTRY DATE: 2002-08-28
gctgtcacaacatgggaataataggaagatctacggctctcaattgcctctgttctatacctctagatgattcatttctcagttagttttagatatcaccaccaaacctctatatgattcatttctcagttagttttatataccaccaccaaatttatatacacatggtatataatctgtgagatgacattttatatagtatagtctcaccatcaatttcttttgtagtggatctgaacatgtcaataaagggtatttataatgacttgtttgttttctgcattttagtttcaacttgtggttccagctgaagcaattggagatttattaaatctaaggctacatgctaggctgctatgaggtaatctgaggaattcaaatttatatatctggcagtacaatatcatgttcatactgctttgttctggaaaaatatctgacagtttagcacctcaagagatgacatttgtaatgtattactcctgcatttcctttttcctctagtcaggagtactcacatgagttctccccgtgctaacgctatgattaaatttgacaatacatttcaaaaatcaaaatgcatccgagttcaggaggattcacatgagttctgaatttctgttgtagtcactgaatttgtgttcaacccttgagaattgtcaaacatgctaggatcaagtatatatgtcagccattaggaaatgtgagtttctattttttgctaccagcagctccatgtgaattcaggtgcatgtagatgattttatttaagttttaaaacctactgatgcaagttttgtccatatttagtcaatatagtttagcacataactcggtctcggagttcacggtcgctccctcagcatccagagttcaatggcgacggtttctgctgcttctggtggtggtggcgctgctcatggtggcttctgctggtggcaaataattcaggggcggagctactatgtaatagggggtgcccaggaacccggtcaagaaaattttttagctatacctcacctattttcaccatgcatgcacccccctcaatacaaacttaggcacccgcatcagcttaaactcgatctaaagtagagtaaattaagcaaatggcaccaccctccatttcgctctagctctgccctggcgatggcggctgtgccggctctgatcttcgccatggacccgggttctctcccacacatcttccttatgacagccatggcctcacacgacgcgcagaaactgcctccgcctctcagtataggtagcctcacgttctcctttagagttacaccacaagttgaccgtacaccagttcaatggcatcatatgcaggtcttgactgcatgcacagccgttggctattgcatcgccaataagtactccctccgttaaaaaaaaaaaacccaagttaggatagaatgtgacatatcataggatatgatacgacgtgacctatcgtaggacaacgaatctagatatcctaggatagagtttttttttttttttgaacggagggagtagtggtgtattggctcgtgatgaaggcttggtgttataaaatggtacttcctccatttcacaatgtaactttctagtattgcccacattcatatatatgctaatgaatatatatatatatatatatagtaatatctagatttattagcatctatatgaatgttagcagtgctagaaagtcttacattgtgaaacagagggagtattctttcctcatctgctcctccattgtgacgaacccgactaacccttctctgcttccctcctctgctactctactcctctgctgcttccttccgattctctaatttgtccttactcttgatgttgttcatcgattttgattgttgtagcttgaggttttgaggatgatgaaaggtatagtgcttcttccatgtcagtagggatagcagattgtgttgtttatgattttgtttttagtctgatctaatgtaattagagaacgcattttaggattttcaattcaaaaccagcaggcgttccttcttcttgattcaaaaggttttcagtgagaaaaaaaacccaagatatcattatgttgctatttagaaaaagccaataatttacgatctccgttctggtttatgttttgttagttaaaccctggcatcattagcccggagaaatacacgaggtgcttcagtctgaatgttttggttcaagatacatatttcttaatgagattttgttcggtacttttaaattacagaactgtccattttgtgttgtagttcatcatctttagaatatggactgatggcattgtcaaagcctcaagtggtaaggaaggaccagtggttttaaccttgagaattaagaaaataaatgtatgcaccactggtagatcgcttcagaaccaatgatattaacctggagtattaagagaattaatgcctgcaccactggtatatttatttatgtcatgcatgttccactgttgacggcaactattgaataaatatggtcaaatatctcatgaacccgccttctttttttcagaatcttttttttgtgaaaagttgaaaccagctcattatggtagtgcccgagttgtgaacttactggtgaaaacattcaaactgcatttggttgctgcagttaggatgtcatcggtattttcttttgaatctctctcgttgatttggtttcatttcatttaggtagatattgtgctaaatttattccgaatcaaaatcatcccttccccatcaggattgtcatgctatctgctctctccaaggtgagtattggaaaccttctcttgtgacaatttcattcagctgatgagttatcctttgatcgtggccattataaataaaatataaactgaattgcactatctatatgatataacttctacaattggatgagttcggatgcttgttattgcctgacataatgatagcatgaaatattaaatcggaatacaaacagtgagtataaaaacaagcagacttttgtataaatgggaccatttgtgttattagagtgaggtttacatttggtcaatattatattcccgtttatgctcatgaaattcatcttattgttgttcactgcagcacaatccaactatcgatgcaggtcaatatccacaaggtccttacatgcaatactcccttattgattccttcctcgcttatgaacaaaaaggactcagagctgatacattgagtgcggcaaaggtgagtcatgtgaggcaaatttggttgtctatgtgtctattcattttctaagtaagctgtaagtactgccagcattacgccgtggtggccaggtggggagcggtggccgggcaatgggagcgccggagggtggcgccggagccagagcggcaatgtttccggcgtcggcgtaggcccagatggttgtgctaagggagctggcggcggtgggtcgtcttcctcgttgccggtcaacaccctcacccttcctggagctcctccccttctctgtggggagtttctaagctggattgaggtggcagctcgtcagcgggggaagctcaggctgctgaagcaatgccatccaatcccggattctccttcggccagatctggcgaggaggccggcgggtggtggaacggagaggtcctgggccagctctcagggatggtggttcgatgaagccggccgacggaggggcgtcggtcgggtgtggcggaagccatgtgccgccgatgttcagatggtggattcggattgggtgatgtaccacggtggcagggggttccgagcgaaagcttagcccaattctttgggccaacagtgacttcgccttcggacgtagtaaccctcttgagggcactgttgaggtatccctcctccctcggcaaggagctctgggtgaaaaccttgtccagtctttggatagatgacgacggcgtcttttggcgtcgcgaccctcgtgagggcgtcattttagagtcttcgtgtcgtagtggtgtcgttagctcggtggcgatcggtctcgcatagcgatggccggttcggtgcttggcttccctctctgtagtgtgtgttcggacggttggcacatggttcggggcgtgtgctctggtgcacatccttcctcgacagccagctatcgatgtaaaatttttcttgtaactttttcttcctatcttaattacattgaatgacctccttcggtcattccggcaaactttgtagtc

SEQ ID NO: 26225 - DNA, 1811 bp, Oryza sativa
  ref <308>: DATABASE ACCESSION NUMBER: AK101667
  ref <309>: DATABASE ENTRY DATE: 2002-08-28
gtgtacacaacaccgtatactgtcccttccggtcaaagtacactgcccgctgacagtgaccagagattctactccagcttgctactcattttcgagggtgttgatcatggatccgacctcggtgccatggagctccatggtgtacggtctcctggggctcgcgcttctgtggcaggtccaccggctgctggtgcggctgtggtggcagccgcggcggctggagcgggcgctgcgggcgcagggcgtccgtggcacgtcctaccgcttcctcaccggcgacctcaaggactacggccggctgagcaaggaggcatgggcgaggccgctgccgctgcggtgccacgacatcgcgccgcgcgtggcgccgttcgtgcaccggaccatcgcggagcacggcaaggcgtgcctctcctggttcggccccatccccaaggtgaccatcgccgacgccgagatagccaaggacgtgctgtccaacaagatgggccacttcgagaagctcaagttccccgtgctgtcgaagctgctcgccgacggcgtggccaactacgagggcgagaagtgggccaagcaccggcggatcctcaaccctgccttccatctcgagaagctcaagctcatgctgccggcgttttctgcgtgctgcgaagaactggtcggcagatgggcggcgtctcttggttctgacggttcgaatgagatcgatgtttggccggagatgcagagcctcaccggagatgtcatttctcgcaccgcattcggcagcagctaccttgaaggaagaaggattttccagttgcaggctgagcaacaggagcttttcatgggtgccattcagaagatctccattccaggctacatgtccttgcctacctaaaacaaccgaaggatgtatcaaattaagaacgaggttgaatcaattatacgagatctggtccagaaaaggatgcatgctatgaaagatggcgagagaaccaaagatgatttgctcgggatattactagagtcaagcacgaggcatgcagacgagaatggacattcaggcccggggatgaccatcgaagaagtgatggaagagtgcaaagtgttctattttgcagggatggagacgacagcgatactcctcacatggaccatggttgtgctaagcatgcacccagaatggcagcaccgtgcaagggaggaggtcctaagcctatttcagaaaaacaaacttgattatgaaggcctgagcaaactcaaaacgtgacgatgatactttacgaggttctccgcttgtacccgccgggaattgggtttgtccggcaaacatacaaggagatggagatcggtggcgtcaagtaccctgcaggcgtgatgatcgagctaccgttgttgttcatccaccatgacccagacatctgggggagcgatgtgaacgagttcaaaccggagaggttcgccgaggggatctccagggcgtccaacgatcatggcgcgttcttcccgtttggctggggcccgaggatctgcatgggccagaacttcgcgctgctcgaggccaagatggcgctgtgtatgattctccagcgcttcgagttcgagctagcgccgtcttacactcacgctccccatattgtgttgatgctgcgtccgatgcatggggcaccaattaagtttagggcaatctgatcgtcgatcttgtgatgttcatatcatgcattgtaggctttttttttaaaaaaaaatggcatgtttggtttataccaatcaaccatgccaccaaaaaataatttagccatatcaataaattaattctccatttagtttgt

SEQ ID NO: 26226 - DNA, 1285 bp, Oryza sativa
  ref <308>: DATABASE ACCESSION NUMBER: AK101668
  ref <309>: DATABASE ENTRY DATE: 2002-08-28
gactgcttgctttcctcctctctctctctcccccttcgccgtagacgcgaacgccgcggcggcgagaaggtcacggcgaggggagctcgtgtcgaggcgaggcgaggtgggggttgattatgcccgagggggggataccggcatgcttccgcggcgcgccgggagggggcgcgggagggggcggtggcggtggcgtgggcgtggcggggcagtcgtcagggggcgtggggactagcctggcgacgtcggtgtacgagacgcggctcggggttgcggcgctgtcgtggtcgcgcgcggcgctcgggctcagcctccgtgtcgtgctccgcgtggcgggcggggcgggggcgggggcgtgggccgcggcgtcgtcctcggcggcgtcggattacgggtgctacgacgagggggcgggagcacgtgtcgatgcgcgacgcggggcacggccgcggccacaagaccttcgtcaacgtccgcggcaaggaacgggagatctcggtggatctcgtgtcgcgcggccacggcaaggacagggacaaggacaaggacaaggagagggacaaggccgacgtcggcatgtcggtcaccgtcgacggcgagcgcgtgctccacatccggcgcctgcgctggaagttccgcggcaccgagaaggtcgacctcggcggcggcgacggcgtccaggtctcctgggacctccaccactggctcttccccaaccgcgacacggcccccgccgacgcctccgcggtcaccccgcctccccagcccgcccacgccgtcttcatcttccgcttcgagctcgccgacatcgccggcgacgaccgcgactctgccgaggtcaaggacgagcacctcctcgaaaacgccgggagcggcggcggcggcggcgcgtgggcaggctacctcgggaggtgggggcgaggggactggagcgagagcagcagcaacggggagaaccggaggaagagggggcaagcccggaggctggccaaggcgagctcgtcgtcatcggcgtcggtggcttcctcctccgcgtcgtgggcgagcggctcgacggtgatggactgggcgagccccgaggaggccgagctgcagcgcggccatggcttctccctcctcgtctacgcctggaaatgctagcaattggcgccgagcaaagcattctttccattgatgatgattgatggtaattcagtgagattttttcttcttcttcttcttctatcttcttcggattgttgtaagttgcaattgttatccgagcaatgttcttgtgcagtttttg

SEQ ID NO: 26227 - DNA, 1937 bp, Oryza sativa
  ref <308>: DATABASE ACCESSION NUMBER: AK101669
  ref <309>: DATABASE ENTRY DATE: 2002-08-28
gaccacctcactcactccctaaaaccctcctccctcccccatcatctccctcctcccactcgccgccgccgccgccaactttccccaccaccaccacccatggcggccaccacccacgccgcctccctctccttcctcctctctcacccccaccccacctcccccaaccctaaccctaaccctaacctccccctccgccgcgccccccaccgcgtccgctgcgccaccgacgccgccgccaccaggcaccggcgcgcggccgacgagaacatccgggaggaggcggcgaggcaccgcgccccgaaccacaacttctccgcgtggtacgcgcccttcccgcccgcccccaacggcgaccccgacgagcgctactccctggacgagatcgtctaccgctccagctcgggcggcctcctcgacgtgcgccacgacatggacgcgctcgcccgcttcccgggctcctactggcgcgacctcttcgactcccgcgtcggccgcaccacctggcccttcggctccgcgtctggtccaagaatgagttcgtcctccccgagatcgaccccgaccacatcgtctccctcttcgagggcaactccaacctcttctgggcggagcgcctcggccgcgaccacctcgccgggatgaacgacctctgggtcaagcactgcggcatctcccacaccggatcgttcaaggatctcggcatgacggtgctcgtcagccaggtgaaccgcctccgccgcgcgccgctctcccgccccatcgccggagtcgggtgcgcctccacgggggacacctccgccgcgctctcggcctactgcgccgccgcggggatcccggccattgtgttcctccccgccaaccgcatctcgctcgagcagctcatccagcccattgccaatggcgccaccgtgctctcgctcgacacggacttcgacggctgcatgcggctcatcagggaggtgactgccgagctgccgatttaccttgcgaattcattgaattcccttcggctcgaggggcagaagactgctgctattgagattcttcagcagttcgattgggaggtgccggattgggtcattgttcccggaggcaatcttgggaacatatatgccttctacaagggattcgagatgtgccgcgtccttgggctcgtcgatcgtgtgccgcggcttgtctgcgcgcaggctgccaatgcgaacccgctgtaccggtactacaagtcggggtggactgagttcacgccgcaggtggctgagccgacatttgcatcggcaattcagattggtgacccggtatctgtcgatcgcgcggtggttgcgctcaaggcaactgatggcatcgtcgaggaggccacggaggaggaactcatgaacgcaatgtcgctcgctgatcgcactggcatgtttgcttgcccgcatactggggttgccctcgcagcactgttcaagctccgtgaccagcgcatcatcgggccaaatgaccgcacggtagtcgtcagcacagctcatggtctgaagttctcacagtccaagatcgactaccatgacagcaagatcgaagacatggcctgcaagtatgcgaatcccccggtcagcgtgaaggctgacttcggtgccgtcatggatgtcctcaagaagaggctcaagggtaagctctgaagtgtgtttggctaactcccctccaatcaattgctgtatgtcagttgtcttctgcatcaaattcgaatgcggcgggtgactgtggagcgatgattcgtcgatttgtagtagtattgtaggtccctgaaccttgaagatcgtccatgcttgagagtaaagattgagaggctatctcttgtacctgttctgtgttgtgtgtgggtgggtaataagcgactaccttgttgtttgaaactctgaataatcagatcatctagtccaattactccgttc

SEQ ID NO: 26228 - DNA, 1900 bp, Oryza sativa
  ref <308>: DATABASE ACCESSION NUMBER: AK101670
  ref <309>: DATABASE ENTRY DATE: 2002-08-28
gcagcacaagcaagcagcttgaagcaacccaccacagcttccttcttcctctgcttcagcagagcaggggagcagaggagggagaggtcactcattcacaacctcatacagaaggaagaagaagaagaagagaagaagattcacacatacatctatagataaaatatatttatacatatagagaatactcagagagtagccaagagaggaggaagaagaagatggtgttggtggcgattggggtggttgtggcggcggcggtggtggtgagcagcctgctgctgcggtggaacgaggtgcggtacagccggaagcgcggcctgccgccggggacaatggggtggccgctcttcggcgagaccaccgagttcctcaagcagggacccagtttcatgaaggcccggaggctcaggtacgggagcgtgttcaggacgcacatcctggggtgcccgacggtggtgtgtatggaggcggagctgaaccggcgggcgctggccagcgaagggcgcgggttcgtcccgggctacccgcagtcgatgctggacatcctggggcggaacaacatcgccgccgtgcagggccccctccaccgcgccatgcgcggcaccatgctctccctcgtccgccccgccatgatccgctcctccctcctccccaagatcgacgccttcatgcgctcccacctcgccgcctggtcctcctcctcctcctccgccgtcgtcgacatccaggccaagaccaaggagatggccttgctatctgcactcaggcagattgccggcgtctccgctggcccactctctgacgctctcaaggcagagctctacacccttgtgcttggcaccatctccctgcccatcaaccttcctggaaccaactactaccaaggcttcaaggcaaggaagaagcttgttgcaatgctagagcagatgatcgcggaacggcgatcctccggtcaggtacacgacgacatgctggatgcgctcttgaccggtgtcgagggcaccagggagaagctcacagatgagcagatcattgacctgatcatcacccttatatactctggatatgaaaccatgtcgacgacctcgatgatggctgtcaagtacctgtcagaccatcccaaagctcttgagcaactcaggaaagaacattttgatatcaggaaaggtaaagcgcccgaagatgccatcgactggaatgatttcaagtccatgaccttcactcgagctgttatcttcgagacattaagattagctacagttgtgaatgggctgctgaggaaaactacccaagatgttgaaatgaatgggtatgttatcccaaaaggttggagaatatatgtttacacaagggaaataaattatgatccattcctgtaccctgatcccatgacattcaatccatggaggtggctggagaagaacatggaatcacatccacacttcatgctgtttggaggaggtagtcgaatgtgcccggggaaggaagtaggcaccgtagaaattgcaacattccttcactatttcgtgactcaatacagatgggaggaagaaggtaacaacacaatattggagttcccccgagttgaagctcccaacgggttacatatccgcgttcaagattactgatcctggaacattttgcgaagttagataggaattcaaatcagatagaaaataagagtgcaattctgatgctgctgccctgatgacaggattagaacagccgtttggctcttgtaacatatgtccatgaaaataggaatattatagagataatataggcattataggaccattaggaagctaatgtagattgccatcagatgctcctgtattcttttggtccatcaattgttgaactaaaacagaagtgtcatttggcttctatgcttccg

SEQ ID NO: 26229 - DNA, 2020 bp, Oryza sativa
  ref <308>: DATABASE ACCESSION NUMBER: AK101671
  ref <309>: DATABASE ENTRY DATE: 2002-08-28
gatctccataaagcttagcttgcccctctcgctcgcgtctctgtctctcacgcacgcgcaccgtgcagagcgaagaggagagggggctagctccgggtgccgtcgccatggccaaccggcgcaagttctcgcaggcggggggcggcggcggcggcggggtgttcgacccgttcggcacgaaacaggccgtgtcgtcgctgcggaagggcgggcggctgccggtgtacgtggctggcgtcttcttcgtcatcttcgtcatcatcatgtacggcgaggacatccggtcgctcacgctggacccgatcgcgcgcgcggggacaacgccggcgcggatcgtggagccggtagtgacggaggagcgccacgtcgcccgggtcaaccctcctcggcgcgaggtctcgtccgcggagaaggccgccgcgttgccgctcgacgtcgacgagaggccgaagctggcgacgccgacgccgacggaggcggcgaaggaggtcccgaaggtcgagaagatcaggaagccgaagaaacccaagacgacgaagaagaagccgaggaagccgcggccggcgaagaagacggtggcggcggcagccgggggcctgctcggcgtgccggagacgtgcgacctgtccaagggcgagtgggtgttcgacaacaccagctaccctctgtaccgggaggagcagtgcgagttcctcacgtcgcaggtgacgtgcatgaggaacggccgccgcgacgacacctaccagaagtggcggtggcagcccaaagactgctccatgcccaggttcgacgcgaagctgttcatggagaggctccgagggaagcggttcatgttcgtgggggactcgctgaaccggaaccagtgggagtccatggtgtgcctggtgcagtcggcgatgtcgccggggaagaaatacgtcacctgggaggaccagcgggtcgtcttccacgccgtggagtacaacgcgacggtggagttctactgggcgccgttcctggtggagtccaactccgacgaccccaagatccacagcatccagcaccggatcatcaaggcggacgcgatcgcggcgcacgcacagaactggcgcggcgtcgactacctcgtcttcaacacctacatctggtggatgaacaccctcaacatgaagatcatgagaccgggcgggcagagctgggaggagcatgacgaggtcgtgaggatcgaggcgtatcggaaggtgctgacgacgtgggcgagctgggtgaacgacaacatcgacccggcgcgcacgtccgtcttcttcatgagcatctcccctcttcacatcagcccggaggtgtgggggaacccgggcgggatccggtgcgccaaggagacgatgccgctgctcaactggcacgggccgatctggctgggcacggactgggacatgttccacgcggcggccaacgtgtcccgcacggcggcgacgcgggtgcccatcaccttcgtcgacgtgaccaccatgtcggagcggcgcaaggacgggcacacctccgtgcacaccatccggcagggcaaggtgctgacgccggagcagcaggccgaccctggcacctacgccgactgcatccactggtgcctccccggcgtccctgacatctggaacctcatcctctacaccaggataatgtccaggccgcagctggtatagcaaattccaagaatttacggagaccggattactcataggcagagctggttggttatacacaatcatcgtactgaaaagagatttttcttcttcttttcttcacattcttttctggccgtttcacctgctgtcagaagatgtctttcatttgttctttttcttcaggggttaggttaagtgggaagagatcgatacagtatatggttatatatatggctaatgggatggccatgcttgcgtacgttacgtgcctgcgtgcacagatgcgctgtaaggttcctgaccaaactgtacattggggaagaaaaggattaaagcgaaagagatgaacagatatggtttac

SEQ ID NO: 26230 - DNA, 1802 bp, Oryza sativa
  ref <308>: DATABASE ACCESSION NUMBER: AK101672
  ref <309>: DATABASE ENTRY DATE: 2002-08-28
gaatcgctgcccgccgccgccgctgattctcgcccgcccacgtcgccagcgacgtctgcctcgccggtctcagtgccaccgccggaacacccacgcccgcgcctcgaatccccgcctggtcgtctctcccctctccctcgcgtcccccgcctcccctcgccgcactaccctatcccctctccatcctctcacgggccatgggttctgttgccggcgacgccgcccgcctttcttatccacccactcgccgtgacaattccgtcgtcgacatgtaccatggcgtccctgtcgccgacccttaccgttggctggaggacccagagtcggaagataccaaagaatttgtggcaagtcaggtggagctagcagagtctgtgcttgcgggctgcttcgacagggagaaccttcgccgtgaggtcactcgcctcttcgaccacccgcgccacggggcgccgttccgtcgcggcaacaagtacttctactttcacaactccggactccaagcccagagcgtgctctacgtgcaggatagtttggatggagaggcggaggttcttctggatccaaatgcactaagcaaggatgggacagttgctctttcgacgtattctgttagcaaggatggcaaatacatagcttatggcctaagtgaaagtggcagtgattgggtcactattcgtgtgatgaacattgctgataagcagactttgtctgacaaattgtcttgggtgaaattctcatctatcagttggacccatgatggaaaaggttttttctatggtcgataccctgcaccccgagaagtggaattggatgctggaactgaaacaaacattaatcttaatcatgagatatattaccatgtcgtgggatctgatcagtccgaagatatattatgctggaaagatcctgaacaccctaagtattcctttggtgcatcggtcacagaggatggaaagtacatcatactaggtacttatgaaggttgcgatcctgtcaataagctatactactgtgaaatttgtactcttcctcaagggatagaggggttcaaagagacaaaggggatgcttccatttgtcaagcttatagataactttgatgcccaatatcatgttgtggcaaatgatggtgatgaatttacatttttgaccaatagaaatgctcctaagaacaagcttgtaagagtagatatcaagaagccagaattgtggactgatattcttcctgaacatgaaagagatgtgctcgaatcagctgacgcggttaatggtaaccagttattggtatgttatatgtcagatgttaagcatattctgcagataagagaccttgtaactgggaacttgcttcataagttgcctctagaaattggttctgtttcagagatctcctgtagacgggaagacatggacgtctttattggcttcacaagctttctttcccctggtattatttacaggtgtaacctcacatctgcgatcccagaaatgaagatatttcgtgaaatttcagttcctggatttgatcgaacaaattttgaggttaagcagattttcgtcaatagtaagggtggaaccaaaattcctatgttcataatgtcaaagagagatattgaacttgatggatcacatccaactttgctatatggttatggtggattcaacataagtcttactccttctttcagtgttagtcgtgttgttttatgcaagaacatgggttttgttgtctgtgttgcaaatattcggggtggtggggaatatggggaagagtggcacaaagctggagcacgtgcaatg

SEQ ID NO: 26231 - DNA, 2911 bp, Oryza sativa
  ref <308>: DATABASE ACCESSION NUMBER: AK101673
  ref <309>: DATABASE ENTRY DATE: 2002-08-28
gacacgtctctcctctcctcctcctcctgacctcgccgccctcacccaccacccgctcccgccgccggctttaatgcctccggggacaagccctctcaagcgtcaacgactcatccactgctccacccgcgtgggcggcgcgtacgtagaccctagccggcctctacctgctcgctacagagctcacgtacgtacgcgcgcgcggtggtggttggcgcgcgcgcgcgtgcggtgaggcgtggtactagtattatttattcgctcctgcctcctggggaggtggaggatgctggcgatcatgagcttgctgctgccgtgggaggaggaggaggagacgacggaggcggcgccggtgttttgatccgtcgcgcgcgcgcggcgagtaggaagaggttggagacgtggagaggagtggccgtctcgtttcagattcttctgcgcaaattctggttacaactagaagttgcaggacgcgagagggttgattggtaagaagaagaagtgctgtcaactttgagataaaggcaaaattacgagaaaaaagactttcaagttcttttgaggatgagtgaccctggagagccttctaagcattcccaatggatgtcacactggaccaaaggaagcagcagtgcagagccccaagttggcagaagtaatgattctccggaggatgcgaaatatgacatttgcgaggacaattctgggccttcaaactttgagatcatgaaatctagattgtttgaaaggctaatggtaggaatcagccaagaaagagcttcgttggagcatggacagaagttaaattctaacatgaaagtagtggtaaaagatgctcgccgacacgctgtgcaaaaccaaattgatcagggagacgggccaattcaaaaatctgtgatgcaaaaagatgtcttatatgctaaggctgttgtatcaaaatcactttccattcagaagctttcagagttatcagtggattgtcagaaacttgcaggttcagatgacctgagttcagagtggaaccattttcctatgcttgcaatcaacagaaaaattgactccattctcaaccctaagaggaagtctgcaaagagtactggacccaatgacgtttttgtgccaaaacaatctctgaagctaaacatgactacagctaatctgatggcattctcatctcaggaatatgagctgcattctcatcgaacaaccgacgagacaatggatcactgcaaacatgcaggaggcattgtatctcgcctggaagatcatgctggtgtcatgttgaatcctgcagagcaaaaattaaaaggtcaattattgccagcaacgtcatgttcgtgtagcaaggatgacagtaactcatctgatagtctattagatgagcagcatacaagccgctacattgcagattcagatcaggaaccaacctgcagatctcgtgaaaaaaggttgaaatcttcagaaaacaatgacacgaactgtaaaattggaagttgctcccagaatcagaagtcaagagcacctggacatcataaacacaaaggttctgcgggagtcatgtttcgtacgtcagtacctggtaaagaatttgaagctgctgaaattaattgttccgacaaaattaatcagcgacatctgaatacacagagaatagtatctgcagcgaatgtcactggctcctgcatacctgatccagctgcagacatatctacagtaaatggtaggggggaggcagtgacccagccatcgagcatatctggagattcaactaaacgaaaagctccatatttatttgaaatgctaaccataccttccaaagctcaaaatatgaatcctgaagattcactgccttcaggaaactcgactgcttttggagttcacatgtacggcacaaatattggcagtcatctatttggagcaaataacaaatcatcaactgaaactgaaatattatccggcgacagtcaacatgtttcaaaatcctcagcaggcatcgcctcattgttggcacaagaggcaaaatccgagcagctcgcgactctgtacatgaaaggagcatcaggatgcaatgtgaatgaacatcaaggtgtttcctccaaggcaattgtcgccaataagcaacaatgctacaatccaagaacagcacgcatggacttagatctcatgcaattccagttgagcagaatgagaaaccaagaatcacaagcgcgaaccgaaccaggcgacagatggctaaaacgcctacagattgacagcaaggaccctcatcatcttccttgctccaagaggtcaaaagctggagacggatccggtcgtccagtcaccggaggagcaagcagcatggcaccccgttgcgacgggagcaacgacgacgacgacattgttgaccgtgatcataaggaggaacaaggattggatgaaggggtggaaattcaaggcggccgagaagcatctcctgttccggcaaagagtgatgaccggtggattgggagatggtgccagggtggtgttcctgtgtaccatgaagatgatcatgatcagagggaggaagtaacaaagcctgatcttgccgccggtgactccggaggacttgaaggtcagttcccaagcatcaaggcgatggcgatgatgggacgagcaatgagcaaggttcggccgtgtcaggaagagaggaggggatccttcatggtgtggaaggcgtagtaggagagatcctgatcacgtacaggtttttttttcctgttttttgttctgtgtaatgtagactgggctgccctctctcctcccgtggcagctggcttcagatccggtggctatcttatagggtatgtttaccaaagtatctttgtgccagcttggactccctaatcctcttaatctcttggcatctatggaaggaatgcaactctag

SEQ ID NO: 26232 - DNA, 995 bp, Oryza sativa
  ref <308>: DATABASE ACCESSION NUMBER: AK101674
  ref <309>: DATABASE ENTRY DATE: 2002-08-28
gatcttcctctcactctccaccaccaaactctcctcctctcttgcaacatcaaactcatccatccatccatcgatctgagaaatccagctttccagttcttggatctccatcgaccatggtgaggccgccgtgctgcgacaaggacggcgtcaagaagggcccgtggacgccggaggaggacctcgtcctcgtctcctacgtccaggagcacggccccggcaactggcgcgccgtcccgaccagaacagggctgatgcggtgcagcaagagctgtaggctccggtggaccaactacctgaggcccgggatcaagcggggaaacttcaccgaccaggaggagaagctcatcgtccacctccaggcgctcctcggcaaccgctgggcggccatcgcgtcgtacctccccgagcgcacggacaacgacatcaagaactactggaacacccacctcaagcgcaagctgcagggcggcgacgagacgcagctctccgccatcgagtcgtggctgttcgccgacgccgacggcatcgagagtggcagcttgctcgacgcggccatggattacaccttctaatccacaccaccaccaaaccatgcaagaatcgtagcgtaagcgagagtgagcagcgagttcatcactagcccaacctgaaaaaagaaaaatcgaaaactacacagatcctgaagtcctcttgatcttgatttctctcttgattaatcacttgggatctgcgtagttttcgcttaggaaaaaaaaagaaggggattagaggcgttgctctactgttaattgttgttactgcgactgaatatggtcatggtaattttggtttttagcttggattaatcaaatcactagtaacaaggtttactaattaagtagatctccacacgtttgcaagatgcagcgagtgtgagagagaataacgtgagtatgtcatatactgctgtatcactaactctagtcagtagataatttaatcagtgggctttg

SEQ ID NO: 26233 - DNA, 2868 bp, Oryza sativa
  ref <308>: DATABASE ACCESSION NUMBER: AK101675
  ref <309>: DATABASE ENTRY DATE: 2002-08-28
ggggctgcgggggctcgtcggctagtcggctcggctcggctcgttcccgatggacggcgacggcgagtgggtgtgggtgcggcggccggcggaggcggaggccgtggcggcggcggcggggtggccgacggcggaggaggaggcgcggccgctggaggtggtgtttgcgtcgccgtcgaggtacttcacggacgcggcgcccatcgggaacggcagcctcggcgccctggtgtggggcggcgtcgcatccgagaagctacagctcaaccatgacactctatggacgggtggacctggtaattatacaaacccaaaagcacctgcagttctttctaaagtaagggaccttgttaacaggggacagtatgctaaagccacggctgttgcttatggcctatctggtgaccaaacacaggtataccagcctcttggtgatattgatctggcctttgatgaacacgtggaggacacaaattataaaagaaacctagatcttcgaacagcaactgttaatgtctcttacaccattggtgaggtggtccactcaagggaacacttctcatcaaatccacatcaagtcatcgtgactaaaatatctgcagataaacctggaaatgtctcctttacagtgtctttgactactccattgaaccaccagattcgtgtaacaaatgcaaacgaaataataatggaaggttattgcccaggagaaaggcccacagaatatggcaatgcctctgatcatcccgttggaattaagttttctgctattctctatctgcagatgagtggttccaatggcactgtggaaatattaaatgataagatgctgaaacttgttggtgccgactcagctgtgttgctccttgcagctgctacttcatttgaagggccatttgtcaatccttcggaatctaaactggatccaactgcatctgctctgacaacactaactgtggcaaggaacatgtcatattcacagctaaaagcttatcacgtggatgattaccagaatcttttccagcgagtttccttgcaactttcacgagactctaatgatgcccttggagggaatggtttagttaatttacctgagaatagcttacaggaaacctctgtatctgattatgctgtacagatggtagagtgctcaagatttcaggggtttaataattcaggcaagcctaccgtagacagaattctaagttttagagacgatgaagatccttctctggtggaactcctgttccaatttggtcgttatctactcatttcttgctcaaggcctggaacccagatttccaatcttcaaggaatatggaatgatgaaacttcaccaccatgggatgcagctccccatccaaatataaatctacaaatgaattattggccggcacttccttgcaaccttagcgaatgccaagaaccactattcgacttcattggatctctttcagttaatggagctaagacagcaaaagtaaattatgaagctagcggttgggtcagtcatcaagtgactgacctgtgggctaaaacatcaccagatgctggtgaccctatgtgggccttatggcaaatgggtgggccatggcttgccacacacctgtgggagcattacagttatacgatggacaaacaatttttggagaaaacagcatatccccttttggaagggtctgcatcatttctgttggactggttgattgagggaaatggagattatttggagaccaatccttccacttctccagagcattatttcattgccccagatggtaggaaggcctgcgtgagctactcaacaactatggacatgtcaattataagagaagttttctcagctgttcttatgtcttcagatattttaggaaagtcagactcagacatggttcagagaatcaaaaaagcaataccaaggctcccaccaataaaagttgcaagagatggtacaatcatggagtgggcacaggattttcaggatcctgaagttcaccacagacatgtatctcacctgtttggtctttatccaggacatactatgtcacttgagaaaacacctgacctttgcaaagccgttgcaaatagtctctataaaagaggtgatgaaggtcctgggtggtccacttcctggaagatggccctttgggcccatcttcataacagtgagcatgcatataaaatgattcttcagctgatcactttggtagatccaaaacatgaggtcgaaaaggaaggaggcctatactgcaatctgttcacagcacacccacctttccaaattgatgcaaattttggattccctgctgcactgtcagaaatgctggtacagagcaccgggagcgacttgtacttgctccctgccttaccccgtgataagtggcctcaaggttgtgtgaaaggtctcaaggcccgaggcggtgtgaccatcaacatcaggtgggaggaaggtagcctccatgaagctctgctttggtccagcagcagccagaattcacgtatcaagctgcactatggagatcaggttgggacgatcagtgtctcgccttgtcaagtttacaggttcagcaaggatctgaagtgcttgaagacttgggctctctgagaatgtacagttgctggttttgaaaggggaagctaactcgggggtaactcgccaaatctcccgagccaactgccaataaataaatctcgttagttcttgcacatatcgaacttgtttctctgcatttgtttcagcattcccttgagcaactatgcaaataagcgtcatgcggatttcattgtgtactagttgagtctgtgtgttggtgtaaattttggtgttgaaataacctataaatgcacacaaaatatgtgctactttct

SEQ ID NO: 26234 - DNA, 3858 bp, Oryza sativa
  ref <308>: DATABASE ACCESSION NUMBER: AK101676
  ref <309>: DATABASE ENTRY DATE: 2002-08-28
ggtcctcagtagtactccccaccatcaccgcagcacagcaagaggcgtagttgcgccagccattcccccttccattattcatcctccacctcagtacaactccggaattctccatccaaatctcaaccattccacctcgcgtagtcgcgccgcatctcgcatcggggaggggggagggaggggagcaggcgatcgatggcggggaacgactggatcaacagctacctggaggcgatcctcgacgcgggcggggccgcgggggagatctccgccgcggcggggggaggtggagatggagcggcggccaccggggagaagcgggacaagtcgtcgctgatgctccgggagcggggccggttcagccccgcgcgctacttcgtcgaggaggtcatctccgggttcgacgagaccgacctctacaagacctgggtccgcacggcggcgatgaggagcccgcaggagaggaacacgcggctggagaacatgtcgtggaggatctggaaccttgccagaaagaagaagcagattgaaggtgaagaagcctcccgtttagctaaacaacgtcttgagcgtgagaaggctcgtagatatgctgctgccgatatgtctgaagacctatctgagggtgaaaagggagaaaacattaatgaatcatcatctactcatgacgagagcacaagggggagaatgcctaggataggttcaacagatgctattgaggcatgggcaagtcagcacaaggataaaaagctatacattgttctgataagcattcatggtcttatacgtggtgaaaatatggagcttgggcgtgattcagacactggtggtcaggtcaaatatgttgtagaacttgctcgggcattaggttcaacacctggagtatatagggttgatcttctgacaaggcagatttctgcacctgatgttgattggagttatggggaacctacagagatgctgagtccaagaaattcagagaattttgggcatgatatgggtgaaagcagtggtgcttatattgtgaggataccttttggaccaagagataaatatatccccaaagagcatctctggccccacatccaggaatttgttgacggtgcacttgtccatatcatgcagatgtccaaggttcttggagaacaagttggcagtggacagctagtatggcctgttgttatccatggacactatgccgatgcaggtgactctgctgctttgctatctggggcactcaatgtcccaatgatattcacaggtcattctcttggcagagacaagttggagcaacttttgaagcaagggcgtcaaaccagggatgaaataaatacaatatacaagataatgcgtcgaattgaggctgaggaactttgtcttgatgcatctgaaatcataattacaagcactagacaagagatagaacaacaatggggattatatgatggttttgatttaaccatggcaaggaaacttagagcaagaataaagcgtggtgtgagctgctacggtcgctacatgcctcgtatgattgcagttcctcctggcatggagtttagccatatagtgcctcatgatgttgatcaggatggtgaagaagctaatgaagatggttcaggttcaacagatccacctatttgggctgatataatgcgattcttctccaaccctcgcaagcccatgattctagctcttgctcgtccagatcctaagaagaacatcactacactggtcaaggcatttggtgaacatcgtgaattgagaaatttagcaagccttacacttatcatgggtaaccgtgatgttattgatgaaatgtcaagcacaaattcagctgttttgacatcaatactcaagttaattgacaagtatgatctatatggccaagtggcataccccaagcaccataagcaatctgaagttccagatatttatcgtttagcggcaagaacaaagggggtgtttatcaattgtgcttttatcgagccatttggactaaccttgattgaggctgctgcttatggtctaccaatggttactactcgaaatggtgggcccgttgatatacatcgggttcttgacaatggtattctcgttgatccccacaatcaaaatgaaatagctgaggcactttataagcttgtttctgataagcagttgtgggcacagtgccgccaaaatggtctgaaaaatattcatcaattttcttggcctgaacattgcaaaaactatttgtcacgggttggtacactcaagccacgacatcctcgatggcaaaagagtgatgatgctactgaagtttccgaagctgactcacctggagattccttgagggatgttcatgatatatctcttaacttgaagctttccttggacagtgagaaatcaagcacaaaggaaaatagtgtaagaagaaaccttgaggatgctgtacaaaagttgtcaagaggtgttagtgccaacagaaagacagagtctgttgagaatatggaggctaccacaggcaataaatggccatctttgcgaagaaggaaacacattgtagtcattgctatagattctgtgcaagatgctaacctggttgagattatcaaaaatatttttgtggcttcaagcaatgagagattatctggttctgttggttttgttttgtcaacatcccgagcaatatcagaggtacattctttgctaacatctgggggcatagaagctactgattttgatgccttcatatgcaacagtggtagcgatctttgctatccatcctcaaattctgaagacatgcttagccctgcagagctcccatttatgattgatcttgattatcacactcaaattgagtaccgttggggtggagaaggtttaaggaagacactaatttgttgggcagcaggaaaaagcgagggtggtcaagtggtacttgtagaagatgaagaatgttcatccacttattgtatttcatttagagtgaagaatgctgaggctgtacctcctgtgaaagagcttaggaagacaatgagaattcaagcactgcgctgtcatgttttgtacagtcatgatggtagcaagttgaatgttattcctgttttagcatcacgatcgcaggctctaaggtacttgtatataagatggggggtagagctgtcaaatatgacagtggttgttggtgaaagtggtgatactgattatgaaggactattaggaggcgtgcacaagaccattattctcaaaggctcatttaatgctgttcctaaccaagtccatgctgccagaagttattcattacaggatgtcatatcctttgacaaaccaggaattacttcaatcgagggatatggtccagataaccttaagtcagctctacaacaatttggtatactgaaagacaatgtttaactttgagagaaatcaagtagtttcaagtagcatttattctacgtgatcgagattgagaaacgagcagtagggctccctctctgcggttctatatcatctcacacggcaccaataagctttgcaccctggtgaacattgggctatcgttctatggcccttgctgcaaccagagatgggggatacagacttgcttctgtttatccaatgtaaaactgatgatgatgagttctctaactgtatagtatatcgcaataaggccggtgcttacagaaggcactgtgtgcataacattgttttgttgctcaatcggaatattttgaagtattgcttgggtccggtcgtccggagactccggatatgttcacctgtttgaggtttcaccgttttggttggttcgtctcagctctccttcagactactgtaagttctcgacaaatgttcactgatataaaaaccaaatac

SEQ ID NO: 26235 - DNA, 2455 bp, Oryza sativa
  ref <308>: DATABASE ACCESSION NUMBER: AK101677
  ref <309>: DATABASE ENTRY DATE: 2002-08-28
ggagcgtcggtcgagcgagcgaagcctcccagatctcgaattctctcgtctccaatcgctgcagatttccatttccgccgcggcgaggaggaggaggaggaggaggggcgaacgctagtgctctccgcctcgcgggcagtgggcgcgagatctcatccgagtgggtgggcggggagagatctagggcttgcgttgcgggcgcgcggccatggcgagctccggactcgcctaccccgaccgtttctacgccgcggcggcctacgccggattcggggccggcggggccacctcctcgtccgccatctcccgcttccagaacgacgtcgccctcctcctctacggcctctaccagcaggcaacagtggggccttgcaatgtgccgaaacccagggcatggaaccctgtggagcagagcaaatggacaagctggcatgggcttggaagtatgccatcggcagaggcgatgcggctgtttgttaaaatcttagaggaggaagatcctggatggtactcaagggttcctgagttcaacgctgagcctgttgtagatattgaaatgcataaaccaaaggaagatcccaaggttattctggcttcaacaaatggaacatcggttccagaacctaaaaccatatctgagaatggaagttcagtggagacacaggacaaagttgttattctggaaggtcttagtgctgtcagtgttcacgaagaatggactccattatctgttaatgggcagcggcccaaacctcgttacgagcatggcgcaactgtggtgcaagataagatgtatatatttgggggaaaccacaatgggcgttaccttagcgaccttcaggctttggatctgaagagtttgacttggtcgaagattgatgcaaaatttcaagcaggatccactgattcatctaaatcagcacaagtctcttcttgtgctggacattcgttgatatcttggggcaacaaatttttctctgttgctgggcacacaaaagatccgtctgagaacattacagtgaaggaatttgatccgcatacttgtacatggtctattgtcaagacttatggaaaaccaccggtttctcgtgggggtcagtctgtgactttagttggaacaactctagtcttgtttggtggtgaagatgcaaaacggtgtcttttaaatgacttgcacattcttgatcttgagaccgtgacatgggatgatgtggatgcaataggcacccctcctccaagatcagatcatgctgctgcttgccatgctgatcgctatcttttaatttttggtggggggtctcatgcaacatgtttcaatgacttgcatgtcctcgatttgcaaacaatggagtggtcaagacccaaacaacagggtctggctccaagcccacgagctggccatgcaggtgcaaccgttggggaaaactggtacatagttggtggtggcaataacaaaagtggtgtctctgaaacacttgtgcttaatatgtcaactttaacatggtcagttgttagctctgtagaaggtcgtgttccccttgccagtgagggcatgactttagtgcatagcaattacaatggagatgattatctcatttcttttggaggatacaatggacgatacagcaatgaggtctttgctcttaaacttaccctcaaatcagatttgcagtcaaaaacaaaagagcatgcatcagatggtacatccagcgttctggaacccgaggttgaactttctcatgatgggaagatccgtgagattgccatggacagtgctgattcagacctgaaggatgacgcaaacgaacttttagtagctcttaaagctgagaaagaggaactagaagcagcacttaacagggagcaagtgcaaactatacagcttaaagaagagattgctgaagcagaggctagaaatgcagagctgacgaaggaacttcaaactgtccgtggccaacttgctgctgaacagtcaagatgtttcaaacttgaggtggatgttgcggagctacggcagaagctccagagtatggatgcattggaaagggaggttgagctgcttcgaagacagaaggctgcctctgagcaagcagcgttggaggcaaagcaaaggcaaagttccagtggcatgtggggctggctggtgggaaccccacctgataagtccgagtcttgatcacctatctatctttacccgacaatctcatacggatcgcgcagattcatatacgtgtaacatgtataaactttttgaatgtcttctacacttttccttttcctttttctttttatcgttttctggcattcgtgttcatttggcgacaaaacaataaggcgttttggcaagcgttatctgatattctcatagaaaattgttagctcatccttgtatcgcattcaattcttattaggtcgtaaaaaagcttgtatacacctttttgtgggcattctttgg

SEQ ID NO: 26236 - DNA, 1848 bp, Oryza sativa
  ref <308>: DATABASE ACCESSION NUMBER: AK101678
  ref <309>: DATABASE ENTRY DATE: 2002-08-28
ggtccccgaagcccagatccccaaccgggtccccgaacccgacaagggccgcccgagacccgataagcgatgccctcctctcgccgccggagatcgtgagatcgccgccgcggccctccccgccggcgatgacgtccgccgtgctcgccggccggaatgaggtccaccaccaccaccaccaccactgggccgacgcccgcgtccccctcatgcccaagcacgccaccaaccctaaccctaggcggcaccaccggccgagccccagcatcccgccgccgccgccgccgcagcggccaccggcggcgactgtggccccgtccgtgccggatccctccccgtcgggccacgtgacgatccgcccctccgagctgtcccgcagggaggcccaggtgctccgcgcgcggctcaccggcgagctcagccgggtccgcgccctcctctccgacatcgacgggtgggaggcgcggcggcggcggccggcggagcctccgcgccagcgggggcacgtgtcgccgcccccggccctccaggcggcgatgcggaagcggtgcacgcagatcctgacgcggctgcggaagcagaagatcagcgtgtggttcaactcgccggtggacgtcgagcggctgaagctgcacgactaccacgccatcatcaggaaccccatggatctcggcaccgtcaaggagaacctcgccttcgggaggtacccctcgcatgaggcattcgccaccgatgtccgcctcaccttcagcaacgcgctgcggtacaatccggccgaccaccatgtccaccgctacgccagtaacctcctcgccaccttcgaggggttgtacaaggaggccttgtcctggttcgagcaggagtgccagcgtctcgagccgccaatgccgctcgctttgccgccgccgccgcagcccccggtgcctatgccgatgcaggcgccgccaaggattgggggtggggggaggaggccgaagcccaaggcgagggagcccaacaagagggagatgagcgacgaggaaaagcacaagttgagggtggagatcgggaatttgcccgaggagaaaatggggaatgtgctacagattgtgcagaagaggaataccgatccggcgctaatgggagaggtcgttgagcttgatttcgacgaaatggatgtcgagacgctgtgggagctcgatcgatttgtggtcaattgcaagaaggcgctcagcaagagccggaggactgtcgcgatgaacggtgatgctgttgatgcgactgctattgttccaactgaggacgataccgtgcaggtgaatgtgcatcatcagccttcggtggttgaaattggggactcggagaatgacacgccggagaagagggtttcagaggttgatatggttgatgagtatgttgatattggcgatgagatgccgacggcaaattaccagtcggtggagattgagagggatgcccaggtagcgagcagctcaagcgggtctgatagtggctcgtctgcatccagtgattctgactcgaggagctctggggactccgattcagacggggatgatgcccagtctcccgattaggtggtgcttcttcctctaacaataggattttagtggttttattaggtgactgaggtccattttggcaacgtatttttagtagcgtggtataggaaattggatgggttcttgttcaagttgttgtgagctatgttcgtgtgtgcgcctgcattcaccttaggttgttggtagtaatggatagctagtttatgtgggtagtttggcaaacgaagaccattgtaaagaagggaatataatcgaaggaaaagagaaaggtagcaatgtgttagcattt

SEQ ID NO: 26237 - DNA, 2150 bp, Oryza sativa
  ref <308>: DATABASE ACCESSION NUMBER: AK101679
  ref <309>: DATABASE ENTRY DATE: 2002-08-28
gacctcagtcagacatcgtcctctccatcgccgctaaggtcttcgccgccgccaccgccgccgagaggggaggccgccgacttcagcgatgccgacggtgagcgtcggccgggaccgcttcttcgtcgccctcggaaggacatacacgcaggaggagttcgaggtgctctgcttcgagttcggcatcgagctcgatgacgtgaccacggagaaggccatcatccggaaggagaagcacctggaggatgatgacggcgaggtggatggtgatgacgacgaggtcatctacaagatcgaggtcgccgccaataggtatgatttgttatgtcttgaaggattggcaagggccctccgcattttcactgggactgaagcgacccctatgtacaaaatttcttgcatccctcgcgattcaatgcttctgatgcatgttaaacctcagacttcacaaataaggccctatgtggtctgtgctgtccttagaggggtaactttcgatgaagcaagatataacagcttcatcgatcttcaagacaaactccatcaaaatatttgcaggaagagaactctggtggccataggtacccacgatcttgacactctgaaaggacccttttcatatgaggctctaccaccacaagagatcaactttgtcccattaaagcaggaggaaagcttcagggctgataaactgatggaattctataaatcagacatgaagttgaagaagttcctgcatataattgagaattcgccagtatacccagttatttatgatagcaacaggaccgtattgtctttaccaccaatcatcaatggtgcacattctgctatcactctgaagacaaggaatgtgtttattgagtgtaccgctactgaccttacaaaagcaaagattgttctcaatacaatggtcacaatgttctctgagtactgcgaaaacaagtttgaagtggaaccagttgaagttgtgtcacatgatggaagcaaaaccatttaccctgacctttcatgctataaaatggaggtctcactatctgaggttgttggacccattggcatctccctagatgagacaaaggttatttcccttctgaacaaaatgcagttgcaagctgaaagttgtccatcaaaaggggaaccacgtatttcagtttctgtccctccaacaagaagtgacattctgcatgctcgtgatttggtggaggatgttgctatagcttatggttacaacaatgtgccaaaatcaaagccaaagtgtatgacaataggaggaaggcaaccattaaaccgtttctctgataaacttcgtgctgaggttgcaagagctggttatatggaggtgctcacatttaccttgtgttcacgtgaagaaaactttgacatgttaaataggacacaggatgtaaataaagcagttattattgcgaatccacgcacttctgaatttgaggtggttcgaaccagtctgatgtcatgtttattgaaaactttgaagcataacatagaccatccaagacccataaagatatttgaagttggtgatgtagtgacattggatgggtcacgtgatgttggtgcttctaataatcgtcgactcgcagctttgtactgtaataagcagtctgggtttgaggaaattatgggtttggtagatagaatcgtgaatgttgtgagagctccccacatcaaatttggccagaattactatgttcctacaaatgaacctgaattctttccgaaaagacaatgcaaaattgttatgagtgatggaaagcagattggctacttaggaattgtgcatgccgaggtcctaaggaaattcggcattccagacccctgcactttcgttgagattgacgttgaggctttgttatagtaccacctgctgtcagtcaggatgtgcttgctttgttcatttagcatgcgtggagtatctaacagatcaagcatttgagtttgaacaccgcatgtaattgtagaattcataattgcatatttttttgttcgggaagaaatagaaaatggcgatgcccttttttgccaaacaggccgtggggtcatgtttaccttgttcccattgtgtaattttacatcattgctggcacaggttttttatttataaaatggatatctaaaatgattttgtg

SEQ ID NO: 26238 - DNA, 1135 bp, Oryza sativa
  ref <308>: DATABASE ACCESSION NUMBER: AK101680
  ref <309>: DATABASE ENTRY DATE: 2002-08-28
gagagcctagagagagaaagcgcgaggagaggagaggagatggagcggccggcgccggtgaggaagtcccacacctcgacggccgacctcctcgcctggccgcagcagcagcaccagcccgacggccacgccgcctccaccccctcccccgctcgccgcccccaccagccatcggaggcgctgaggaaggtggtgttcggtggccaggtcacggaggaggaggccgagagcctcaacaagaggaagccatgctccgcgcccaagtggaaggagatgaccgggagcggcatcttcgcggccggcgccgacggggaggcggaggagcccggcagcgccgccgcgcccggccgcgccgccccgcgcaattaccagccagttactgtgagccacatttcatttgctgaggatggaagtgttcctcccaaaaagccaacttcagtggctgaggtagcaaagcagcgtgagcttagcggtactctgcaaagtgaagcagacagtaagatgaagaagcagatttcaaatgcaaaatcaaaggaactcagtggccatggcctttttgaccctcaagatgtaaggcctaatggggcaaggaacacagcaaatggcaccggtgcctcacacacacctgtgagaaatgcaaatgtgagcagcttctcgtttggggaggccaacactgacagcgtgacgaaaactgcaaagaagataactggcaagaaattcaccgatctcacaggcaacaacatattcaaaggagacgaggcccctgcttctgcggagaagcatctgagcaccgcgaagctgaaagaaatgactgggagcaacatattcgcggaaggacaggcgccaacccgagagtatcatagcgggaaccgcaagcctcctggcggcgagagcagcattgcgctggtttagcattctggtggacaccgtcgctgtccgtgttttcctctttaggatgaaccctaggagtcgttctatcagcagattgagctgccagtttgctttcctgtttcgacggttaggcataaagtttgtttcctgctgatgtgggtaaagacaggctatgctctcctagcataacatttgttgtggtgttgtagtttggtatggtcagtcactttgctgtgacatactc

SEQ ID NO: 26239 - DNA, 1643 bp, Oryza sativa
  ref <308>: DATABASE ACCESSION NUMBER: AK101681
  ref <309>: DATABASE ENTRY DATE: 2002-08-28
ggtgcgcggcgcacgaaaacccgcacctcctccgcctccgcgcgcccctgctcggcggcctcctctcctctcccacccatggcgcccccaccggcttcctccctccccacggccgtcctcgcatggggttcgggggaggacgggcagctgggcatgggcggctacgaggaggaggactgggcgcggggagtcgccgcgctcgacgcgctcgccgtctccgccgtcgtcgccggcagccgcaactccctcgccatctgcgccgatggccgcctcttcacgtgggggtggaaccagcgcggcacgctcgggcacccgccggagaccaagacggagagctccccggcccccgtcgatgccctcgccggcgtcagcatcgtgcaggcggcgatcggcggatggcattgcctcgcggtggacgacaaggggagagcatacgcttgggggggcaacgagtatgggcagtgtggggaggaggctgagaggaaggaagatggaaccagggctctcaggatggacattccgatcccgcaggggtgtgcccccaagctgaaagtccggcaagttgctgctggagggacacactcggtcgtcttgacacaagatggccatgtttggacatggggacaaccatggcctccaggcgatatcaagcaaatatctacaccagtgcgggtgcaaggccttgagaatgtaaaggtgattgctgtaggtgcattccataatttggctctaacagaagatggaattttgtgggcatggggtaacaatgagtatggtcaactgggcactggagatactcaaccaagatcgcaaccaatccgtgttgaaggattatctgacctttcattggttgacattgctgctggaggttggcattcaactgcattaactaaagagggagaggtgtatgcttgggggagaggagagcatgggaggcttggatttggagatgataaaagtagtcacatggttccccaaaaggttgagcttcttgctggagaggatattattcaggtatcatgtggaggaacccattcagttgcgctaactcgtgatggacgaatgttttcttacggtagaggtgaccatggccgtctgggctacggcaggaaggtcacgacgggccacccgatggaagtccccatcgacctgccgccgccgggaaccagcggcggcgactccggcgggcaatggcaggcgaggtacgtcgcctgcggcgggaggcacacgctggccatcgcgacatggacggaggcagacgagtaatcgatcgcctcttggttttttaaagccaaatcccggagctggtacagataatactaccgagtacttttcgtgcaataagacaaggctaatgttaaaatgatctctgagatgtatgagctgagtgatgaataaacaaggaggaataaaagaatcgggatttttctttctgctgagataaataagcatggccatctcatcttctcgctatgaatgatttccaagtgaattcattaccctagggaaggaaaaacaaaagttgagaaatgacaacttttgtgacgtaatctgttcctttcttctttcctcccaaacttatttttaaatattattttttatcctcccgcaaagttaattattaaggtttgaaagttgtatgc

SEQ ID NO: 26240 - DNA, 1570 bp, Oryza sativa
  ref <308>: DATABASE ACCESSION NUMBER: AK101682
  ref <309>: DATABASE ENTRY DATE: 2002-08-28
gggttcgcttccctttctcgtcagaaggctcactccgtctccccctccggccgccgcaaggagaagcagcagcagcgatgcaggccgccgccgggcgcgcgcgccgcctcctcacgtcgccggcggcctccggtatcctctccgcgccgcgccccgggtgtgcggcgctcgccgggagcggcgcccttcttccccgtctcgatggtgtcccgtcctcgccgtcgccgtcacaggcccctccgctcctggctaggagcttctccgccacgtcctcgtctcgcctaccccgtaacttgctatcgccaagtatatcttctcaatggcggaatgagaaatcggtgtgctatcacatggctgcaactcactactcaacagaagcaagtgacattgatcaacctacagaggctgtagtggagctgtatcagaaaatgttgaaatctgttgaagccgagaccatgcctccgaatgcctggttgtggtcaatgataagtagctgttccaataaggaggacatcaaactacttattcagattttgcagaagctaagagtatttagactatcaaatcttcgcatcgacgcaaacttcaacgatcatctttgcatgaaagttgcagaggcttgtgctcgtgttggtgcccttgactatggtttgaaggttttatggaagcataatgtttatggaattacgcctaccattggttctgctcattatctactgaaacatgctaaagagaaaaatgacactaaactaatgggaagtataatgcaagtccttcagagaaattcgatgccattgcaaccaggcactgctgatatagtcttcagcatctgctataatgctgatagatgggatttactctcaaaatatgcgagaagattcgtgaagtctgaagtcaagctgcatggtgcttcatttgacatttggatggacttcgctgccaaagttggagactcccaatctatatggaacatcaatagcctgagaggcaagtcagtcaaacgctataatcttgcaacaggttttgcatgtgtaaaggggtttctgcttgagcgcaaaccagaaagcgccgctgccatgattaaattacttcacaagcattcacctgatgagaagaaacaattggtgacggatgagctccagaagcttgttgctgaatggccagcagaggtgataaaaaggcagaagaaagatgataggaaggcgctggaggaagctttgattacagatatccctcaaatgatcagttccatgtcaaagctgcgccttgatatttctgtgaatttggagaagcttacctctcaacctgaaacagcatgagaagtaacacaggtgcccagatggcctagcagctgaaattacatgagtacaggcaggcggacaatatcacagtccagccatttgtattcgactacattctatttgatgggtagcacactagcactagcctgcccgacaataacatgtatacaacacattccgttgtttaccttgccatgtgcttttccacgacagttttgtagaaaaccttggtgaaattgcacgcatgaaattcaggtatgcattctcgg

SEQ ID NO: 26241 - DNA, 1715 bp, Oryza sativa
  ref <308>: DATABASE ACCESSION NUMBER: AK101683
  ref <309>: DATABASE ENTRY DATE: 2002-08-28
ggagcgcgcgcacgcgaccacggcggcgcgaggcggaagcagccgccgccgctgcctccttcccgcgcagcgcagcgcgcggttcggttgaattctcgcgccacgccacgccacgcctcacctcaccaccaccaggcaccagcgaccagcagctataagaggagggagaccaaggacaagcaaacccgtgtgtccgggtcagagtttcttgagagtaaaaaatggcagagggggagggagagggcggggagaagaagagtcagcgtcggcggctgagggcggcgtgcctgccgcgccccgggtgcttcacggtgtccgccgccgacgaggggccgtcgggctccggcggcggaggaggggggagtaggccggcgccgacgcatctggtcgtgacggtcaatgggatcgtcggcagtgcagaaaattggcgttacgcagcaaaacatttcatcaaaaaacatcctgaggatgtggttgttcactgcagtggatgcaacggggcagttcgaactttcgatggagttgatgtgatgggaacaagattagcagaggaggtgctctcacttgttcagcgtagaccagagcttcaaaagatctcctttgttgcccattcattgggtggattaattgcaagatatgctattgcattgctatataagagtgctacagaaatagattctcatgaagagcatgagaagcaaatcactgatgtttccagcaaccaacttattgatcgaggcaaaattgctggtttggagcctattaatttcataacttttgcaacaccacaccttggaacaagatcacataagcagataccccttctccgtggttcctataaactggaaaagatggcatatcgcatatcatggattgctgggagaagcggaaaacatcttttcctaaaggacattgaagatgggaaaccaccactccttctccaaatggttactgattacggtgatctccatttcatgtcggctctgcgttctttcaaacgtcgtgttgcttactcaaacatctgtaacgatttcattgttggctggagaacatcatcaatacgccatcaacatgaacttcccaagccccaaaattttataaatcatgttaaatatccacatgttgtatatgtggaaaagccgaaggttcaggatactgatttttcagattcaatgatatatcaggcgaaaaatacaagtgaaatggaagaactgatgctcaaaggtctgaacagaattccatgggaaagggtagatgttagcttcaagaaaagtagacaaaggatttttgctcatagcaccattcaggtcaagacctatttcttcaactctgatggggctgatgtgatttttcacatgatcgaccattttctttattaacattggtcgggatgggagggtggcggtaacgaggaagctcccccactttgtttttatcccatctggagtttactttcactttgacacgaaaaaatgtgaagaaatgtttttttcaggataactagaattgttaccggaagaagtacagtagatccccatagtaaagataggtgttggatgtagtggagtatgtgtcttgtaaactttgggtctccgaggttggttttttttttccttctctctgtctcttccgggcttcagtggctcagtgacagtgtacatgcatgtaatggaccacattctgctgctctaataataaaatctactgtgtgttgc

SEQ ID NO: 26242 - DNA, 1412 bp, Oryza sativa
  ref <308>: DATABASE ACCESSION NUMBER: AK101684
  ref <309>: DATABASE ENTRY DATE: 2002-08-28
gatagagcacagtcctctcctcttccccgtgctccccatttctgcttcttttcccacaaatttctctctctatctcagaaaggattcgggagacttgaagagaggagctcgaagcgggacaggagagagaggctaattatagaagtacacgaagaaaaatggtgcctggaccaaagtgagaccatctcataatgctaatgcttttgcgacaaatggaagatcatcgagcccatactacgcccaactatgattttttctctggagattatcagatgaagcagttaggtcataagatgtatgatcaagattccccgtcaagcgattctggacagtcacaccaagaagaatctgccatgaatgatagcagtccaaatgagcgacatacctcaacacaatctgacaatgatgatggtcatcagatgccagatcaggacaaaacaaagtcagtatcatcgttggggaatccaggagctttgcctccaaagctcaactatagccaatcctttgcttgtattccttatacagctgatgcatactatggtggggtcttgactggatattcttcacatgcaattgttcatccccagcaaaatggtacagctaactcccgggtgccgttgcctgttgagcctgcagcagaagagccaatatttgtaaacgcaaagcagtaccatgcaattcttaggaggagacagatacgagctaaattggaggcccaaaataagttggtgaaaggtcggaagccatacctccatgaatctcggcatcgccatgccatgaagcgagctcgtggatctggagggcgcttcctcaacacaaagcagctcgaggagcagaagcagcaacaggaggaggaggccgcatccggtggcgcgagctctggcaataggacatgccttcagaatggcaccggtagcgcgccttcagcttcctctccctctgaaatcgcgagcgtctcaaccagcagagaattccttggtaaccatgagcagagccacttcccctcagctggcttccttcccacaatgagcttcagagcgcagaatggcggagatgggaagctggtcgcgaacgccattcaccagcgcgtttccatgatgaggtgaggtgaagaggggtgaagtgggttcagctcagcaccatcactttggctctctccctgctggtggcaattcatccttggcttatgaaaataccttatgggaaaaaaaaaagtagtttcatcctcaaatggaccaaacatgtgtggctccattttaagttttcctgtaactaaaagcactgcaatgatcaactgactgttggttctgtttgtggatgcttatatctgtacttgctgtatctaatactgaactctaagttgaaaccctgaaactgatggtccccgtgaatattgtagcttgcattttatc

SEQ ID NO: 26243 - DNA, 1750 bp, Oryza sativa
  ref <308>: DATABASE ACCESSION NUMBER: AK101685
  ref <309>: DATABASE ENTRY DATE: 2002-08-28
gaaggtttcttccatccccacgccggcggcggcgttgtctcgcggcggcgccggcggactcctctctgcttccttccccgttcccgttcctcccccgcgccgcaagctatggcagtgcaagctggaaccccagctactcctataagcccccaagtgattagtggtgcatttgttcagcaatattaccacattctacatgagacaccagatcaggtctataagttctatcaagatgcaagtattgttggtcggcctgattctaatggagtcatgaaatatgtatcaacaactgctgatatcaacaaaataatcttgtctatggacttcagcaactacttaacagagatagagactgcagatgcacagttatctcaccaggatggtgtgctcattgttgttactggatctttgacatctgaaggcatatgccgtagatttacacagtcattcttccttgcaccacaagaatctggtggctatgttgttctcaatgatatttttagatttatagtggaaaggccaccagttgcaataagtcaagttagtcaagaaaatgagaacaatcagaacactgccactcttcctgaaactgatcctaatccagcgggagatggtatgatctcagagcctgtggcagtggaaaataatgttgcggagggggaagtgacaaattccacggttgatggcactagtattgaaaataatgctactgctgctgtcgaaccacctgtacaaatgacgaaagaggagcccaggaagatctctgttgctgctcctccccctccagctcagaaggatgtaacgaagaagtcctatgcgtcgattgtgaaggttatgaaggaggtgtcactaaccccagttgtcaaacctaagccagctccaaaacatgtggttaagactgttgaagcttcagagaaaccttctgttaaaagttctcaaactgttgaaatcactccgaatgataacaacgatgctgaaaataacacttctaatgatgagcaaggttactcagtttttgtgaagagtttgcctcacaatgtgacagtccagacggttgaggaagagttcaagaaatttggcgctatcaagccaggtggcatccaagttaggaacaacaagattgaccggttctgctttggttttattgagtttgagtcccagcaatctatgcaggcagcaattgaggcatctccgattcatatgggtgggaaagaagtatttgttgaggagaaaagaaccactacccgagttgtgaatggtgttgtcatcacgcgtggtgataatgggaatgctggtggaggcggacgttaccaatctggaaggggaggctaccgcggtgataatttcaggggacggggtggtggctatgcgaacagcggaaactaccgtggaggtgataacttcagcaggaggaacgacttgagaaatcgcaacgagttttcaggtcgtggtcgagggccaccgcctgggaatggctatcagaacaacggattccatccagcaaggccgttccagaacggaaatgggaggttcacccgagtcaacggccctaggcaaacaccggttgcggcatagaggagggcaatgatgaagggaaattcaccgtagcaggaatttcctgaagagattaaaaatttttagtagagcattgtttcatagacaatttgggatgggcatcaagattcttttgcaccttgtaacggctgctacaaggtgagttttggtgattaattgccgttgactaacgtcc

SEQ ID NO: 26244 - DNA, 3082 bp, Oryza sativa
  ref <308>: DATABASE ACCESSION NUMBER: AK101686
  ref <309>: DATABASE ENTRY DATE: 2002-08-28
ggcctcttcgcaaatcgcaattcccaccaccaccaccaccaccaccatcgccaccgcctactcctcctcctcccagatccacccggccgccgccgccgccgccgccgccccccacgccccgcggcggcgagatccctcccccgtcgccccaccctggattccgtcgagaagatcgtcgaggacttcgccatggacctcgccatcaaccccttctcctccggcacccgcctccgggacatgatacgggcgatacgcgcgtgcaagacggcggcggaggagcgggcggtggtgcggcgggagtgcgcggcgatacgggcggccatcagcgagggggaccaggactaccgccaccggaacatggccaagctcatgttcatccacatgctcgggtaccccacccacttcggccagatggagtgcctcaagctcatcgccgccgcgggcttccccgagaagcgcatcgggtacctcggcctcatgctgctgctcgacgagcggcaggaggtgctcatgctcgtcaccaactcgctcaagcaagatcttaaccactcgaaccagttcattgtggggcttgcactctgtgctcttggcaacatttgctccgctgaaatggcgcgtgatctgtcacctgaggtggagaggctattgcaaagtagggaaccaaataccaagaagaaggctgccttatgctctataaggatcgtacggaaggttccagatttggcagagaacttcatgggctctgctgtttcactactgaaggaaaaacatcacggggttctcatatctgctgttcagctctgcgcagaactttgtaaagcaagcaaagaggcattggagtacctgaggaagaactgccttgatggtttggtcagaatactgagagatgtgtccaatagttcatatgctcctgaatatgacattgctggaattacggatccgttcttgcatatcagagtgcttaagctcatgcgaattttgggtcaaggagatgcagattgcagtgagtttgtgaatgatattcttgctcaggttgcaacaaaaactgagtcaaataagaacgcaggaaatgctattttatatgaatgtgttgagactataatgggcatcgaagctactagtggtttacgtgtgctggcaatcaatatcttgggtagatttctgtccaaccgtgataataacatcagatatgttgctctgaacatgcttatgaaggccatggaggtagacacgcaagcagtgcagaggcatagagcaacaatattagagtgtgtcaaggatgctgatgtatctattcgcaaaagggcccttgaacttgtttaccttcttgtcaacgatgcaaatgcaaaatctttgaccaaggagcttgttgattacctggaagtaagtgatcaggacttcaaggacgacctcacagcaaagatatgctcaattgttgaaaagttttcccaagataaactttggtacttagaccagatgttcaaggttttatctctggctggaaattatgtgaaggacgatgtatggcatgctctaatagtcttaataagcaatgcatctgaactccaaggatactcagtgagatcattatacaaggcattgctagcttgcggtgaacaggaaagtttggttagggtagctgtatggtgcattggtgagtatggtgaaatgctggtgaacaatgttggtatgctggacatagaggaaccaatcacggtaacagaatctgatgccgtggatgctgtagaggtctctcttaaacgatactctgcagacgtgacaactcgggctatgtgtctagtatctctcttgaagctctcttcccgattcccaccgacttcagagaggataaaggaaatagttgcacagaataaagggaatactgtgcttgaactacaacagaggtcaattgaattcaactccattatacagaggcatcagtctataaaatcatctttgcttgagcggatgcctgtgatagatgaagctagttacttggctaagagagctgcttccacacaagcaactatttcatcagataaattagctgctgcagcaactcctggaagctcgcttaagcttccaaatggtgtagcaaagccaccaccggctcctctagctgatttgcttgatttaagttctgacgatgctcctgcgactacttccgcccctactacagcacctaatgatttcctacaggatcttttgggcataggcttgactgatacatctacagcaggtggagctccatcagcaagcacagatattctgatggatcttctatcaattggttcttctccagtacaaaatggcccaccaacagtatcaaactttagccttcctggtcaagctgagactaaagttgcacctgttacaccccaagttgtggatcttcttgatggtttgtcctcaagcacatctctttctgatgagaatacagcttacccgccaatcacagctttccagagtgcagctttgaagatcactttcaattttaagaagcagtctggaaaacctcaggagactacaattcatgctagctttacaaatttgacatctaatacattcacggatttcatctttcaggcagctgtaccaaagtttatccagttgcgtttggaccccgctagcagcaacacgcttcctgccagtggaaatgattctgttacacaaagcctcagtgtcacaaataaccaacatggacagaaaccccttgcgatgcgtatccggataacttacaaagtgaacggtgaggacaggctggagcaagggcaaatcaacaattttcctgctggattgtagtttgacctgtgtctataatgttgtgatagctcttccaactgctgcaagcaaaggcgagtttttctttttacttttttctgctcttccccttttgcttgccttctagtgagttatgtacacgacttagctggttttggccattcattcttcctttctatattgtatagtagccggcagcaattaatgctacatcttcagttttggcaaaatgtattcatatggtgctgtatatcacttgaggataactaaaattttcagcctccccctcatttcaggcagc

SEQ ID NO: 26245 - DNA, 1055 bp, Oryza sativa
  ref <308>: DATABASE ACCESSION NUMBER: AK101687
  ref <309>: DATABASE ENTRY DATE: 2002-08-28
gggtgagcaggagacccctcccgccgttcggagctcggacgctttctcgccgctgctcaccttccgctccctccccttccacgcgccgccgccgccgattctttgctccgtttggcggccgctgggccgtacgggagggggtgggactggatggagtcgtcggtgcggagggtgcagcagcgggtgaggaaggcgcgggaggagatggatcggtgggacgacctcaactcccgcctcctctctcagttcgcaaacgctgccgccatcgttgctcgtctcccggtgctggaagaggttaagaactatggtgtcctacgatgtgtccctaacatcagagagaatcttttgggtaagcaaatggagagtttggagatcatcttcgtctctatgagggagacagtggaggaattcaatagcattgccagatctttacataaggctttgcgggatactaatcaaatggtgagaggtgggtctgcactcagtgcaaaacagatgcagttacaagtgggaattttgccaactatagcagactgcttggatgggctacggactttatgtgaaatgcaccaggccgagtatgcactaaaatcatcagtcatctcttcgctgacatggacgagcagttccagtgacattgccgcgatgcgtcaactcttagtagaccagccaaacataccaaaagatgaagtgcaagctatttttgacattatattcgcagatgaaatctgttgatgtacttgcacgattgctattggaagcactatgccctggagtcctggacatgttgacatcattatgttttgatgtacttgcatgcccagatggccagatgaaccaaagatgctgatgcactgtaacaaagctggaattgctgtgtctggctgccagcaagagagtaggatgtaggagtagctttctaacatacactaaaatatcttccctttttttatccccaaattttcctagttctatgttaacagtcatgtcctggagactaaaatttatctttgactgaatgcacattttcatgtcctggagactataatttatct

SEQ ID NO: 26246 - DNA, 2275 bp, Oryza sativa
  ref <308>: DATABASE ACCESSION NUMBER: AK101688
  ref <309>: DATABASE ENTRY DATE: 2002-08-28
gaaccaaaagccctagagaaaccccaactgagagagagatggcgccgccgccgccgcccaccgccttctcccgcctccgccgcctcttctccaccgccgccgccaccgccaccgccccgaccccggaatccgtcctctactccctccgcaccctctccaaggacccctccgtcgcgctcgccttcttccgccgctcccaggccggcggccacccgctgggatccgccgcctacaacctcatgctccgcaccctcgcctcccaccccacctccgcgcactcccacttctggcccttcctccgcgacatgaacgacgccggccactccatcgaccagggcacctacctcgccgccctcgcctccttcaagaaggccagcctcaccgccgactacgcctccctcaccgcccactacgccaaggcccaggaggacgccaagggtgggacccccacctccgccgccgccgacgccgtccgtgccctcgaggatggctcggattcggatgctagcgcggagctcgacgagaagctggagggcgtcgacctgccgctaacggagaccgccgtggccagggtgctccgggaggtgagggaccatccgatcaaggctctagccttcttcaggtgggcggggcgtcagattgggtacaagcacggttcggtgtcttacaatgccatggtgagggtgctcgggcgagaggagtccatgcgggagttctgggacctcatccaagagatgaaggccgacgggattcatgtcgatatcgacacctatgtgaagctctcgaggcagttccagaagcgccacatgctcacggaggccgtggagctctatgagctcatgatggatggtccttacaagccatcgaagcaggatggtccggtgctcatcaggcgcattgctctggggccttcgccggaccttgagctggtctatcgtgtggttaggaagttcgaggcggtgtgggagttcaagactaaggatgtttttgatggcatccatagggcgctgacgagtaatgggaggtttgatgaggctgccgagatcgtgaagaggatgaaaggcgaaggtcatcagccagacaatattacgtatagccaactgatctttgggctctgcaaggcaaacaggtttgatgaagctcgcaaagcgcttgatgaaatggaggctgaagggtgtgtccccgacttaaagacttggaccatgttgatccaaggtcactgtgcggctggggaggtggaaaaggccctgcagtacttcacggaaatggttgagaagaatttggaggcagatgcggctttgttggatgtaatggtgaaaggtctctgtagcgatgataagattgatgcgtcgtatgctttctttgttgagatggtagacaaggccaacttgagcccttggcaaggcacttacaagcatataattggtgaattgctgagggtaaagaaacttgaggaggctctgggtctcctgagatcaatgaaagcacgcaagttcccaccttttgcagacccattccctactcacatcgccaagtacgggacatttgatgatgcaaggcagtttctcaaggccttgacggtgaataacaagtacccatcacccactgcctatctgcatgttttcaagtcatttttcacagagggaagatattcagaagctcaggatttactgtataaatgccctttccatatccgcaagcatcctgatgtcaccgagttgtttgaatcaataaaagttgaaagtgagagtgcggcttgatgaagtgcaagaaattattgagttgctcgagcgatggattttcagcagaggcagagggcaaaaactgtggctgaatgtgatggcagcttagattggatggatagattcccagctgggtcagttcaagcactccatgcttgacggagtttggcaagacaaagattggtaacagagagcagcgatatgatgattatatgctcaagatatttggtctttgaagatgctcctcgcactctgccaacaataatacatgccgaatattatcgcataggcatcttcatgtaccggcacatatctttcatgtaccagcatccccatcagtttcgtcaacatttctttccaggcaccgacttttattacaggttgctgcctgccttcttttcttccccacatctccttttgcagttttgcttagctactgcctgttggttcgctacctctgtctgtctgattgctgtgtcttgggtaatgctgaaacaatttccatatataatacattacagaaaatatttgtt

SEQ ID NO: 26247 - DNA, 1640 bp, Oryza sativa
  ref <308>: DATABASE ACCESSION NUMBER: AK101689
  ref <309>: DATABASE ENTRY DATE: 2002-08-28
acactatagaaccagggctttgctgatccaggacgagccaatcgagctcgccgacgggcggagccaccaccaccaccacccatccccggcgccgccatgctggcttccgcgagggggttctgggggcggcaccggcggaagatactggtctcgctcggggtcgccggcgccggctacgccgcgtacaggtacttggactcgcaccggaggcagctcgtccgggtggagcagcgcgcgctggaggagcgcgccgccgaggagatcatcaagaaccaattgcagacccactttgaaaatgtgcagaagatctcagacacgaccacactgccttttgctatgcattatctccgttcaaggatcatggaggaattggatatttcacacctgactgagaagctaatgcacgggaagggagaatccagtgcccctgccctgacaccaaaggagaagtatgacacttgggagaagatcaaaattttgagtttcacaaggactgtttcttcaatatgggcgatgacgttgcttagcttatatgttagagtccaggtcaccatattaggcagacatctctacttagattttgctcgtgttacggatggtgcgcaattacaggagggttctgacacctttagcaaaagcgggcacaaatactttcttgcaactgctgattaccttgccacatatggtatcaatgcattaattacaaagatgcagcatgctgcaacagaaatcttgaaagagaaacaactgaaagaccctatgggcattgatgaagtcctagaaacaattttacaaatattgaagcagttcatgggtctttgtgaagataactcttggataaactaccttgtacctgagaatgccaatgtgtatgcacagttgatggctgtgtccagtagtggctttgatgattcttcacttctgaaggatgttaggaagcttgatcagttaatgtctgagacacgtatagttttgtcaagtgatgatttcagaaatatcatggatagatcattgaagaagatagctagcgtggtggtagaggacttggctgtacagattggagctccaattcctccacctggattgcccttagcaaagctcttggccaaagtagctcaactgagtttgccattgctcgaggagccagataagaacaagcacattcagattatccgaagtatgcctgaagtggaactcttttacactttcctctacgcaaacatgccaccagaaacataatgaagcacactaatgtggaatgcaatacattggtcccgaattttgccattagaacaagtctgatattttgagcactttctgaactccggaaacagaaggcggagagaagactgatttatgctccttgcccctatgtatgctggagatgtccagttgtcactaacacggatctaactgagcgcagtcctttcttaattcatttctctgcttgtgtgcttctagctagaaccagcactgtttcagccctttttttatatatatttttgagatcttactatggaaattgtacttgaccagggtttcaatggtttatgtaaagtgtgatatacatgttactatttctttgctccttcattcagaatgtaaaattttctacccaatggttttgagattgctgatat

SEQ ID NO: 26248 - DNA, 2260 bp, Oryza sativa
  ref <308>: DATABASE ACCESSION NUMBER: AK101690
  ref <309>: DATABASE ENTRY DATE: 2002-08-28
gatgggagatgcggggcgcggcgcggctactcctgccactggtggtgctgctgctgcacgcagcacgcggatcagcgggatcgacgggcggcggaggcaacggcagctgcacgcagagctgcggccgcatgagggtgccgtacccgttcggcttctccagaggctgcacggttcagctcggctgcgacgacgcctccggcaccgcgtggctcggcgggacgcgcgggctgggcctgctcgtgagcaacgtgacgccgcgcgccatcgtcctcaccctgccccccaactgctcccgcccgctcaacgagtccctggatgcgctcttcaccgacaactacgcgcccaccgcgcagaacgccctggtcgtgagctcgtgcgacccgcaggccgccgcccgcctcagcaactgcagcatcccacccgaggcctacctcgagaagagctgcaattccatccgctgcgtcttaccttctaccaaagccaacgtcgacgggacaaacgtcacagaccctttcttgaatagaagcgagatgcggcggctcggctcggactgccgcgggctcgtgtcggcgtcgatctattcgaacacggcggggccggcgctgcagctgaccgcgctggagctggattggtgggtgcaggggcggtgcggctgctcgagccacgccatctgcgacgggttcaccccgccgtctacgcagaaggaggcgttccggtgcgagtgccaggaggggttcgagggcgacggctacaccgccggcgccggttgccggagagttccaaagtgtaatccttcaaaatacctatcaggatcatgtggcaagttggttcagatcggccttcttgtggcaggagtcttttttggagccatggtgatgggcatcacctgcttggtgtaccacctgctgcggcgccggtcggcggccctccggagccagaagagcacgaagcggctgctgtcggaggcgtcctgcacggtgcccttctacacgtaccgcgagatcgatcgcgccaccaacggcttcgccgaggaccagcgccttggcacgggcgcgtacggcacggtgtacgcggggcggctgagcaacaaccgcctcgtggccgtgaagcggatcaagcagcgcgacaacgccgggctggaccgcgtgatgaacgaggtgaagctcgtgtcgtcggtgagccaccgcaacctcgtccgcctcctcggctgctgcatcgagcacgggcagcagatcctcgtctacgagttcatgcccaacggcacgctggcgcagcacctgcagcgggagcgcggcccggccgtgccgtggacggtccgcctccgcatcgccgtcgagacggccaaggccatcgcgtacctgcactcggaggtgcacccgcccatctaccaccgcgacatcaagtccagcaacatcctgctcgaccacgagtacaactccaaggtcgccgacttcgggctgtcgcggatgggcatgacgtccgtcgactcgtcgcacatctccaccgcgccgcagggcacgccggggtacgtcgaccctcagtaccaccagaacttccacctctcggacaagagcgacgtgtacagcttcggcgtcgtgctcgtcgagatcatcacggccatgaaggccgtcgacttcagccgggttggcagcgaggtcaacctggcgcagctggccgtcgacaggatcgggaaaggcagcctcgacgacatcgtcgacccctacctagacccgcacagggacgcctggactctcacgtccatccacaaggtggccgagctggcgtttcggtgcctggcgttccacagcgagatgagaccttccatggctgaggtcgccgacgagctggaacagattcaggtcagcgggtgggcgccgtccacggatgacgccacattcatgtcaacgacgtcctcgctttgctcgtcggctccatcacgttgcacggacaagtcttgggggaccgctaagagcaagaggcaggccgcggcaaacgcagtggtaaagcaagagacgacgaagtgtgcagtcgccgactcccccgtgtccgtgcaggagagatggttcagcgataggagctccccttcctcaaatagcctgctgaggaatagctccctgaactaactcaatcaatgtccttgtcatggcattttaggtgtaagtagcattagaacgatctgtaattgatgcaatgatcccttgtgcatcgattgtcgatgtttatatctgcaatattgaatatggggttatacgtcgtggtc

SEQ ID NO: 26249 - DNA, 1622 bp, Oryza sativa
  ref <308>: DATABASE ACCESSION NUMBER: AK101691
  ref <309>: DATABASE ENTRY DATE: 2002-08-28
ggggcccttcgctcctcttcctcgcgagtcgctggacgaggtcgccgccggcgaccctcaccgccgtcgccgtcggtcgccggctcgtcgcccctgcttccttcgctcgctgcccgcctcatccacgggtctcctcccccttgccgaatcctagggatttctccgcgtcaggaggcctcctccccttgcccgagactagggtttgctccgcgtcgaatccgcgcaccacctggacgccgccgccgcgatgcagaggtacgggctgcagctccgcacgaagccggcggcgtcctcgtcgtcgcgggcgccgccgccgccgccggcccgccccctggcggccttcgccgacgatggcgacgatgacgtggaggccgacatcctccggcagtcgtacaagaagcgatcccagcagaaggtggaagagcagcagaagaaggcgatggaagaggatccctcggtgttcgcctacgacgaggtttatgacgacatgaagcagaaggccgccctccccaagatgcaggacagggtagttcgcgagtcaaaatacattgcggcacttaaggagaaagccgaacaacgtaaacgagagcaggacattatttatgagaggaagcttcaaaaagagaggagtaaggaagaccacctatatggtgacaaagacaaatttgttacatctgcctacaggaagaaacttgaggaggagcggaaatggctggaggaagagaagcggcggcagcttcaagaagaaaaggaagatgttactaagaagaaagacttgagtgatttttactttggtcttagtaagaatgttgctttcggtgcacagacacatgacaatacaaaacatgctaaacctgaaaagttagacgagaaagttcaagatgctaaaactagcaaggttggtgctgaagtatccgatcgctctcctaagcacaaaagggactccggtgaaggagcagagacggccaatgaaagtagaagtgtggaagaacctgctacaactcaatcaagggattcagctgctgctagatctaccgagaaaaatgcagatgtttccttggatgctcctcagacccagacaccagaaaatacccaaccagctcctcagacccagaatccacagaatactcaaccagcacaggtcacggatgaacactataagagaaatgctgatgcacttgctgctgccagagaaagagctctggcgcggaagaaagccaaagcgcagcagatatgaagtacgaggcagagatactcaccgagttttttcttataggctaaggtcatcatattcttgtttgaggtttcgggaagactgtaaaatgatggatggtttcacccttctagcatttccaggagataatccccttggtttgatctgcatgatgctctaccttgcttgatcaaaatatatgtgcaggcaacccttcaacgttagaatatctcgttcggcttttctgaacatttgttctgctgtaagatgggaaataacttagcacagtgaactgaaggttgtatgcatatgttctcattcatgtataccgttgtacttttgtaacttgagtgattgaacgcgatatgatttctgcaatggcacaaattactactactagttacactcc

SEQ ID NO: 26250 - DNA, 1603 bp, Oryza sativa
  ref <308>: DATABASE ACCESSION NUMBER: AK101692
  ref <309>: DATABASE ENTRY DATE: 2002-08-28
gatgtgtgtcggataggaaaaatatcgctcttgccctttgcagtctctgctttgttttagagagaggccaggcgcggcgtggcggcgaggcggcgaggcggcgccggcaaggccgccgacctcgcctactgggagagcgcggcgaggatgatcgtcgacgcgtcacgctccggcaaggtcgtcgtcgagaagtccaccgtcccgtcaggacggccgaggccatcgagaagatcctcgcgcacaacgcccatgtcgtcgagttccaggtgctctccaacccggagttcctggcggaggtcacggccgtcgctgacctgcgttctcatcggtggccgcgacaccgccgccgtgcaggcgttgaaggacatgtacgcgcaatgggtccccgtcgaccggatcgtcaccaccaacctctggtcggcggagctgtccaagctcgccgtgaacgcgttcttggcgcagagggtgtcatcggtgaacgccatctccgcgctctgcgaggccaccggcgccgacatcacggaggtggcgaccggcgctgcgcagcgggcgcaggttcaactgcggcgggcgacagcttcggttggaacggctcgacggcgatgcggagctccgggagaacggcgacagctcaaacgtctccaagatctagcatgcatgtgtgtccacgaggttagtgaggccacatggatggtgtgtgcgcgaggaattggacaatgactcaccggaggaggcggaatcgacgtttgacgccggcggccagagttggagaagatgataccgttctccgtccatggtgcatcaatcttgggggttcttgaggggttttggtcgtggtgatgagacgacgatggtggcgcggcggctcaacttggcgtggtccagatcgacggggaggaagatgatgtcgtggcggcgccgctccggtgcgcgttccagagcaccgtgggcatgacggcgttccagagattacctgttgcccctgaatttgaaccaggtctcagcgcattgcttatgggcgcaggagaggtcgtccttgcaggagcagccgaggaacatgctggagccggactcggcgacggcgctgtcgaggccgaggtggcagatgcggcaattcctctcggccgtgtccgggctggccttggcgatcgtcaccactcaccacctgctcgtcgtcgttcaccattgctcatgccaaacaaacctaccaaaaaaacaattcgagaaaaaggaaaataatcactcgaaattgcttctataccaaatccggacaagagcaaagaagggagcaaacttgttcaaagggtaacaaagtcattttgctgcaccgttacccaccgttaggaaaaaaacggtcggaatggtgtggaggacgcgataaagttcgacgatattatagagggaggctcgaactttttagtggcacaaagtcagccaccatcttttttaatggcacacagggaaagacctctaaagtatgcaggtttagtagaatacacgaagttgtatatagtaatgtagtatctgtaaaaaaataatggagatgagaactgcatatatatattatctctgtacttgcgggtatttatattgacttgccacg

SEQ ID NO: 26251 - DNA, 697 bp, Oryza sativa
  ref <308>: DATABASE ACCESSION NUMBER: AK101693
  ref <309>: DATABASE ENTRY DATE: 2002-08-28
gaccaacaagagagaggaggagtggattcatcgatcgagaagtcgaggtagtacatacgttggattggattggaggaggagaatgcctcgcggtgggttctcggggtcgataagctcgcccaggatcgacgtcgccatcgacatggggaaccccttcctcaaccgcaccgtcgacggcttcctcaagatcggcgccgtcggggcgtgcaaggtcgccgccgaggacacattcgactgcctccacagaggggatgtttcaaagcacaagcttgagcatatgctgaagaaaatgtgcaaggagggtgcctattggggtactgttgctggggtgtatgtgggcatggagtacggagtggagaggattcgtggtcgccatgactggaagaatgctatgattggaggtgctttaagtggtgctctgatctctgctgccagcaacaaccacaaagacaagatcatcaaggacgccatcaccggaggcgctgttgcaacagctgtcgagttcatcaactacctcacttagtcatgtaactgcgtttttgcagtggcttttgttggacagcaagaataagagcttcttcactgaagccatgttcagtttaataaaatgttaccttgttcatccctgcttcgttccctgcacttgtgatctcagtacttattctgagtaattattctcctgatattcgtggcttgc

SEQ ID NO: 26252 - DNA, 1597 bp, Oryza sativa
  ref <308>: DATABASE ACCESSION NUMBER: AK101694
  ref <309>: DATABASE ENTRY DATE: 2002-08-28
ggaactcctcccccattccccaaccaaaccccttccccttctcccctcactctgctcccctcgaaacctagggttagggtttcggcccccctcctccccaccggcttccgaatccacccgcctccgccctccccctcccgccatggccgccggctccatcgtggtggacttcccctccatgggcgccgcctgctgcttctccagcctcgagtccctcctccgcgactccacctcccgcttcctcgccgcaggcgcgtcacgcgccgagctgcagaaggagctcaggatctgggcagtgagctccatctcggtcttccagaaccagcaattcttcggggttctgctgaacatgctcgtgaatcctccgctacctgtttattcactactgagtgctgatgatgaaatcttggtgagagatgtcctttatgatgctctgattttggtggattattctttcattaacaaaggagcaggagttgatcaagctgatagctcccttttgcccctttatgtgtcaagattgcttatcactcatgatgccatcaatgacgccaggagcaaaggtgatcaaggaagggcgatgtctttcatgaatgccttcttcacttcaaacatccccacttattttgccaagtgcgctactagtcaagttggcttcaaccaactcagcaaaccagctgctatcacacctcaagctcttctcaagtggcttgtagatctggaagataagggcttcaaagtatttggagagaatgtttccaggattagggagaggctgatgtatgacgaggtcaagaatggttaccagagcaggatgactcactcagatgctgaccttttcttcattgacaagcagagcggtggggaggttatggacacaagagctggtgaggatgaagaagctgttgagatggaaacagcagacaatgcttttatggctgctgctcagtctatgaaggcgatggctaatggcatgaggaaaaggaaggattgcggggctgaagacgcaaatgtggtcaagtttgtgaagtacaaggttgaagacagctcagtgaaggattacttcttgtcggcaaataatggtatgagcagtggtagtgaggtagagaatccacagtctgatgatgagatggaagaaactgattgatggatagagaggaaaccatccgctaatgcttacttgggagagtcttttggcgagtctggagttgggacgattgctgttgcttcaggttccccttctgtaggatgtcatgcagcttctgtctggatgatgaatgaagcgggattctaggataataatctgcaacgcagagcccgaccccagcccaggcttaccgatatagtagtaactgcttagctaacttagactcgatgcatgatgctacaaactatatatcatgttctcttctatatgcaatagagactttaaaatgtagatctactttaaagacttctgtaagagaagagtaccttttatgttatcccacggaacatcttttaagttagtgaaatcttagcatttgtgtagctgttacgattagtgtttctacattgcaacattggcatgttctgtgtagagttgctattttctgcg

SEQ ID NO: 26253 - DNA, 2265 bp, Oryza sativa
  ref <308>: DATABASE ACCESSION NUMBER: AK101695
  ref <309>: DATABASE ENTRY DATE: 2002-08-28
gcctctcctcccccctctctctttctcggcgaggattggctgtgtgattagagaatggggccaaagagagcgaagtctatgccaagtcgtaatcgtgctgggaatggatgacaaagaatcacacagtcacgagctagaatgatatgcgctttttagtccatcaagaagaagtgattggtttgtgatcggtgctcgcatcgtcgccatgggaagtgcttgctctaggaagagaggccagctgcttgttgatgaggaagatctctacagtgcaaggttctccaagagcagcagcttcaagtggctactgcacaccttgccccgcagcggctctgatgtacacaggaaggtgcagggaccagtgcctgtgcggtgcccatcgctaatggagctctgtgtggccaaagtccgcgaggatattgggaagtattctgatttctcgctgctgcctagagatcttagtcagcaggtatttaatgaactggtggagtggaacattctcactgaagagttgcttggagcttttcgtgattgtgcattgcaggacatctgtttggcagactaccctggggtgagggatgcttggatggaagtagcggcttctcaagggcaatcattgttatctgttgatatctcttgctctgatgtgactgatggtggactgaatcaactcaaggattgcatcaacttgcaaagtttgtcatgcaattactgtgatcagatatcggagcatggacttaaaacattgtcaggcctctcaaatgtgacatccctgagctttaaaaaatgttctgctgttactgctgaaggagctaaagcctttgcaaacatggttaatttgggtagcttggaccttgagcgatgtccgaagattcatggtggacttgttcatttaaaaggcttgagaaaactggaaaagctaaatttgaggtattgtaatggcatcacagattctgatatgaaacatttatcagatcttacaaatttgagagagcttcaactttcttgctgcaaaataagtgatcttggtgtttcttatctaagaggtctatcgaagctagctcacctaaacctggagggctgtgcagtaactgctgcttgtttggaggttatttcaggattggcttcattggtattgttgaatcttagtagatgtggagtatatgacgaaggctgtgagcatttggaaggtcttgtcaagttgaaggttctcaatttagggttcaactatattacagatgcctgcttggttcatctaaaagaactgatcaatttggagtgtttgaacttggactcatgcaagattggtgacgaggggctagcacatttgaaaggacttctgaaactaagaagcttggaactttcagacacagaagttgggagcaatggacttcgtcatctctctggcctacggaatttgcagagcatcaatctctcttttacattggttacggacattggcttgaagaaaatttctggcctgaattcactcagatcccttaatcttgataatcgccaaatcacagataatggtttggcagctcttacatgtctcactgggttgacacaccttgatctatttggagctcgtataactgatgctgggacaaactgcttgaaatatttcaagaatctacagtcccttgaggtctgcggtgggttaattacagatgctggagtgaagaatatcaaagacctcaaagctctgacgctgcttaacctatctcaaaatggcaacctcactgacaaatcattagagctgatttcccgcctcactgccttggtctccctgaacgtgtcgaactctcgggtgtcgaattctgggctccaccatctgaagccactccagaacctgaggtccttgtctctggagtcctgcaaggtgaccgcgattgagatcaagaagctccagttggctgccctgcccaatctcgtcagtgtgcggcccgagtaatctggtagctgcacatgtgtccacatgtaaatatccacctgcttagagcaggacaaatgtacatattcccacaagaacaagctcgagtgatctgtacgtcagtcctgcttgtatcggtgtgtctggtcgccctggtgctgaagggtctgatggatggcctagtggtgaagggctggcacgtatttaggccgtgtaaatatgtagcggtgctgatgggaaggaacaactgtaaatatggcgtgcttcctctgcattttcgatgttatgtaatgtttcgtgttatcgtgttaatgaactggtattgttgcttgacc

SEQ ID NO: 26254 - DNA, 1739 bp, Oryza sativa
  ref <308>: DATABASE ACCESSION NUMBER: AK101696
  ref <309>: DATABASE ENTRY DATE: 2002-08-28
ggttgttttggacgaacgcgagctgacagaggggagagagagagagagagagagagagagagagagtcagagagatgcggcgttgcagttgctggcagctattgtggctggtgcttgtgtgctcatggcggatcgctgcagctcaggctcaggcggcaccaagaaccgatccaaccgaagcggcagctctgaacacaatcctgggaagatggggcaagaaagcatcatcagagtggaacatcagtggcgagctttgtagtggcctggcttccgacaagaccaactgggatgactaccccaacatcaacccatttatcaagtgtgactgctcctacaataacaactctgtctgtcacattatcaaattgagggtatataagttaaatgttgttggtcaattaccttcagagcttcagaatttcacctatatggaggacctgaacctggcttataattacttgagtggtgtggtgccatccttcattggaaagtttacttccatggaatatttgaacttggctttcaatccattatccgggcaacttccgaaggaaattgggaatctcacaaatcttctcatgttgggagttagctttaacaattttacgggtgaacttcctgaagaactgggaaatttggtgaaacttgagcagttgtacattgatagttctggattcagcggtccattccctttgacgttttcaaagcttcagaggctgaagatcttgagggcacaagataatgatttcacaggcaagatacctgataattttggcagcatgagtagtttggaagatatggctttccaaggaaattcatttgaaggaccaatcccagcaagtttgtcaaaattaaccaaattaacaaacttgcgaattggtgatatcgtaaatgggagctcttcactggcttttataagcaatctcacctctttgagcaacatgatattaaggaactgtagaatatctggtaatcttggactagtagatttctcgaagtttgcaaatctaacatatctggacttgagttttaacaatttcactggccaaattcctcaatccatcctgaatctgggaagtcttgaattcctttttcttgggaacaacagccttacaggaagtttaccagatccaataagctcttcgttaaaaacgttagatttttcctacaaccagctcagtggaagatttccttcttgggtcaaccagaacaatttgcaattgaatttggtggcaaacaactttgttcttgtgggcactaacagcagtattctaccttcaggtctaggctgcctccaacaagacactccttgtttccgaggatctccagaatattactccttcgcagttgactgcggcagtaatagttctacgagtgcctcagataatactatttttgaagcagatcccacgagccttggcactgcagcatattatgtcaccagtcagacaagatggggtgtcagtagtgttgggaacttcttccagggcacaaatggaatggatagaatatatagctcctccaagcattttcagaatactgttgattcaaaactgtttgagactgctaggatgtcaccttcatcactgaggtactatggtcttggacttgagaacggaaactacacagttctgcttcaatttgcagagttctcttttacggaaacaccgacttggcaaagcttaggaaggagagtttttgacatatatgttcagggtgcactgaaagaaaagaatttc

SEQ ID NO: 26255 - DNA, 984 bp, Oryza sativa
  ref <308>: DATABASE ACCESSION NUMBER: AK101697
  ref <309>: DATABASE ENTRY DATE: 2002-08-28
ggtcttcctcctcactctctccagcttccctctcctcgagctcgagatctcttcctcctcctcgatcgcgtccatccatggcggcggccaagaaggagaaggaggaggaggaggaggcgtctaagctccagctgaagccggcggggagcaaggtgttctccaagctgctgtccagggagagcgccgccgcggcgccgtcgttcagggtgtactacggcgtcgcctccgcgggctccgtgcccttcctgtgggagtcgcagccgggcacgcccaagaacgccatgtccgacgccgtgctgccgccgctcacgccgccgccgtcctactacaccgccggcaaggtgtccgccggcggcggcggcggcggaggaggaaggaagtatgggaagcacggcatcctcaggttgttcgtgctgcccaagatcaggctgcggagaggcggccggccggtgtcgggctcgccgacgtcgtcctgcgcctcctccacctcgtcgtcgtcgtcgtcggcctcgttctactcgtcgtactcgctgtcgttcaggagcacgcagtcgccgacgtgctcgtcgatgaggagcctgcaggggcacggcggcggcggccgcgcgttcggggacgacgacgacgatgacgacgacggcggcgacgacgacatggcggcgtcgacggcgtgcttcagggtgcggcacgagagcttcagggccatcaagaactgccgcgtcgccatgacggtgaggagcgccatctcgtcggtggccgccggcgccggcgccggcggccacggctctagcgccgccgtggcgcagaaggcggcgtagcctctcctcttcttgcctcgtagttcacgctgtctgtcactgttactcggctgctgtttcaacttggggtgtaatttgcaggttttaacagtgttctatttaccatatgcatatatatgtggctttttcatggagtgatatttatggaagagtttaattactatct

SEQ ID NO: 26256 - DNA, 1453 bp, Oryza sativa
  ref <308>: DATABASE ACCESSION NUMBER: AK101698
  ref <309>: DATABASE ENTRY DATE: 2002-08-28
gaccgccatcacgcgctcatgtggcgcagcgcagcgcagtggtggtggtggtgccctcctcctcctccccctcctgctcgctcctcctgcgatctctggtagattccctactccacgcactcccacgcgagaggacccggaaaagtcgctcccctttccgccgcccaaatccgcctttccctttgtatcgcgtcgcgtcgcgtcgggtcgggttgggtcgccactgccacttccacttccacttctcccccctcagttgggtggtggagcgagcgtggccgcgaggggacgcggaggggcggcggcggcggcgattgttcgcgggatgagcagcttcggcggcaccagctccgtcgcctccggtggtgggaagaggctcgagtacgggcggacgcatgtcgtgaggcccaagggcgcgcacaaggccaccatcgtctggctccacggcctcggggacaacggagccagctggtctcaactactggaaacccttccccttcccaatataaaatggatttgccccaccgcgcctacaaggccagtggcagtttttggtgggttcccatcaactgcatggtttgatgttgctgatctttcagaagacgctcctgatgatgttgaggggttggatgcctcagctgcacatgttgcaaacttattatcaactgagccagctgacatcaaacttggtgttggtggctttagcatgggcgcagctaccgccctttactctgcaacctgctatgctcatggaaaatacggaaatggcaatccatatcctgtgaacttaagtgtgtctgttggtctcagtggctggcttccttgtgccaggtctttgaagaacaaaattgaaagctcacaggaggctgcacaaaaggcttcatccatacctcttttgctttgtcatggaaaagctgatgatgtagttctctacaagcatggtgagaaatctgctgacgcactgaagacaactggattttcaaatgtggtgttcaagtcctacaacagacttggacactacactgttccggaggagatggatgaagtctgcaaatggctcaccgcgaacttgggggtcagcagctcatcgtcggcttgattgaagaattgagctgtccgaataatacctgtggttgttccaaacaaaattgagaggtaaatggttgaatgaatagcgaagaacttggggcttgggtatacggccatggggtagcctggcgtgtcatcatgcggacatgcctcacggcatcttaactagaactcttataatttccacagtttgggtctttgttttgtttgtttcccttccctcttaaagcaggggacggcatcgtggtgtattatttgttttggttagcacggatgtttttgtttggtacgccgtgtgttcttccgattgggtcagttgtatgtttcctttatgagttatgagatgcattgggattttgggttc

SEQ ID NO: 26257 - DNA, 2275 bp, Oryza sativa
  ref <308>: DATABASE ACCESSION NUMBER: AK101699
  ref <309>: DATABASE ENTRY DATE: 2002-08-28
gcttgcaaagaatcctgcctcccccgccgacgcctcctcccctcccccgcgatccctccgccgccgccgccgccgaatccggcgtccccagcctaggcgagatttgggggcgcgcgatgaaggagaagcgcgggctggaagccgcggcggccggtggcgacagccaccccgaggccaagcgcgcgcggcctcccgcactggccagtgttattgttgaagcattaaaggtgtatagtctgcagaggctttgctcatcactggaaccaattcttcgtagagtggttagtgaagaagtggagcgtgcgttgggcagactgggtcctgcaacaataactggaaggtcttccccgaagcgaattgaaggtcctgatggaagaaatctgcaactccagttcaggacaagactgtctcttcctctttttactggaggaaaagttgaaggggagcagggagccgcaattcatgttgttttgcttgatgctggaactggttgtgttgtatcttctggacccgagtcatgtgccaaacttgacattgttgttctagaaggtgatttcaacaatgaagatgaggagggatggtcgggagaagagtttgaaagtcatgtagtgaaagagcgtgaaggaaagcgccctcttttaactggtgatgtacaagtcacactaaaagaaggtgttggcactgtaggggagcttacattcacagataactctagctggataaggagtcggaagttccgacttggtttgaaaatttcctcaggattttgtgagggtattcgcatccgcgaggcaaaaactgaagctttcatggttaaggaccacagaggagaattgtataagaagcactacccacctgcgttgaaagatgaggtctggaggttagaaaagatagggaaggatggatctttccataagagactgaacaaagctggaatttctacagttgaagacttccttaggcttgtggttcgagatcctcagaagttgcgcagtatccttggaagtggtatgtctaataagatgtgggatattcttgtcgaacatgcaaagacttgtgtcttaagtggaaaatattacatatattattcagacgagaatagatctattggtgctattttcaacaacatctatgcattctgtgggttgatttctggcgagcagttctattcatctgaaagtcttgatgatagccaaaagctctttgctgatgcattggttaagaaggcatatgataattggatgtatgccattgaatatgatggtaaagctctcttgaactctaaaccgaagaaaaaggctgcacccactggacacgttgagacacatcctcctctgagtcaacctgcttcatacgaacaacgcatctcatcagcgagcatgacaggaccatctccagcaggaggaagtggaactggaactgattccatagggtatgatggcaaccaagcagctacacagccatctcaacttcaaagtacatctgccaatgtccctgtgccatacgatgacaccttttcatttttaccgcctagtatgttgatggggtctgataatcaagaaaccggaaatgatggcatgggcctggaactaggccaattgcaacaagcaatttcacagagtcagtcgattcagccagcaaatgttggctatgatgattggactcgaagtcaaaacggtcagttcgctgatgacttcaccgaagatattcgcatgaaaagccaccaaatgctcgagagcgaagacatgcagcagctgctcagggtcttcagcatgggtggagcgtctaccagtttgcaggaagacgccttcggcttcccgacgtacatgccatctccattaccaaaccttgggttcgaaggtgagcgcacccgttcatctgggaaagctgttgttgggtggctcaagataaaggccgccatgagatgggggattttcgtcaggaagaaagctgccgaaagaagggcgcagcttgttgagctggatgattaacaacatgttaagcgtgtattggctaccgttagatgctattaatgttgaaatgttaataccatcagatgctctaaactaggttttgggactcatgctgccttgaaaggcattgaaacaaaccaaccgattatgtacagcgggtagttctgctttgttgtaaaaacatctgaaatgtttgcgtaccattttattttcctcgtttgttatagattgtgcagattataaacaaaacaatgtgaattaacgcggatagtatgtgtatggccgatgtgttacctgtaggc

SEQ ID NO: 26258 - DNA, 1499 bp, Oryza sativa
  ref <308>: DATABASE ACCESSION NUMBER: AK101700
  ref <309>: DATABASE ENTRY DATE: 2002-08-28
gacgctacccgaaacttccagaagcaaccagacaccacggtgtatccaggccagatctgcgcggccgccggcggcggcggtggcatggctgaccagaccgctgctgccgttgtcgtcggaggaggagcggcggcgacgatgggggagccatctccacctccgccggcgccggcagcggaggcggcgggggtgggggtggggcagcagcagaggacggtgccgacgccgttcctgaccaagacgtaccagctggtggatgacccggcggtcgacgacgtcatctcctggaacgacgacggctccaccttcgtcgtgtggcgccccgccgagttcgcccgcgacctcctccccaagtacttcaagcacaacaacttctccagcttcgtccgccagctcaacacctacggatttaggaagattgtcccggacaggtgggagttcgccaacgactgcttccgccgaggggaacggcggctgctctgcgagatacaccgccggaaggtgacgccgccggcgccagcggcgacgacggcggcggtcgcggccgcgatcccgatggcgctgccggtgacgacgacgcgggatggctccccggtgctgtccggcgaggagcaggtcatatcctccagctcgtcccccgagcccccgctcgtgctgccgcaggcgccgtccggctccggctccggcggcgtcgcgtccggcgacgtgggggacgagaacgagcggctgcggcgggagaacgcgcagctcgcgcgggagctcagccagatgaggaagctctgcaacaacatcctcctcctcatgtccaagtacgcctccacccagcagctcgacgccgccaacgcctcctccgccgccgggaacaacaacaacaacaactgctccggcgaatccgccgaggcggccacgccgctcccgctccccgccgtcctcgacctcatgccttcctgccccggcgccgcctccgccgccgcgcccgtatcagacaacgaggagggaatgatgagcgcgaagctcttcggcgtctccatcggccggaagcgaatgcggcacgacggcggcggcgacgacgaccacgcggcgacggtgaaggcggagccgatggacgggcggccgcacggcaaggacgaacaatcggcggagacgcaggcctggcccatttaccggcccaggcccgtttaccagcccatccgggcctgcaacggatacgagtacgaccgagccggcagtgaccaagacggttcaaactctacctaaaagttgtgtgttagacccgtctcgtttaatcaatctactctagcaattaactacttctactcctcgatagaaaaagaggcaatcaaccttgggatttacctagtcccaatgtctttgtagtgttcttttttacttgtagtatgtagtactcctactagttttttttttcagattattatcctttgtatatatactgctgctgctagtgagaaggcataaaagatcagatcgagttcacttgc

SEQ ID NO: 26259 - DNA, 2755 bp, Oryza sativa
  ref <308>: DATABASE ACCESSION NUMBER: AK101701
  ref <309>: DATABASE ENTRY DATE: 2002-08-28
gaggcaggcagcaactacccgaccgatcgcctcctcttcctcctccttcccacctcccgcccacgcctccagatctccgcgagcttcgaccgccaccgcgaccgccgccgcagcaagcagcgtcatcccccgcgcgacgccaggcatggcggccttcaccaagctcgaggactcccccatgttccgcaagcaggtcaattctatggaacagctaagcgatgaactgaaacaacggtgttcaaatcttcataaaggatgcaaaagattcatgggatcacttgatgaaggatacgcgggagatctaacatttgccgatgctctagaagcatttggtgctggtcaagatgatcctgttagtgttgccattggagggcctgtaatgtccaagttcactactgcttttagggagcttggaacatacaaggaactccttcgttctcaggttgatcatatgcttagtgaacgtttgatgcaattcattgatgtggatttgcatggcgtgaaggattgtcgtcagcgtttggatagggctacagtggggtatgatcaggcacgtgaaaaatttgtatcagtacggaaagggactagagcagaagtagtgacaggacttgaggaggatctacacaatgccaagtcagctttcgaacgatgccgctttaacctagtgcacgcactttcaaatattgaagcaaagaagaagtatgagttcttggaatcaataagtgcagtgatggatgcccatttgagatatttcaagcagggatatgaactactgagtcaaatggaaccattcattcaccaggttctaacatatgcacagcaatcaaaagaaatggctatcaatgaacaagataaacttgcaaagagaattcaagaatataggactcaagaggaaattgcgaacttgagaatggctagtaatgtggacacatctaccagtggtgatggtatccatgttgttggtcttcaatcctataaaaagattgaagccctaatgcagtcaactgccaatggcgaggttcaaataatcaaacaaggttatctctttaagcgttctgaaaattcacgagaatggaagagaaggttctttgttctcgacagtcacgggactcttttctactacgggaataaaggacaatcgcaaggagcggcatcacagcaaacagctggtgaagggactggtgtttttagtcgtttcagattcttgaaccaaaaggctccaactcagggtgacaatgcactttcgtgccacaaaattgatctaagaacttcaacaattaagattgatgcagaagaaaatgacctaagattttgcttcagagtaatctctcccatgaaagcatacactttacaggcagaatctggtgctgaccaaaaggattggattgagaaagttactggagttattgcatcactgcttaatttaccattcccaagacaggtgtcgtatggaaatctagaggcggaacatcatggttctgcaaattctgttgattctctctctcttgaggagaacaaaagtccagagggacatgatgatatattcaatcatctcaggaatattcctggaaatgacagttgtgcagaatgtcgttcaccggatcctgattgggcatctctaaatttaggaattcttatttgtatagagtgtcctggggctcacaggaatcttggagtccatatttcgaaggttcgatccttgcgattagatgtcaaggtatgggagccagtgataatggacttgttccatgaacttggaaatgactacactaattccatttgggaagctatgcttccgaaagaagatcaaggaataaacgagtttaatgatgctattcttttcattgaaaagcctaaacctactgatgctttttcaataaaggaaaggtacatacagacaaagtatgtcgacaagcttcttattgccaaagataccaatcaaattaccattgatatattggaggctgtaaggacgaatgatgtgagggcagcatatcgcattcttgtgttggctgatgtgagccctaacatgatatatgatgagttaaacaatgatgttcatcatgatccttcagtaacagatgggaagttatttgatccagcatcttgtgatgtaaaggatgattctgggaaaccagaaggttgtctacaaggctgttccctgttgcacattgcttgccaatatggccattctataatggcagagcttctgcttctttttggtgcggatattaataagcaagacttccatggacggacaccgttgcaccattgtgtccgaaggaaaaatgatgcacttaccaagcatctgctaaagaggggtgcaagaacaaccattaaagatggtggagggttgactgctttagagagaagaatggaacttggagcaataactgatgaagatttgttcattttatttgtaaggtgaaatgtcaagaacacaggtttgtagtaagcaaatgtctgtatctgatagagttgtaccagtttttttagtttatatagaatgaatacatttgtatcttattacggtgagataaaatctctgacggtctgacctttgcgcttctgtcgtgtactcgtgtgatcttgccagtcttctcagatcactctttgtacaacagttgtagcatagcatatagcatacatcaatcattcatataccaaagtttgtatcatttcctccatcatcaaacatgtaataacacgttcgagcaatatacccgcatgccattatcgtgcgattttgaaatcc

SEQ ID NO: 26260 - DNA, 1195 bp, Oryza sativa
  ref <308>: DATABASE ACCESSION NUMBER: AK101702
  ref <309>: DATABASE ENTRY DATE: 2002-08-28
gagcagcggaggctggttgggggatccgtggaattaatcgccgccgccgatggccgctgtgtggcggcgccgccgtttctcgactcctccgcagcgccgccgcaatcctctcccatcctccgcctcaacgacgtccgaggaggtgttcggtcggcttcttcagcgcccctcttttcgtcggaggttcgtctcttgagaggggagtcatcaccgccggttggttggtcgcccatggggacattggaggcaggtgcccacctcatcccttcatctccatgcttctgctgctagtgctagggatcttaaatcaataccaaatcgttcgttttagtgaaaatctcaggtaatgggcgtacacgtactagctatttcacctactggaataaagaactcaccttttttttttttgatgtggtggtgatgattctgaataatgtagtagagcagaatttgatatccatatcctcaagaggtatggagtagtacaaaagagagaaaaaaaaaacaatctattgatgaaactacgtgaacagaaaaaatcgtcatcattactactgatgcattttctggagctatatttcagcaaacagcaatgaacaatgagtcccatgttcttaaatattttcttagcaaattaatagtttgcttctactatctgttcccagaatgcatcgtaccgtaatattagtaaaacatgctccattgtttgtacgctctcatcttggcctgtgcaggacatacttcattgtatacacactctcagagtcttcagtgtacactcaagaaccctcaaggcagattatgtgcctaatgcaccagattacatttttactacatggtttttacttgctgagagtgaagcagcttggcgagcctcttgaattcctccctttatatcctgcttccaagtaaagactattaaattcttcaatcgttggatcactaagccatagccatctactattggcctcgcttcaacaatcaagtatcaagatgctatgtattggcttcacacgataggcgcttcaacaatcaatactgtcattctaagaccaggttgtaaacatgtaatgtgcatgcaagaaaagaaggtttccctgtatctgtttcatggttttatttttattccgtggctaattctgtatccaaaactataaacatgcagagggaatgtaatacttgatggtatcagtgc

SEQ ID NO: 26261 - DNA, 2128 bp, Oryza sativa
  ref <308>: DATABASE ACCESSION NUMBER: AK101703
  ref <309>: DATABASE ENTRY DATE: 2002-08-28
gagatctgtactccggaggcgaagggtcggagccactcgctacttgccgccgccgccgccgccgccgtcgtcgagggcgaggcagcggcgctccgcctcggctcgggcggcgcaccggcgcctctgagcggccacgccccggtctccgccatccgcccgtccgcctctccgttcgacctcgtcccgtggtccctccctacgccgccgtcgaccgccgtttctggtaatctcaggaacttgaaatggcagacgaggagcatgctccaacgtctaggaagagggttgcaggtacccaaatcaacaaggataatcctgagcctgatgatgactcaactgagcaagagatggggacatttaagagagctagtgaggaagtgatggcaacacggagaattgtaaaggttcgacgccagcaaccctcatcagctccttctaatcctttctctgcaatcagatttacccccagtgataccagcgcccaagcaactatccctgtctcagagcctcaaccttctgatgtcattacagcgaatgcaaaggatagttcaagtgagaaagctgatgagggaagcaatggcagtgggaaagatgctttacctgtaactgacaagagtgcaggttctagtgaggtagctgagacagaaaaggatggatcagatctgaaaggatcagatgaaaaagccaagtccagtgactcaattgaaccaccttctcaacctgttgagaccactgacgaaacaaaagacttggggggcggatcagtggtagctggagaggccaaggaagataacagcaaggcatctgatatcgaggacaaaacagcaaaagagggagatgctgaagaagaggatggagcaaatgaggctggagctgaagacaaaattagcaagggtgatgatgagaagaaagatggagatgaatcagagacaaaggatggatcgtctgaggagcagaaggatgctgataacaaggggcagtcgtcatcaccaacaccccttttctctttcaagaacctgtcgagtggccaaaatgccttcacaggactggctggaactggattttcaggctcttcattttcatttggatcaggctctaaagaaagctcgagtgctcccctgtttgggctaaagactgatggctcatcattcccatcttttagtattggtgcttcgaataatgggagttcctcccctgcgcttgcgacttcggcagaagctcccaagaaatttgctatgccagagggcccagttgaaactggtgaagagaatgagaaggccatattcacagccgactcagcattgtatgaatacttggatgggggttggaaagaaagaggaaagggggaactaaagttgaacatcccagtatctggtggcgagaggtctcgtctcgtcatgagaaccaagggcaattacaggctagttcttaacgcaagcctttacgaggacatgtcgctgaaggacatggacaagaagggcgtgacgtttgcctgtatgaacagcatcggcgactcgcagagcgggcttgccacatttgctctgaagttcagggataccagcatcagggaggagttcaaagctgcggtggagatgcacaaggcgaaaaaggcgtccggcacactcaagacacccgagaactccccgaaggcatcagatgattgaaggttgaagcccaactctcgccacaatgcaccgagtccatgaagtggaggagctgagatacgcttcttgttcttttgggggggtttatttaagtaacataccgtaccatgtcactacgctgccttaagatgatgatgcgcttgcatacggtttcctgtcgctgtttttggaacagtgggtagagacctgtgaaactttaaattaaaagtcctgaaatcttagtaagtggagagatgagactcctattgcctactgtgatgaccccagcggacactcactaagagtatgccgctgagtgtttgatattctatttggggatgagatctttatcaatcggtgttgtactggtgtatcatgtatccgtgatctgcagcgtcagcgtcgccttacctttaccttctactgttgctgataatcttttctttgagaaactttttgctgatgataataagagtaccttttgttgg

SEQ ID NO: 26262 - DNA, 1853 bp, Oryza sativa
  ref <308>: DATABASE ACCESSION NUMBER: AK101704
  ref <309>: DATABASE ENTRY DATE: 2002-08-28
gtgtttccactttcttccaaagccgaaaaatcgagagagaaagagcaaaaccctaacggcggcgctccgcccccttccgccgccggattcctcctcctccttcgtccgccttcgccggcgccgccctgctccgaaggagcccaggccttgtcgccgcgtcgcttgccccgccgccggtttcagcagcagccacccccaccaccatgtcttctcaggtcgacaaccgtagccaatctgctggaaagcgtgcccgcaccgacggtgggcggcgtgaggacgactgggtttgccccagctgccagaacgtcaacttcgccttccgcaccacctgcaacatgcgcaattgcaaccaatccaggcccaccgactatacgaaggatatgcagaaacctatgcagacaccgccgccccatttccccatgtcagggggatacatgagcccagggacgccgccatccatgtacctcgggggtggtgctcccccttatggcacctccctctatggcggacctgctttaccacgttatggtattgctcagttccctgggggttctggatatccatatggctatggtggccgcctgccaatggggagcccctatgggccgccgatgcatatggcagggcctccatattctgctggatccatgatgggaccaggtggaatgtatgggatgcccatggacagatatagcttgggcttacctgctggtcctggtccaatgggcgcgagggctggttcatattccgaggaaggatcccagaagaagcctgcaggagctgggcgtgataatgattggaaatgccctaattgcaacaacattaactttgcattccggacagtctgtaacatgagaaagtgcaatacaccaagacctgaaaaccaggggtccaaacctgatggtgcaagaggtccaaaaccaaagatgccagaaggtagttggaagtgcgagaagtgcaataacataaactatccattccgcacaaaatgtaaccgtccaagttgcgaggctgaaaagccatttcagacaaacaatgctaatgagtcatctgctgatcaggacaatcagttgttgtcatgtaatattgtgaagcttttatcaaagctgcaactttcacatgactttcgagacaataatgagcaaacaaaggtggatcctcccggtggccctgctggagtaccgacaagttcgcacgccctgcgaatggcagctctcagtgagttgcagaacagtgttaagagctgatacccttttcattttccaaacaaggtgagaactttaatccatgtggatgtgcttctatcaggagcagctgacagtattgcatgcagtgatcttgctaaggaagttggagatgggaaacatcgtgtgatggccagccttgatgtaagaatgcaaatcagtcttactccgtaccatatctgtgtggagtgtgcacaccggaagcatagtcattttttgaatggtcgattgcttcttccacagtaaagtctataataccagtgtgcaggtgtttttttccctttctttcagtgtgaaggtgtttttttacccctttctttcgttcattcattctttttctttttccttgttgagacggtatcctggagcactttgtaatactctaatgtgcttcggaaagtagaatataagttgtgcttatgggcgggccaaaatgctttggccgttagttgcatgacagcctttccaacatgctgctgcctagccgtagttctcccaaaaatgaaaccatcttgagatccgtttgcggttgaactgaaattagacggtatctctggtttcaacatcatcctttaaaccctggatgaaagatttgcaatattcctgcgg

SEQ ID NO: 26263 - DNA, 1842 bp, Oryza sativa
  ref <308>: DATABASE ACCESSION NUMBER: AK101705
  ref <309>: DATABASE ENTRY DATE: 2002-08-28
gaatcacatattggagacagcgacgcgcccatctgatttagacgggaggacgccggccgcctgacttcctccctccgagactccttcgcggcgaaggctttacagagctgcaggcagctcatgccgttataatccccctcgcgactcgcgagccaagtgagaccaacccccaactcgacgatgaccatggaggcggagcgcgacggcgaggagcagcgccgccccctcctctcctcctcctctccgccgccaccgtcgccagcggcggaacatcagcatcagcaccagcagcagtaccagtacctgggccgcagcagctcgtcggcgctgcgcggcggcggtggcggaggaggaggaggagcgggctggggcgtggggccggaggtcagcgccgcggaggtcaggtccgccgcgtcgatctcctccgccagctactacccaccgccgccggctctccaccacgacgtctacccgccggacatccactccccgtccccatcgccagctgcccctactgctccgcaccctcacggaggattagcaattgttcctcaagggccgtacccgtatggcggcgaataccagccttctcatgatggcagaagggatgtactggatgaggtagagatccggcagctccttattgatcatgttgggcatcggtgctgctggggaagtaggcctgctcgcacatggaaaattacctctattgaggattgcaatgtatatgttggaactttggaaactttcatcgaggaaagggacactgtaactaacaaggaaccctatgatggtgggaaaatagatggaagagacaagggtcctgtgcttgcagtgtgggaacttgatctgaggtctgagtttcctctactgtttgtaccagaaaaagaagtaatggtcaagatccctcactcagaagtaattgaaaaatgcttagattgcgagagtcgtggagagataccatgtcctatttgcaatgctggtcaggagcacggattttacaaggcaaatcagatgacccgttgcagtgcatgtcatgggaggggtttacttgctcaccaagatggatctgatacagtatgtggaatgtgcagtggtaaaggaatgttgccttgtatagcatgtggatcgcgtggcctagtaacatgcaagacatgtagtggctatggttcccttctcgcaaaaagcactgctcatgttcgatggaagacactgtcagcaagaaaagtgagcgcaactaggggagctgcctctgtgcctgacgaagtattccacagagcccaggggattcagctatgcaacatacaggcgtaccagtgcactcctgcattcttcgccgattcgtaccagctcaaccagttctcctcagaagtcgtagctagccggcttccagttccaccgtccgcgagggtcatttccgagaggcacatcatctccgtcgtgcctgtgatccgtgtcacaatggctcatcgcaagcaatgtttcagcttctacgtcgtcggctacaatagggatgttttcataagagattatccttcgaaattctgctggggcctctgctgttgctttgagtggctgcggaactagttatttcttgccatgtgacaaaaatcgagtgtgcagtattttatagtattacatacggagtaaggcttgtgtataattatagcaaaaccgaagattaaagagggttgaatgaataagcataaccctgtgtgttatgcattttttacattacagaagctgtatcctcgtattctattactagggcttcgtccatgtagatcatatctgtaacaactgctcgggcatgaatcaaatcagttgtgaagactttcccct

SEQ ID NO: 26264 - DNA, 2410 bp, Oryza sativa
  ref <308>: DATABASE ACCESSION NUMBER: AK101706
  ref <309>: DATABASE ENTRY DATE: 2002-08-28
gctccctcgttgccgcgccgcagttgcagttgcagttgggaggcaaatctctctcccaacccttatcaaaccctaaaccgaaaaaatttaccccccaaaaaaatccgcaaaaacaaaaaaaacccaaatcggagatggcggcggcggcggcgcaggcgcaagcgcagcaggcggcgagctccgcgtccgagggcgggtccccggcctcctccgccgcggccgctgcggcggcggccgcctccttcccggcgacctcgctctacgtcggggatctcgacgtcagcgtgcaggacgcgcagctcttcgacgtcttcgcgcaggtcggcggcgtcgtctccgtgcgcgtctgcagggacgtcaacacgcggaggtcgctcggctacgcctacgtcaactacagcagccccgccgatgctgcacgagcgttggaaatgctcaacttcactcctatcaatggaaaacctatcaggatcatgtattctaaccgtgaccccagcttgcgcaagagtggcacagcaaatatttttatcaagaaccttgataagtcgatagacaacaaagttttgtatgatactttctgtgtgtttggaaacattctttcatgtaaagttgcaacagatgcttctggagaatcgaagggctatggctttgttcagtatgagcgggatgaggcagctcaagctgctattgataaactcaatggcatgcttatgaatgacaaaaaggtgtatgttgggcctttcattcgtaagcaggagagggataattctccaggccaggtcaagttcaataatgtctatgtaaagaacctgtctgagaatactactgaagatgacttgaaggaaatctttggaaaatttggaaccatcactagcgctgttgtaatgcgtgagggagatggaagatccaagtgttttggatttgttaactttgaaagtccagatgatgctgctcaggctgtccaagagctgaatggcaagaagtttgatgataaggaatggtatgttggaagggcacaaaagaaatcggaaagagagatggaattgaaagagaaatttgagaagaaccttcaagaagcagcagataagtatcaaaacactaacctgtacctgaagaacttggatgatagtgttgatgatgataagttgagggagctttttgctgagtatggcactattacttcctgcaaggtgatgcgggattcaaatggtgtcagcagaggttctggatttgttgcgtttaaatctgctgaagatgcttcccgagctcttgccgaaatgaacagcaagatggttggcagcaaaccgctctacgttgcgcttgcacagcgcaaggaagacaggaaagcaaggctgcaggcacaattttcacaactgaggcctgtcccacttgctccttcagttggtcctcgcatgcccatgtttccacctggtgttcctggagttggacagcaactgttctatggtcagccccctccagcgtttatcaacacacagcctggtttcggcttccagcagcctcttatgcctgggatgaggccaggtgcaggtccaatgccgaactttatcatgcctatggttcagcaaggacaacagccgcagcgtccggctggtaggcgtgctggtgctggtggaatgcagcaacccatgccaatgggtcagcaacagatgatggctaggggcggccgtggctatcggtatcctacaggacgtggcatgcctgatcctgcaatgcatggtgttgggggtggtgtgatgccatctccatatgagatgggaggcatgcccatgagagatgctgctgcgtcacagcctgtacctattggagcattggctactgcactggccaacgcagcccctgatcagcaaagaatgatgcttggtgagaacttgtatcctcttgttgatcagctggagcatgagcaggctgcgaaggtgactggcatgctgctggagatggaccagactgaggtgctgcacctgctcgagtctccagaggctctcaaggccaaggttgctgaagccatggaggtccttcgcacggcccagcagatccagacgaacgcgacgcctgaacagcagcttgcttctctgtcgctgaatgacggcgtcgtttcctcctaagcataacgacgacagcaatttttgatccatatctcagttatcttatctatctagaattgaaaacgacttggttacttggtttattggagttttagttttattggtagttgaactaggcatttaggcaatgcgcgtggattgggtattttgtttgctcggatcttttattttgctttataagttatcatatggattgctactttatgtcttctggtagcatcttttattttgtgggtgatgcatgatttagcagtcttgatctgcaccaaatgaagcaaactttggct

SEQ ID NO: 26265 - DNA, 2947 bp, Oryza sativa
  ref <308>: DATABASE ACCESSION NUMBER: AK101707
  ref <309>: DATABASE ENTRY DATE: 2002-08-28
gacaacatgtgctgtgaatttgaaaggggaaataccagctatggaagcagcgatagtgagtgcttcgacgggagtgatgcgttccctcctcgccaagctcgcaaaccttcttggtggtgagtacaagctacttaagtggctccgtagggagatggagttcctcgagagcgagctccgtagcatgagcatcttcttggagaggttggaggacacgcaaaagcttcacccccaaatgaaggattggagggatcgagtacgcgagttggcatacgacattgaggattgcatcgacgacttcatactacagcttgattccaaggatgcgaaggttgggtttgggcaaaagcttcttgcatcccgtaggattggccacatgattcgagaactcaaggcgcgtgtaatggaggagagtgagagacaaaggaggtacatgcttgatggcttggcatctgggcctagtgttcgtgtgaaggttgatccacggctatcggctctctatgtcgacgaggacagattagttggtattgatgccccgagagatgagatcattgggcggctgttggacaagcggagaagtgcctcagcaaaacaggtcatgacaatttccatcgtgggttgcggaggattggggaagaccacccttgccaatcaaatttactgcaaaatcaaaggaaaatttgagtgcgcagcttttgcgtcagtgttccaaaatcccaacaccaagaaggttttgacgaatattctttcccaagtggccactactgctgctgtggaagacgatgagcaagccatcatcaacaagctaagggaataccttagtgacaagaggtacattgtcatagttgatgatatatgggatatgcaaatatggaaatttattgaatgtgcgttggtcaagaactgccgtggtagcagaattatcacaacaacacgtatacatgatattgctaaattgtgctgttcatctcatggcgattatatttacgaaatgaagcctcttggagttattgactccaaaatattgttcgacaaaagaatttttgatccagaggaaaggcgcccaccgcagttgacagaagtttctgaggaaatattgaaaaaatgtggtggtttgcctttggcgatcatttccatatcaagtttgttggcaagcaaaccaaagtcaaaagatcaatgggacagggtcaaggtttctcttagctctacgcttgaaaggactccagacattgaaaccatggaatgggtgctatcactcagttactctgatcttcctaatcatttaaaaacatgtctgttatatttgagtatattccctgagggctatgagataaacagggaacgtttggtgagtagatggattgctgaaggattcatttacaaaaaacatggacaaaatccatatgaagtgggggacagttattttaatgagcttgtgaacagaagcttgattcaaccagcaaacattaagcctgatggtcagacaaatgcttgtcgagtggatgacaccgttcatgattttattgtgtccatgtcagttgaagaaaatttcgttacattatttggtggttcaaaattggtaccaaggtcacatggtaaggttcgtcgattatctattcaaaatggcggcattcaagaaaatattgtcacatcaacgcacttggttacatcgcaagtccggtcactaactttatttgctgtagaaatgccatctcttttaggttttggtatgttacgtgtattggacctagaagattgttatgcattagaagaccatcatcttacgaacctggaaaggctagtccagttacggtatttgagtataagaacatcacccattagtgaactcccgaaacaaattgggcagcttcaatatctggaaacactagatttaagagctacgggtgtggaagaattgccatcaaccattggtagactaaagagtttggtccgtttattcgttgattatcatgttaaattaccaaaagaaatcagcaatatgcatgcactggaagagctaacaagtttctcagccttgatgtactctccagactttctgaaagaactaggtcagcttacaaacatgagggtgctccgagtaatttgtgactgtgatagctttaaaggtgatgcaggaagttgcttggaaaatttagcttcttctttatgtaatctaggcacatataaccttcattccctttttgttgacatcaatggatatggtgaagacaacttctcactagatacatggcaacctgttccatctagactaagaagattttccattgaccggtggtgccccatcaataagattccgaattgggtgggttcactgatcaaccttgaagagttagtcctatatgtcaacaaaatttggcaggaggatttcgaattgctaggacatatgcctgctctgtcatctctgaccatatactcaaatactgcccttcaagggaggatcatcatcagtggattccattctaccaagtttttcaagttctattgcaatcctgcagggttaacctttgacgcaggaagtctgttaaagctcgaatgccttgatgtcataatgaatgtgttcaacacgaagtcttcaaatggtagctttgattttggcattcaatatcttaccaaccttagaaatgtctacattcaacttgattgtaatgggtcgactggtggagaattggaagcagctaaagcttccatcaagagctcagtaaacaaacttccaggacagcctaagctgaacttgagcacattgaatgaaaatatgttagtccatgaagaagctaattaattaaatggaaggggacgtaaatttcgagtacgaacattgcaggtatcaatttcggttttgatttttttttttttgcagaaaggaccagtaccaaaaataccatttgtaatttatagtctaacaattctttacccatcaaaataattctcc

SEQ ID NO: 26266 - DNA, 1629 bp, Oryza sativa
  ref <308>: DATABASE ACCESSION NUMBER: AK101708
  ref <309>: DATABASE ENTRY DATE: 2002-08-28
ggtgtattatccacagatccactactcaacgacaacaatgctccttcgatctgggcggcgcctcgccgccggcggcagccggcggcggcggcggcgcaccccgaggctctcctcccggcggaggttcccctctcaactcgtctcgccgctcctctcgtcgaccccgtccgagcgggagcagccccacctcctctccgggccagatccggtctcctcctgacgatggcgatggccagccaccacctcctcgtcggaggaggcgtggtgaacctccgtctccatctcccgtgccaggaacagcaacaagcgaagccgccgtcgcgggcctccccatccccgaggagatccaggaggaaatcctgctccgcctgccggccaactccgtcctccactgccgcgccgtgtgccggtcgtggcgccacatcgcctccacccacgcgttcctcctccgccaccaccgccgccagccggagttcccccttgtcacctccttccgaaaccccgcacccgctgaccaatggatgcccaactgcctcgacgccatcctcctccgatctgcagagcgccgcccaatcttcagtttcccgcgacccttttgtggaggtttccccatcacagcctcctgcgatggcctcctcatcgttggcgggtacatctgcaacccgaccacacgccaacgcgcgcccatttccaggtggacgattgacaatatcgtcggattataccggcatgaaccttccggagagtatcgcgtgctctacttcgcttcgtcagataccccttctgaggtgtattgcccgatttgctactgtgtcctcgcggtgggtagcaacaagccgaggcaaatcccgtgttcagtgacacccatggatgaggagatcataggagcaccgggcccgatgatctttggcaggccggtactcatccatggcaatctgcacctgcattggaagaaacggcggggaacacgctacaataggatcctagtcttcaatacggtggcggagtcattccggcaattgcgcccaccagctgtgaatcctcggaattatacaaggttacttgccatggatggcatgcttgctatgtccgttagcaaagaacgtgtgatggacatgagcatcttcatgttggaagactacgatcatgaggtctgggtgttccggtacaagattaagctgccaacaatggagatcaggcgtttccaagatcagggtgattggtgggcggaggttgtgtccgaggagggagatattcttgtcagttgttttggctggttgttgcactgtgacaaaagggtaatttggtgtccaaattccagtacaatgatgacttgccagcaatcagtcctcatagaatcaaggaaagccttattcagcacgcctttttcaaggaaggaacaaagaaatgatcctgattgatccatctcattttgtgccatgtgaaacgatgctgaagagaactttcctatgtgaaagacaccggtgcaaagactaaactttatatgttcttcgttgcgcttactaatttctatgtaagatgtacctagccgtcgctgtttgaggttactccagcatttgtagctctctgacaacattgttctgtttttaaagttacttttggttgccc

SEQ ID NO: 26267 - DNA, 1132 bp, Oryza sativa
  ref <308>: DATABASE ACCESSION NUMBER: AK101709
  ref <309>: DATABASE ENTRY DATE: 2002-08-28
aaatggagcgcgcagtgcgggagctgtgggcggagtcgcgggacctgctgggcctccactccccggacgacgccgccgccgccgacgccgcgatgccccgcgccgagatgcccccgacgccgctcgcgtttctccgcgaccacgtctcgccggggcgccctctcctcgtgtcctccgccgccaccagccactggccggccgcctcgctgtggccgaccgactcctacctcaccgacgcgctccgctccaccgccgtctcgctccacctcacccccgacggccgcgccgacgccctcgccccgcacccgcgcccgagccaccccggcgccaagtgcttcgcctccgcgcacgtccgccaggtcgacttccccaccgccgtgcgcctcatccggagctccgatccggcctccggcctggtggcctacgcgcagcagcaggacgactgcctgcgcggggagtacgccgccgtcgccggcgacgtggacgcgcacgtgccctgggccagcgacgcgctcggctgcctccccgaggccgtcaacctctggatcggcagcgcctgctcccagacctccttccacaaggaccactacgacaacatctacgtcgtcgtctccggcgagaagcacttcctcctcttgccccccaccgagcaccaccgcctctacgtccgcgactaccccgccgcccactacgccgcggaagatgaagcggagctgaggcttaagctggagctggaggagcccgagaggatcgtgccatggagcagcgttgacccctacccgccgtcgccggaggaggcggccgcgcaggcgtcatccttcccgctctacttcgaggggccgaggccgatccgctgcacggtgcgcgccggcgagatgctctacttgccgagcatgtggtttcaccatgtgagccagagccccgggccgaacgggctcaccattgcagtgaactactggtatgacatgcagtttgacattaagtatgcctacttcaacttcttgaggtcattggagatcgatggtagttcgtcgaaaaagacggatgctttggaagacgatctcgaggagacgaatgattgaattgaaatttttgcggtaattctggatctatgcagaatataacttgattc

SEQ ID NO: 26268 - DNA, 2739 bp, Oryza sativa
  ref <308>: DATABASE ACCESSION NUMBER: AK101710
  ref <309>: DATABASE ENTRY DATE: 2002-08-28
gagtgctgctcctgctcctcgtggtcgagaaggaataattagggctcctctgtctttgctttaacgccactcctctctctttttcttcttcttcttcctcagaataaattctctctccactgccgcaaggaaaggcgcctcaccgtcaccggggtgtgccggaaagctcccatctttgtctccatttgttgcttgccctcaattccttccttctttcctccctctgggttcttgtccccggaggcccggtttcatctctcctcgatgtgatgcgtgtgactcccaggcaggtgattggagctcacgtcgcggcggtgatttgcactgtcctcggggtctgaattgctaattactactgagcgtctctctcgcatgaggaataattcgagaatcgacgaaagctccaacatttgggtgaatttggtcgctgccccgttcaatttcgccctcgcggccctggaattcgcgatgtggagctccttctggtgcttcatggccatcctctccgccaatttctgagccaaatctcgtgcgattccgaggcccccccacgaatctgtggggtcgtcggagcgataggtcactggcaccatcaccaccaccaccatagtggttgtggcaaaaaggaacaaggcaccttcttggagttgggattaggtgcagtctcgagctcaaaagggctcgtttggtggaaacctttttggttttggttgcctgtcagtgtgctcagcttcttgctgacccatctagctgaatggagattgctcaaattggggattgctcagctttctaactgagtcagagagtgtcgtcttgatttgatttgatttgattggatttcaccaattggattgggatttcagcaatggaggagaggttagccgacgtggagggcagtttcgcctgcaattcgagaggggaggatgacttcaggagctgctgtggggatgaggatgagtgggaggacaccgaggagtcattcacggccggcgtcgccaagggagagcttgatgagagctcggtgaggctgttcttcaagggcgtgtcgagccccgaggcggaggggaagaagctgtccgggattggggtggtgatggagaggtcacctggggtgcctatgcttcaggtgcagaagaaactggacttctatgtggatgagctagtggccgatcacttggcgctgatggatggcctgttggtggcgttgcagaatgggatacggaagatctttgctttcaccaattcggagaagctgtactttcagatcgcagaagctgaaattctagaagaccagctcttggtagctttaggacacagaattcttgaactggtggaaaagctggaagactttgatataatattgcttcctagctttgagcttgagaggccactgcagttggccaaagaagccataggcatcatgtatctatctccatacgaggttggcacctgttcaatttgctgtgaggaaaaacgaggcgctcagatgatcaaagtgggttgtgctcatacattttgctatagctgcttgacttcatatactcaagagaagctgcaaaccaacaaggttcctataagatgcccacagttaaggtgtaaatatcatatttctgctagtgagtgtaagtcattccttccagttagctgctacgattctctggagagagcttttgcagaagctggcacctcagacatggaaagattttattgtccctttccaaactgttcagttctactagatcttagtcagcacttctctagagcaagtacatcaagtcagtcagatctcaattgtgttgagtgcccagaatgccatagagatatctgtatcaactgtggagtgccatggcatgtcatgatgggctgtgatgagtaccagagcttgcctgttgatgaaagagatgcaggagacctgtctttgcatcggctagcacaaaacaataggtggaggcgttgtcagagatgccgacgaatgattgaactcacacaaggctgcttccatatgaattgctggtgcgggcacgagttctgctactcctgtggcgccgagtacaccaatggtatacagacatgccaatgtgttttctgggacgaagagagcatcgaggctgcctcggcagcgcattccacccaagcatccgagatatgggcatgggacacgttcgactgcatgccaaccgccatcgaagggtactcggagcaggagagagctcagctggctctcattcagaggttcctctcagggggtttcaacctgggtgagcctccaagccagtcgccgccccgctgcgccgattcatatatcattgacaccatgaaggaccttcaccagctgccatggctcgagcggttcgtttcggtgatcagtgacagctacaatgaagattacatccagtgaaaacaacatagatagcattaagaaaaaaagaatggcacatactgatgaatttcatttggaataatatgtttccatgcccctcttgaaaatcaatacaggaaaagtgagatggttctataccttcatgagcttttcctcttgtactcccttttttcctggtttggtgcataagcaaaaggagttgccatcactgattttatttattttttgttaattccctaagcgtgtatatgcttgtttttcttgtgagccacacatgcttgggatggtttcagaacttcttgatgttgaattggataagctacatcagcaattgttcagttgatgcgtgtatctttacc

SEQ ID NO: 26269 - DNA, 2365 bp, Oryza sativa
  ref <308>: DATABASE ACCESSION NUMBER: AK101711
  ref <309>: DATABASE ENTRY DATE: 2002-08-28
gtgctgagtgcttccagcagcataggcacacaaaagcgcaaacatgcctaccgcagtgcaaactgagagagcataacttcgtatggctggcctgtacaggttcggattcacaaggagtataattagggcaatcgatgacatgaagctcattgaattgcagtagaagaaagccttataacggcgtggatagttgtaaaagaggacagggtcacctgcatggtgcccaaactcatcatccatcagccaaaatccgcctggtggggtcaacccagcttggtaagtaagtgtcacacacaagacagcaaaaaggagcaacctcttgcgtctcttgtcctcaagtttccggtccttctccctgccttcctttcgtatgtcttcatcttcgagcgtgacaaacagaacatgaataaccacatagattaggacagctccagccaaggcaatgacataaatggatgtggttacatctcggcagctcccagaagagtatgcaccaatgaggccaaacagatccaatatcatggcaaactggagtacgcggagcttgagtataggcttatactggaccaagatgatgatgaccaaggacgctgcgaaggctattgagttgcagtaaaagaataccctgtaacgttctggttgcatggataggagtattgaatcgccagcctcatgtccgttccagttgtcctgccaaacaccaccaggagggaccagtcctgcttggtatgcgacggttgctacaagggttgaaagcagtacaacaagagattgagccttatccataaaatctgcatttcttgtgttcttctgtgctccagcattgcttgtcttcgtctcttcaccaccattggttgtggttggctgtgctctagcattgcttgagacagactctgcaccaccattgcttgagacagactctgcaccaccattgcttgagagagactctgcaccaccattgcttgtgtttatctgtgctctacaattgcctgtgctcgtctgttcttcaacattgtttgacctggtgattcatgagccattgagcatgcaaatttaagatggaattacagatggcaataatatttggaagcagaaaaagcattcaatacctgtcatttgaatatgtctgacaggatataatcgccttgaggacaataatgcatgcaagaacggcaagaaccagactgcccacatagatggtagtgtcacattctcggctgcttccggtggcataggcccccgcaagaccgacaaaagcgataaagatgtatgctttgagcacaaaggtccgtactgggctggttttgttctgattcttgcccttgagtagtgggatgacgagctgcttgtctaagagcagcataatgatgagcagggacatgacaaatgcaatagcattaaaggtgaagaatgccttcaggcggatagaatggtgttcccgcatgactgggtcacctgcaatgtggccctccttgctgctgtcccagtagccaccaggcgcgctcaacccagccaggtatgtgatgctcatcacaaatgtagcaagaagtagcaggagcttgcggcgtcgctctttttcctcctctttgtttatctcccctttgccatcagctgattccagttgcccctttgcttccttctttttgctatcacctggttgtgattatcctgttgctgttaggaacagtttatgatctctgtcaaatgtgcattagaggcattacctgtgcatctgaacaattgtgatttctcagagaatgaagtcagcacaacttgaacagccatatagacaaaaatggcgactaacacgcaggcattcttggcttttagcacaccccggctggtcccagcagcataggcccccacgaggccaagcagatccagcatcatggccacccgcagtgggatcatggagatccatagctcttccttctcgtgtacgacggcaaggatgaggatgaggatgatgaccacaatggacaaagcaaatgcagccgcattgcagtagaagaaaacaaggtaccggggatagtacgtatctcggatgatggactcaccggcgaggtgcccggcctcggtattctgccagacaccccccggcgggttgaaccccgcagcatatgtcaccgtggccaccataatggccagcagcaagagctggggagcaatgacagaaaggaggtgcctcaaggcgtcaatgactctatgccaagcaggtgcttcaccatgcatacattagcttaatggaggctggccatgggcagacctttcttccaatccttgtcagttttaaaagtgtagttgtttttttttaaggaaacaagtgatgttgattcgagctcatcttgtttattcctttttatct

SEQ ID NO: 26270 - DNA, 2638 bp, Oryza sativa
  ref <308>: DATABASE ACCESSION NUMBER: AK101712
  ref <309>: DATABASE ENTRY DATE: 2002-08-28
ggagttcagaggtgatgatcgcgacagcacttccgatcaatccatggcgtgctcgtttctctgcaagccatggctgccattaacggagagcgcgaagcccgctcgctcgccggcgccgtcttcccgcgcaagaacggtggtgcagcagctcgccgtcctcttactactgctcggcggcgtcggcggcggcggtggcgcgctgcttgccgcggccgcgtcgacgacggacaccatcctccccggcgagagcatcaccgggaaccagacgctcgtgtccaagaacggtgagttcgagctcgggttcttcaacccgggcgtcgggatccactacttcctcggcgtccgcctcaggaagctcgcggcgtacagccccacgttctggattggcgacagggtctacgtcgtcgacctgcctcgcgccgcgctggagctcttcggcgacagcctctacatcaaggaggacggtgccagcctctggtggtcgtcgccgtcgtcctcctcctcctcctcgggcggcggccgcggcggcggcgcggccgtcgccgtcctcctcgacaccggcgacctcgtggtgagggaccagaggaactcctccctggtgctgtggcggagcttcgactaccccggcgacgcgctgctgccgggcgggaggctggggctcgacgtcgccaccggggagaacgtgtcgctcacgttcgaggggttcacccacaacggcagcctccgggccgacgcgagcaggaggaacgggttcgtgctcaccaccgacggccgcgacacccgcggcgcgttcccggactggatggtgaccacccaagacaacggcggctcgctggtgctcaaccacccggacgccacgaactccaccgagttcctgcagctcaaagtcgggcaggtcagcctggtccggtggtcgggcgccgacgccggctgggtgcctcgctggacgttcccctccggctgcaagtccggcggcggcttcttctgcggcgacttcggcgtctgcacgacggcgaccggcggcgaatgccggtgcgtcgacgggttcgcgccgtcggacacgaaggagtgggggctcggttatttcgtcaccggctgctcgaggtctctcccactcagctgcgacgccaacggccagaccgagcacggcgactccttcgccattcttgacaatctccaaggcctcccttacaacgcgcaggatgagccagcgaccaccgatgaagattgcagggaagcttgcctgaacaaatgctactgcgttgcatactcaactgaaactggatgcaagctctggtattacgacctgtacaatctgagctcagctgataaacctccatacagcaagatctatgtccgattgggttccaagctcaagagcaagaggggattggccacaagatggatggtgctcttggttgttggatcagtagctgtagcttctgcaatgttggcagtgttgcttctatgcaggtacaggagagacctgtttggatccagtaagtttgtagtagaaggatctctggttgtctactcatatgcacagatcaagaaggcaacggagaatttctccgataagctcggcgaaggcggattcggaagcgttttcagaggtacattgcctggatcaaccactgttgttgctgtcaagaatctcaaagggctcggctacgcagagaaacagttcagagcagaagtgcagacggttggaatgatccggcacactaatcttgtccgtctcttgggattttgtgtcaaagggaacagaaagttgctggtctacgagtatatgccaaatggatccttggatgctcatatcttttcacaaaagtccagtcctttgagttggcaagttcgataccaaatcgcgatcggcatcgcaaggggtctagcatatctacacgaagagtgtgagcactgcatcatacactgcgacattaaacccgaaaacatactactcgacgaggaattccgccccaagatcgcggatttcggcatggcaaagcttcttggacgagaattcaacgcggcacttaccaccatccgaggtaccaggggctatctcgcgccagagtggctgtatgggcagccgatcaccaagaaggcagacgtgtacagcttcggcatcgtgctgttcgagatgatctcagggataaggagtactgtcacgatgaaattcgggagccatcggtattaccccagctacgcggctgcgcaaatgcatgaaggagatgttctgtgcttgctggacagtaggctggaaggaaatgccaatgtggaggagctcgacatcacctgcagagtcgcctgctggtgcatccaggacagagagggtgacaggccatcgatggggcacgtcgttcgcatgttggaaggtgttgtggacacggagatgcccccaattccagcttcgtttcagaaccttgtggatggtgatgacagtgatatatacgaagaaaactggcgtttgaggacccaagattagtgccagtttcccttcctgttttcaaagggagaagtatattggtttcttgctggacctatttgatttcagcagattgatcagtcaatagaaattagacatgtatgaacttgtatgttgcagtacctgtaaatgtatagtgagagttgctgctct

SEQ ID NO: 26271 - DNA, 1749 bp, Oryza sativa
  ref <308>: DATABASE ACCESSION NUMBER: AK101713
  ref <309>: DATABASE ENTRY DATE: 2002-08-28
gacatgcacttgcagtcagtggtacaacaccacagcaacgcaccaccggccatcaacctcctcttccctgcttctcgctcgctctcctgccctgtttcttggagaagtgagcttaagtgagagcctctgtccctcgcacacgctattggccatggtggttctcgctggcccgcccgccgtcgatcacatcccgctgctgaggtcgccggaccccggcgacgtcttctccggcgtgccggtcgtcgacctcggcagccccggcgcggcgagggccgtggtggacgcctgcgagcggtacgggttcttcaaggtcgtcaaccacggcgtggccacggacacgatggacaaggccgagtcggaggccgtcaggttcttctcccagacgcagcccgacaaggaccgctccggcccggcctacccgttcgggtacggcagcaagcggatcgggttcaatggcgacatggggtggctcgagtacctcctcctcgccctcgacgacgcgtcgctcgccgacgcctgcaccgtcccgtcctgcgcggtcttccgggccgctctgaacgagtacatctcgggggtgcggaaggtggcggtgcgggtgatggaggcgatgtcggaggggctgggcattgcgcaggcggacgcgctgagcgcgctggtgacggcggaagggagcgaccaggtgttccgcgtgaaccactacccgccgtgccgcgcgctgcaggggctcggctgcagcgtcaccggcttcggcgagcacaccgacccgcagctcgtctccgtgctccgctcaaacggcacgtccggcctgcagatcgcgctccgcgacggccagtgggtgtccgtgccctccgaccgcgactccttcttcgtcaacgtcggcgactcgttgcaggttctgaccaatgggaggttcaagagcgtgaagcacagggtggtggccaacagcctaaagtctagggtttccttcatctactttggagggccaccgttagcacagaggattgcaccattgccacagctgctgggggagggagagcagagcctgtacaaggagttcacatgggatgagtacaagaaggctgcctacaaatcaaggcttggagacaacaggctggcccagtttgagaagaagtagctagctagatgcctagcaacagaactggccggtcaagcaacaacgactttactgcatggcagctagctaccttagctatgtctcacgcacacgtacggtacaccatgaccacgagaagatgaagctgcttaagagagaaaaagaaaagaaaataaaaacaggaagaagataataacttcaagatgcacaatgtacagccaggttggatggatagctagatttttctcgtgtggctaatcaccgtgtgtggtgaggtgggctcctttcctgtttcggaatactgatcgatggatgaacagcctccaatagttaatgttaaccaaatatagcacaacaaaggggttcttttcttcctttggttgtttcttttttcctcttgcctttgattttctcgtcatgctttctgagcattaattatgtgtgcgtgtatttcggtatacgtaacgtacttttacctatgtgtgtatagtacgtggcttgtgttaacaagtaaatattatagtctctctctttcgttatgcaactgacttctgcgcggtccaaatgcattgatggagatatatctattggtgtacaatgtcaccttcaagattaatgaattttcatcactcagg

SEQ ID NO: 26272 - DNA, 2438 bp, Oryza sativa
  ref <308>: DATABASE ACCESSION NUMBER: AK101714
  ref <309>: DATABASE ENTRY DATE: 2002-08-28
gagagtgattcgagagcaagagcaaaccaccttcttcttcttcttctcttcttcctctgcactgcagctagctctctgctccgccatgtgccgcggatcagtcctcctcctccgtgtccatgccgcgctgcttctcctcgcggcgctcccggcgctgatcgccggccagccgtgggagatatgcggggagaacggcaactacacggcgaacagcacctaccaagccaacctcaagcagctcgccgcggcgctccacaagaacgtctcctccggcaccggcggcggccgcctcttcgcctcgggcgccgtcggcgccgtgccggacgccgtctacgcgctcgcgctctgccgcggcgacatcaacgcctcggcctgcgccgactgcgtcggcaccatcttccaggacgcgcagcagctgtgcccctaccgcaaggaggtgtccatcgtctacgacagctgctacctccgcttctccaacctcgacttcctctcctccgccgacaactccggcgtcgtcgacctctacaacaccgggaccgtctccggcgacgtcggccgctacgaccgcgcggtgacgggcctcctcaacgccacggccaggtacgcggcgggcaacaccaacgcgtcgtccaggctgttcgcgacgggggtgatggtcgggttcgacgcccagttccccaagatctacgccatggcgcagtgctcgccggacctgtcgccggcgcagtgcgggctgtgcctcggcgccatggtggcgcggtggtggcagacgttcgagcccaacacgcagggcgccaggagcgtcggcgcgcgctgcaacatgcgggtcgagctgtactcgttctacaacgtcccttccatgctgcagctgcaagccgaggccgtcgcgccgtcgccatcgccggcgccggcgccggcagggaagccacctgctgtgccgggcactacaggagggaaaaggagaaacggagcaggtaaagttcttgcaattgtaatgcctatagttgctgccatactggcagtcactgtaattggcttttgtttctggaggaggagaagaccagaaaaaacacctccaccaggaccgctccgatccgcatctcgttcggaggactttgagagtattgagtcactttttcttgatctatcaacactccgaatcgcaacagataacttctccgaaaataacaaacttggtgaaggaggatttggtgttgtttataagggatccctaccacatggtgaagagatagcagtaaagaggctctcacaaagctctgtgcaaggaatgggtgagctgaaaaatgagctggttttggttgccaagctccagcacaagaatcttgtccgtttggtcggtgtttgtctagaagagcatgagaggatgcttgtctatgaatacatgcccaatagaagcttggataccattctttttgatgctgagaaaagcagtctgctagactggggaagaaggctgaaaataataaacggagtcgctcgaggaatgcagtatctccatgaagattcccagctgaagatcgttcatcgggaccttaaggcaagcaatgttcttctagactctgattacaaccccaagatttcagacttcggcttggcaaggctcttcggaggcgaccaaacacaggacgtcacaaatcgcgttgtcgggacatatggatacatggcgccagagtacgcgatgcgtgggcactactccgttaagtcagacgtgttcagcttcggcgtcctggtcctggagatcgtcacggggaggaggaacagcggctcctactacagcgagcaatccggcgatctcctaagcattatatgggagcactggaccatgggaaccatcatggagatggtggaccggtccatgggcgagcgcgcggcgggcggcgagatcgcgaggtgcatccacgtcgggctgctctgcgtgcaggagaacccggcgagcaggccggccatgtcggcggtgaacgtgatgctgagcagcggcacggtgtcgctcaaggcaccgtccaggccggcgttctacatccggaagggcggcggcgacgacggcggcggcacggggtcgtactcggggtcgttcgtcggcaccttgccgtcgtccggcaggtcggcgcccatgtcgcccaacgaggtgtccatcactgagctcgagccgagataaggaagaaaaatgtagcagagccatgtcatgtcacaggagtgaagggctccggggatgcctaatttgtgattttgtgtgctgtgatggtgtcctcaagatgctacaatgtatagaaacaggcagtaatcgttggcaagaacaaaatgccagcaaaacagtatagcactttagtgttgtcttttaactcttatggcgaattatgctgagataattgcatgatttgcaggtgttcattacaaatatattaccctcgtttcatatt

SEQ ID NO: 26273 - DNA, 2803 bp, Oryza sativa
  ref <308>: DATABASE ACCESSION NUMBER: AK101715
  ref <309>: DATABASE ENTRY DATE: 2002-08-28
ggggcggcgggcctatccaactacggaagcaatcaagctagccacgccggcggctttgcaagttcgcatggccgcattcccaactcgacggcgggaactgactgctcgccgccgcccggtcagcatctagccatccagggtaatggtagttggaaaagaccgatcaatcttgcttgctgcggctgtaataacccaaggagctgtattgaaaataacttgtggtcgagggccatcgtttcccccagcataaacaatggtaatccccttctggactgcatggagtgcaccaaatgaatcctcatcagcatgaattgagagggacaggatatcaactccatcatgaattgcatcatctagagctgctagcactccggcactagcaagctgtaggctattccctgtgttccatatgaccttatacacagcaagacgtgctcggggtgcacctccacgggctactcctgttgctaggccatggacgctgactccatctaccactgcaccagctgctatggatgctgtatgcgttccatgcccgatcatgtcccgggcagacatgtaattcttcttaaagtcagctttttctatacctgcagcatagtaccgtgcaccaatgattttcctgctgcagttggttggcccccaggcctgtcctagttgacacacgcccttccatcgtgatggtattgaagtttattgggtggttggtagttcagtccgaggaaatcccaacttcttgtggtcagcaattcatgttgcttatttggggtaacactgatcacttcagtgtgggagtcagacctactgtcgccatcatgggattcaggtaaccgcatcaacagcaattgcagctggtcaaagcagtagctattcaatcctaggaacgttttaggatcatttggtcattaggatttgattagttacattctcacaatgatagttgctttccttatctttatacttctctgtttatgaagagatgttcacagtgaaaaacaactaggcaaggaagaataaacaaagtctctaatcttcttcccagttcagcaataaacctcaaagcttctgtactgcagttgggaagaattctgccggtggttagatggaagtgagcgtcctacccttggtctcaactctcaaacccataccatgcacataacaaacatgactggtaaatttagcactgagttagtcaagttaacttttgttagctaaactcagttcacctgcaagattatctgcttgctcctctgttagcattgctgcaaagcctgagaagccatgtttgtagctgtaagcaatggaggccagcgcctcttccttgctgaaacaaagtggtaagccatgagaaacaacaccgaacatgtttatagttagttataaaatgaagtgtttggagttgttgaagcaaataggcagctcataaaataatattggtgttgagaaggtaagaactaaaacaccccaaagcaaataaactccttagattaccttccaagaacgctggtgagcatgtcatggtgtgaggcagtgacaagagtagggtcatcatatttcttctcgcccagataggcaatgtacaactatgcatatatagagaagcagagaaaacatctttgaccaccaaatctgcatacaaaataagatgtagggtgatgcactgtgcataccttgcgagatccatatattcctctgatcatcaaaagccatacacaaaataggaggaaagctggaaagcgctgaaatggagagtgcagaatcatgttgggacttcttatacatcagtatgatctagtaggtattggtatttataggtctttaggtcttgcttggtggcttctgtccatgtccagaaagaaatgtgacactcacatttgttcaatgaattaaatgtggcactcaaattcgttcaatgaattcgatcgctgaatgtttatgtctactagtctagggtcacaacgtaagacaaaatgtcatatgttttgctgttcattttcttcttgtccaagtgtcctccctgggttttctctagtaggggattccctggaattttctgccaaactagcttaactcatggtcatgggttgtatttctccgtgctaccacctccagcttatcttgcatgagtacttttcgtttatcttggttatgctagtctttttttttaaaaaaaaatcagatattcagagtgagaagcatggaggctagaatttattcatctatacgtcaataactcaacaaattgaatattcggaggcaaagtggaacaaaattccaggagatgctactatggtttacagtttacactagcaaacacgaagcagtggagcccaggagccccctgatttgctataatggtttctcaatcagcggggaattttgactcttctgttctccccgtgccattgcacatcattatgtggagtcgtcttccgcgtttgttcgtttaactgatggagactagacggctagagtgctgattcgtgcaagtttagtcttacaagacgtcgctgctttctgatcttttgtttatctggaagaaaagggtacaggtaagctcatataactctaatacttctggataatatggagatgatcagacttttgcattcgagtgctgatccattggcgcttcgcttccatgtgggtgctgccggctgactgaagccatttgtcttaggcgtattggattggtctggtttaaggaactaacgaaattttgtagtgccaggtagagatggaaaatatgtgtttgatttgatgcacattgtattattgtcagataaatggatgagtattaccc

SEQ ID NO: 26274 - DNA, 2804 bp, Oryza sativa
  ref <308>: DATABASE ACCESSION NUMBER: AK101716
  ref <309>: DATABASE ENTRY DATE: 2002-08-28
ggggcggcgggcctatccaactacggaagcaatcaagctagccacgccggcggctttgcaagttcgcatggccgcattcccaactcgacggcgggaactgactgctcgccgccgcccggtcagcatctagccatccagggtaatggtagttggaaaagaccgatcaatcttgcttgctgcggctgtaataacccaaggagctgtattgaaaataacttgtggtcgagggccatcgtttcccccagcataaacaatggtaatccccttctggactgcatggagtgcaccaaatgaatcctcatcagcatgaattgagagggacaggatatcaactccatcatgaattgcatcatctagagctgctagcactccggcactagcaagctgtaggctattccctgtgttccatatgaccttatacacagcaagacgtgctcggggtgcacctccacgggctactcctgttgctaggccatggacgctgactccatctaccactgcaccagctgctatggatgctgtatgcgttccatgcccgatcatgtcccgggcagacatgtaattcttcttaaagtcagctttttctatacctgcagcatagtaccgtgcaccaatgattttcctgctgcagttggttggcccccaggcctgtcctagttgacacacgcccttccatcgtgatggtattgaagtttattgggtggttggtagttcagtccgaggaaatcccaacttcttgtggtcagcaattcatgttgcttatttggggtaacactgatcacttcagtgtgggagtcagacctactgtcgccatcatgggattcaggtaaccgcatcaacagcaattgcagctggtcaaagcagtagctattcaatcctaggaacgttttaggatcatttggtcattaggatttgattagttacattctcacaatgatagttgctttccttatctttatacttctctgtttatgaagagatgttcacagtgaaaaacaactaggcaaggaagaataaacaaagtctctaatcttcttcccagttcagcaataaacctcaaagcttctgtactgcagttgggaagaattctgccggtggttagatggaagtgagcgtcctacccttggtctcaactctcaaacccataccatgcacataacaaacatgactggtaaatttagcactgagttagtcaagttaacttttgttagctaaactcagttcacctgcaagattatctgcttgctcctctgttagcattgctgcaaagcctgagaagccatgtttgtagctgtaagcaatggaggccagcgcctcttccttgctgaaacaaagtggtaagccatgagaaacaacaccgaacatgtttatagttagttataaaatgaagtgtttggagttgttgaagcaaataggcagctcataaaataatattggtgttgagaaggtaagaactaaaacaccccaaagcaaataaactccttagattaccttccaagaacgctggtgagcatgtcatggtgtgaggcagtgacaagagtagggtcatcatatttcttctcgcccagataggcaatgtacaactatgcatatatagagaagcagagaaaacatctttgaccaccaaatctgcatacaaaataagatgtagggtgatgcactgtgcataccttgcgagatccatatattcctctgatcatcaaaagccatacacaaaataggaggaaagctggaaagcgctgaaatggagagtgcagaatcatgttgggacttcttatacatcagtatgatctagtaggtattggtatttataggtctttaggtcttgcttggtggcttctgtccatgtccagaaagaaatgtgacactcacatttgttcaatgaattacatgtggcactcaaattcgttcaatgaattcgatcgctgaatgtttatgtctactagtctagggtcacaacgtaagacaaaatgtcatatgtttggctgtccattttcttcttggtcaagtggtcctccctgggttttcttcaataagggattccctggaattttctgccaaactagcttaactcatggtcatgggttgtatttctccgtgctaccacctccagcttatcttgcatgagtacttttcgtttatcttggttatgctagtcttttttttaaaaaaaaaatcagatattcagagtgagaagcatggaggctagaatttattcatctatacgtcaataactcaacaaattgaatattcggaggcaaagtggaacaaaattccaggagatgctactatggtttacagtttacactagcaaacacgaagcagtggagcccaggagccccctgatttgctataatggtttctcaatcagcggggaattttgactcttctgttctccccgtgccattgcacatcattatgtggagtcgtcttccgcgtttgttcgtttaactgatggagactagacggctagagtgctgattcgtgcaagtttagtcttacaagacgtcgctgctttctgatcttttgtttatctggaagaaaagggtacaggtaagctcatataactctaatacttctggataatatggagatgatcagacttttgcattcgagtgctgatccattggcgcttcgcttccatgtgggtgctgccggctgactgaagccatttgtcttaggcgtattggattggtctggtttaaggaactaacgaaattttgtagtgccaggtagagatggaaaatatgtgtttgatttgatgcacattgtattattgtcagataaatggatgagtattaccc

SEQ ID NO: 26275 - DNA, 3342 bp, Oryza sativa
  ref <308>: DATABASE ACCESSION NUMBER: AK101717
  ref <309>: DATABASE ENTRY DATE: 2002-08-28
gaatcgcatcgcctccgacgagctcgcggcggccggccggcgaggcgactgcgactccgacgaccatggacgccgccgccgccgccttcgcccccggcgggcagctcttctccgtcgatcccctcgagcggcacgcggcgaggggccatggcgtggtcacctccatggctgccggcagcgacgtcatcgtcctcggcacctcccgcggatggctcgtccgccacgacttctccttcgaggacgcccatgatctcgacctcgggaccggccgctccggcgagcactccgtgcaccgcgtcttcctcgaccccggcgggaagcactgcgtcgccacggtggtccacccggggggcgccgagacgtactaccaccacgccaggtggccgcgccccaagctgctcccccgcctccgcaacgtcctcgtcaatgccgtcgcgtggaaccgccaaaccatcaccgaagcgtcgaccaaggaggtgatcctggggacagaggatgggcagatcttcgagattgcagtagacgaggccgacaagaaggagaagtatgtgaagtcgctctttacgctctctgagctgcaggagggcatcaagggcctgcagatggaaaccgccgtggttgggaacgccacaaggttctatgtgatggctgtcacaccaacacggttgtactcattcacgggcatcggttcattagaaactgtttttgctagctattctgatcgtgcgatacactttatggagctcccaggagatattccaaatagtgaattacatttctttatcaagcaaagaagggctaagcattttggatggctttctggagctggaatttaccatggtgaactgaattttggagctcaacacagctctacaagtggggatgagaactttgtcgaaaataaaggtttttttgactactcaaaattgggagaatctggtatcaagccaaggtcatttgcattgtctgaattccattttctgcttctcatcagggacaagattaaggtagtgaacagaatcagccagcaaatagtggaggaacttatagtcgatagttcaccagaagttacaaaaggaataattggactttgtagtgatgcatcaactgggcttttctatgcatacgatgaaaattctatattccagatttcatcatctgatgagggtcgtgatatgtggcaagtatacctggacatgaaagaatatgctacggcactgtcacattgtcgtaactccttccagagggaccaagtctatctagtgcaggctgatactgcattcaatacaaaagagtactatatagcagcttccttctatgcaaagatgaattatatcctatcatttgaggagatcagcttaaaatttatatctgttggtgagcaggatgctctcaggactttcttgttgagaaggcttgataacctaacgaaagatgacagaatgcagattacaatgatctcaacttgggctactgagctgtacttggacaagattaatcgcctcctgttggaagatggcacaggagccacgtcaaatgctgtagcagattctaaagactcggaatatcgttcaatagtaaatgaattccgtgcttttctaagtgatagcaaagatgtattagatgaggcaacaacaatgagactgttggaaagttatgggagagtggatgagctggtttattttgctggtttaaaggagcaacatgaaattgtggttcatcattacattcagcaaggagaagcaagaaaggcattggaagttcttcagcgacataatgttctagtagaccttgtgtataaatttgctccagatttaatcatgttagatgcttatgaaactgttgaatcatggatgatggcaagaaataagttgaatccagggaagcttataccggcaatgatgcgttatgtgagcgaaccacatgccaagaatgaaacacatgaagttatcaagtacttggaattctgtgtaaaagatttgaacaatgaggatcctggagtgcataatttgttgctctcactgtatgccaagaaggacgatgagtctcagcttttgcaattcttggacactaagtttggtaaaggacagacaaatggccctgagttcttttacgaccccaaatatgctctgcgtctatgtcttcaagagaagagaatgcgtgcttgtgttcgtatttacagcatgatgtccatgcatgaagaagctgttgcacttgcattaacggtggacttagagcttgcaaaagcagaagcagataaagttgaagatgatgaagaacttagaaagaagctgtggcttaaggttgcaaagcatgtcattgagcaagagaagggagtcaagagggagaacataaagaaagctatagaattcctatcagagactaacaacttgttgaagattgaggatatcctgccatttttcccagacttcgtattgatcgatgactttaaagaggaaatatgcaaatctctcaaggactatgacagccaaatcgatcagctgaaacaggagatggatgatgctactcgtggggcagacaacatcagaagtgatattggtgcccttgctcagagatacactgtaattgatcgtgaggaggaatgtggggtgtgcaagcgcaaaatattgactgctggaggactgcaccaggtaggaagaagctacacatctaccggacacatggcccccttttatgtgtttccttgtggacatgcctttcatgcgaattgtttgatcgcacatgtaactcgttgtaatagcagccaaacacaagctgaaaaaatactggacctccaaaagcggcttagcctaatggacaggaaagcagcaaaggaaaatggcggaaacatgaatggtgaatctattatcagtgcgacaccaattgacaagttgaggtcccagctggatgatgctgtagcgagcgagtgccccttctgcggcgatctgatgatcaaggagatttcattgcctttcattctccctgaagagtctgatgaaaaggcttcgtgggaaattaaaccgcaaccaacgggtcagaaaattcttccaatgaccatgtctatatgattctactagtaaaagctgagatggaatagaatgtttttcgagtttgtatgtgattttgtaatgctgaatatatgctctttcatgtccaatttctggttgggtggctttggtttttaataattgcccagctcgtgtatctttctgacgagcagaacattagctatcctatccagaatagtttgtgtacagaaacatcatcttccacttcacttgggctcttgtacatgcctcctttcatcaactttgctcataataaagttgcgatttgttaggg

SEQ ID NO: 26276 - DNA, 1708 bp, Oryza sativa
  ref <308>: DATABASE ACCESSION NUMBER: AK101718
  ref <309>: DATABASE ENTRY DATE: 2002-08-28
gccccgcctccctcccatctcgcgttctcgcgctcgattcgaatcccaccgcaaagcaaaagcccacgcgcgaagcaaaagctcgccgcaaatggaggacgccgcggtcgaggaggccgaggtgagcggcggcgcggcggagttcgcgccggctctcgtcgccgcccacccgctcggccgctccgtcgccgtcgccgtcgggcccgagctccgcgtgttcgatctcaaggccagcagtgcagtttcattgtcagacaattctggcggtggttctcattcggatgctataagagctatctcgtttagtgcaaacggtgctctgttcgcatccgctggtgatgacaagcttgttaaggtctggaagactgattcatggtgctgcattcggaccataacttctgaaaagagggtcagtgcagttgctattagcaatgatggcacatatgtaacttttgcagataaatttggtgttatttggttagttaccatgggggaaagtggtggagagcaggagccaactgataataaacctgtgtcaatttttggtcactactgcagtattattactagcatgaaattctcaccggatggacgattcattgctacagctgaccgggactttaaaatccgaattacatcactcccgaaaaagcctttaagaggggctcatgagattcaaagtttttgcctaggacatacagactttgtatcgtgcattgccttcacatgcctttcagaaggtccgagctttcttttgtctggaggcggtgattctactgttcgtctatgggactacataaacggctgcctccttgatacatgtcaagtccgagacaaggtgggagaactcttagagccaaatgaaactgaagacaacaatctatctgttgcagatatatgcccgactaatgatggtttgttggttgctgtagccattcagagtttaagtggagtaatgcttttagcatgtgaccttattgcaaagaagttatcttttctaaaggtggttacaacggaaaagtgctatattcctactagcctgtcttccagcttctcagcagatcttctatggaccgtcatgggcgcatcgaatatgcctaatcaggctacttcccagttatgtacccgtttgaaaatcatcccacacttcaaaaaggatccgctagccggatgtgatcatgttcctacagtcttgggagacagtgaggtgccacatggtgagaagctccttctggcgctgcaaggaagtcttgacattgcaaagcaagaagaggtgttagcttcagttctagctgcactgaaagtatcaatgcacaagatgctggtaaagaagcactactcggaggaaaggagagagcagaggaaaaggggcagaaacgataagaagatcaagaagtagatcggcctacagcctcagcaaaaccagttctttgtttctcattgtaccattagaggcttggaaaacaaaaggcattttgacattcacaactgtaagattaaatctactagcaaacacttttctcattatccataggccacagcataacggcttctgaattctgatgcctgttgtttcagtcgaaatgcccgcagttcttgttgtctgctctacctgtagcagctgttatctgtgatttgaaatgttacttaccctatattaaccatgctgctatccaatgacaattgcacgctataatatcatttttgc

SEQ ID NO: 26277 - DNA, 4177 bp, Oryza sativa
  ref <308>: DATABASE ACCESSION NUMBER: AK101719
  ref <309>: DATABASE ENTRY DATE: 2002-08-28
gacgcgagcccgcgagccccgccgcgccgcgccaccgatctccggcgaccccccggccgccgccgccgccgtctccgcctccaccacccggagatcctcccgcgtgcctcccccctccccgccgcgtgctcccggcgcccactgccctggccccgaggtgggggctcccctgctccccgcaaaccctaaccctagccctagcccacccccggcgcgggggctgcctaggaaacaggttgcacattttgcggacttttgagaaggtcatgtccattgatgagtgatgacatggcaagctgagtagataatgcttgcagtgatgcctttgcatatcctgatcctgtgtggatactgagctgtgctctatgggaggaattgcagaatgtggtgtgaacattgatcagaaagcttcgccacgccgtgcggccatagagaaagctcaagaggagcttaggcaagaatatgatgtccgtgaagaacgaagaagggagcttgaatttttagagaagggaggtaaccccttggatttcaaacttggacatgtagcatcacttagtgtccagtccacttctgttgcagatcatataaccgaacaaaatgtgataagtgaagctaagggcagctttgcgtttgctgcctcaccccatggggattcagttgaaagtagtggcaagccaggaagttcatcatgccgtgatgccaacacagctgataatcttatgcttttggatggagataccagcaacacaggtggggagaaacttgtcaaatgtggtactaaacgaactaatgtatctcaacctgatgtgtccctgcgctgtgatggtcaaaacaatgtaaaagaggctgaagattctagtttgttccgccctggggcaaagaaccaggcgtatgctcgtcgcagatcgaaatcaagcagggagaatgccactgcgtctgttgggtctctaccagtttccccactatattctcaagggaaagatgcaaaagggataatacaagaaacaaaatcagaagatcatggtgcctcatctattggcaactcaaaaccagcaagtccagatcggaacaacacatcaaaggttgcttcattaggtgatcatgatgcgatggagatggacaacactaatgaaggaaaccaagcagcaactcatgaaacaacaaacttcaaagatggtgttgaaacaccggaaatctcaccaaacagtgtgaatggtaattcacagcttattggagatggtttggtagttactgcaactacttctgcagaatcccctgacacaagtccaaaagaagctgctttaatggcaacttcttcatttccatcttcatgcaatgaagtcttggaagaagcatgtgctgcggaagaagcaggtaatggatgctcagataaaaatttggttgttcatgcagatgatatggttagcaagagttctgttcctccctctgaggtagaaattgccagttgaatgaaaatgaagcggatataccatgtgcagatgtgtctaagaccgttgatgaacatcctggaaaaagtgagaacttatcagggaaggtgtctgatgaagatttaggtgatgctataccttctgacaaggatggaaacaaagatggtcaaccagaaggtggtgacatgcccacagttgttgatggcgtttctaattctgttcaaccagaagtcagcaataccatttatgccaaagatgacgttgatgtccataacaagatggttgatgcacaaaaggatacagggaatcttgctacttctggtcttgacaaagtcgataaggaagcatgttctaatttgaaaaaaaataataaatgttctcctgattctaatattgctgataagttggattctgttaccgtggcgtctggtttgctcatgaaggacgtgcctagttctgtgtcattaatgaaccctgacaatgatgttaataaaactggtgaaaatattccaatgatggaaaagaaggaatgcgaagattctactgttgccaagaaggaacatgaagatactatccttagaagggcacgattaatagaggtcaatatcaagaaagctggtgaacgatctctctgcaatatttctttggagaagaagccaaagagtcactgggaatttgtcctggaggagatggcttggatggcaaatgaatttatgcaggagcgcctgtggaaaagtgcagcagcttcccagatgtgccactggattgccttaagtggtcgagcaacatttgaggaagcaaacattcaaaggaaacagaaatcaattgctagaatcctagccaagagtatcatgaagttttggtgttcagctgagactttacgagctaccagtggtgaaatgcgtaaagagaagcaagcagaggagtcaattgggattggggaaacaaagctggctggaatcaatgcagaaaaagaacagtgtaacgaacctctggaacaagagaagcttcagtctcctattcaaagttacgcactaaagtttctgaaggacaactgtaatatatctgagtgtctgtcgttagctgaagcaccagctactcctgacaggctgaatgattttggcattttgaaagtgccagaccagctttcagaagcaaacctattttatggcgtagcccctggtgcgatgcaggcatacagagagtttgtggagggtccttttgtggctaataagaaaaccaataactctcgacagaagaatgattatgagccatctacaacaggctctgttgcagatgcacataggggacatgcatatgaagatgatgatgtcgaggcatccacttatgtattgcatggtacatatgatgatggtttgccatcaaaatcgagtcacaaaaagaaacaccttatgcagcagaggatgaatggcacaaggcattacagtactggtgttgacatgccttatgatccatatgtggagagcaagccaggaaaccagccatttttatcaaatggaaaaagaccttcagatttctttaatattcctacaaaacgcatccggacagctgctagacaacgagttgtaagcccatatcctgctaatgcttctggagccactgcattcacaagtaaaacagatgcttctagtggagacacaaactcttgtcaagatgaccaaagttcattgcatggtggatcttttccaaggaagaatgtggatattgaatcgacagttgattttgatagacaattgtatgatggcagtgaggtatctactaagtcaaaaaagaagaaaaagtctaagcaccctggatacaagacacctcaaagtgtcgctgagtcttgctctttgattgctgggaagaaggattatttgaagaagagatcagaggtccatcaattcgattcaaatggaaatattgtgataaatggtcagcatgctgccaagaagcctaaattgatgaaccaagcaccagatgtttcattagaagcacttacaccagttggcccaatggtatctcctgctgcttcacaaatgagtaatatggcaaatcctactaagattataaagatcattacaaaccgggatcgtgggagaaaaaataaagtgctcaagatggctgctagtcactcaggccctggaagtccatggtcgagctttgaggatcaggctcttgttgtgcttgtacatgatatgggtcaaaactgggaactggttagtgacgcactgaacagcattgttcaattgaagtgtatatatagaaggcctaacgagtgtaaagatcgccataaacttctcacagaaaaaggttcaggtgatggtgcggatagcgcagatgactcgggctcatcacaacactatcagtccacattgcctggcatcccaaagggtagtgctagacacctgttccagcgccttcaaggaccgttcgaggaagagactcttaaggcacacttcgagaaaataatattccttggtcaaaagttgcatccaaatcgtagaaagggtgagagccaagagctcaagcagataaacccactccattcttctcatcttcatgcactttctcaagcatgtgcacctggagtcattttgatgtatgagcattgctgtgttcaatttatatgttcttttcctgtatccacagtccctgccagtcttctttatactttatctaatgctcgtatttaaaactaccaataggccgcttgatctttgtgatgc

SEQ ID NO: 26278 - DNA, 2576 bp, Oryza sativa
  ref <308>: DATABASE ACCESSION NUMBER: AK101720
  ref <309>: DATABASE ENTRY DATE: 2002-08-28
gtctgatggggtcgcagcttctcgacctcccgtactcgtttccttgtcgcctcttcttcttcctcctccggctccgctccgccgtaaatcctcctcctcctcctatataatcatcaaaagcttagcttagcagtaggccagtagcagtagcgatgccgtgacggatcctccaccaccaccacctcgatcgtcaaatcctctagcttgtcttttgtttttgattgacgagacgagcatgtccggctccgaccatctcttggacgccctcctcgccgccgcccgcgccgccctttcccacctccaccttccctttcccggatccaatcccaagccccactactctgatgacctccatcttcttggagttggagtagctcatttcatccacagatccccccccttcacaactagggcatgcttccgccgaaccaaacacccaccaccaccaccaccaggtccaccaccgcaccagctccttctctgcattggcattgccttccataacctgctggacaaccatcttctccaccacttccacaccctactcatccatgcaaacaagccccattttgatgccttcctctccaacctgccttttgccaagcttaaggttgccccaccgcctcaaccgtctgcgtctgtctcccctgcacctccaactccagctcaaactggggacaaggaagacactgacactgctgctaatcactctccacggtcgacactgcctgttcgcctgctcaacatccctgtggaccgcctacgctccacactttccacgctttcactcaccgacttgattgacctggttgccaggtccttgccatcccctgatactcatccagacaagaagaagctcttctctgtacacgacttcttcagatatgcggagtttgaaggaaagcgattctttgaggagttggatagagatggtgatggccaagtcaccctggaagaccttgaagttgcaatgagaaagaggcgattgccaaggaggtatgctcgggattttttacggcgcaccagaagtaacttgttttcaaaatcaattgggtggaaacaatttctatccttgatggagcagaaggagccaacaatattgcgggcatacaccaccctatgtttgagcaagtctgggacacttcacaaaaatcaaattctcacatctttaaaaggtgcaggccttccggccaatgaagataatgctgctgccatgctgcggtacctaaatgcggattcagaagaatcaatctcctacagccattttcgcaatttcatgctcctgcttccttcagagcgccttgaagatgaccctcggaacatttggtttgaagctgctactttggttgctgttcccccaccggtagagatatcagctgggagtgttctgaagtctgctttagctggaggtcttgctagtgcactttctacttccgtgatgcatcccattgattcaatgaagacacgtgtccaagcatcttcgctttcatttccagatctcatatcaacacttccacaaattgggctccgaggactttatcggggttctatccccgcaattcttggtcagttttcaagccatggtttgagaacaggaatatttgaggcaagcaagcttgtgttaaaaagtgttgctccaacacttccagatattcaggtgcaatcactctcttccttctgcagcaccatcctgggaacagcagtccgtataccttgtgaggttcttaagcagcgtttgcaggctggaatcttcaataatgtaggggaggccattgttggtaccatgcaaaaagatggtccaaagggcttcttccgaggcactggagccactctttgccgagaggttcctttctatgttgctggaatgtgtctttatgcagaagctaaaaaggcggcacagcatgtgttgaacagagacttggaaccatgggaaactattgcagtgggagcgttgtctggagggcttgcagcagttgtcacaactccctttgatgtgatgaagactcggatgatgactgctccaccaggcaccccagtctccatgcagttgatagttttctccatccttcgaaatgagggacctctcggactgttcaagggtgcgatcccccgcttcttctggattgctcctctcggagcaatgaactttgcaggctatgagctcgccaagaaagcaatgatccaaactgagagtgactccacagactctgtacatgagaagagaaccacagtgggttccagaggatgacagatccaaattcacctggttactctatatggtgtaaagaaaggacaagccatgcaacagaaatgtttttgcccttgttgcaaagaattagaaccattttttggcattgccttcgtgatacatgtaccaaatgttaggtccttttatatccttcacatcctccccaacagagggaaatttgtcgaattcccattaccataggcctttattataccactgtatagtagatgacagaactacaggagtagacgtgctgccctttcttgcacagttcacttcatctgttgttatttctttagtaatccagagccttgatgacatgtttatt

SEQ ID NO: 26279 - DNA, 1607 bp, Oryza sativa
  ref <308>: DATABASE ACCESSION NUMBER: AK101721
  ref <309>: DATABASE ENTRY DATE: 2002-08-28
ggctcgcattgccatccaccaaagccaagagcagctcaagcccaccggaggagagagagaaaagaggaaatcatggaggcgatttgctgtggagattcgggtgtgtgatctggtcggatcttgctttcctgggaggaggaagaagaagaggtggaggtggccgcggtgtgatgcggtgggtagtttgcttatatcctcgagatgccgcattagccaagccagccacacccatcatcatcagcttcctctccctagctccattgccgcggcagcaagaaagaaatcaccaggggaagacttcttggtggtttgatatgctttgattgagcccctggagaagagaggaacagaggctttttttctctgcgggttcttcaattattcagggtttcttctggttcttgtctcgccatgacggtggttgatgcggagtcgcggttccatgtcctcgcggtggatgatagcctgatcgacaggaagctcatcgagatgctgctcaagaactcgtcctaccaagtgaccactgtggattctgggagcaaggccttggagctgcttggattgagggatgagggtgatgactcctcctcttcaccttcttcctcctcacctgaccatcaggagattgatgtcaacctgataatcactgactactgcatgcctggcatgacagggtatgatctgctcaagagggtgaagggatcatcttcattgaaggacataccagttgtgatcatgtcttctgagaatgtgcctgcaaggatcaacaggtgcttggaagatggtgcagaggagttcttcctgaaacctgtcaagctcgctgacatgaagaagctcaagtctcacctgctcaaaaggaaacagcagctgcccatggctgctgctgcaccagataagccgccacacaaaccagatgaagctgcagcctcagcagctgcaattgctgaagctgcaacagctcaaaccgatggaatcatcagtgattgcagctgcagcggcagcagcaagaggaaggcggctgcaatggagcaggaggtcatctcctcacctgatcagaggacgaagccaagattgtcctccactagcagcggccttgcagtggagacctgatgaaactgaattaattagaatccccccaactaagaaatgattttggcctctttttctgttttgattttttttatggagctgctcatggaagtatggaaccattagctcctgggggttttaattaatttacttaattagtagtttgaggtgaaaggaaagtccacgtacttttacactagctcttgcttcgatccacaaattttgttgtgccaaaggaacaccatggcaccaagtggtgttcgttagaaaaggagttgtgggaatgaaatggaaggggaagttgtagataaaggcagcaccttggatgcttttaggctaattttaaggcttattattcaagctgactagtgttttgtttgaacttggagaggaaaaagctaagtgctactgctactatgaattgtctagcagattgatggaccaaccaactggtcttttgcaaattgtccatgtattcattttttctgaagtactaccatttcttcttttctgccatt

SEQ ID NO: 26280 - DNA, 2930 bp, Oryza sativa
  ref <308>: DATABASE ACCESSION NUMBER: AK101722
  ref <309>: DATABASE ENTRY DATE: 2002-08-28
gtgccggcgagagagagccagccagccagccagccagacagcttcttcttcctcgtccctgtgttgctgcttctgctgctgctgccgccttgtgtatagccttgtgtatctcctttggcttcttctgggtacctgccggccggctaagctagctgatcgccggccgccggctctcgttgagctcttcttggtgccggccgcggcgttgttagtgtcgtctttgctgggctgcaggaagatcagcagcaagctaagctagtagcctccaaggtgcccggagatgtcgtcggcgctggaggtggagggctcgggctcgccgggcgtcgagccggcggcgacggcgacggcgagcaggctgaagcggcacgactcgctgttcggagacgcggagaaggtgagcggcgggaagcaccacggggggtcggcggtgagctgggcggtgacgctgcacctggcgttccagagcgtgggcatcatctacggcgacatcggcacgtcgccgctgtacgtctactccagcacgttcccggacggcatcggccaccgcgacgacctcgtcggcgtcctctccctcatcctctacaccctcatcatcatccccatgctcaagtacgtcttcatcgtcctctacgccaacgacaatggcgacggtggcacgttcgcgctctactcgctgatctcccggtacgccaagatcaggatgatcccgaaccagcaggcggaggacgccatggtgtccaactacagcatcgaggcgcccagctcgcagctgaggagggcgcagtgggtgaagcacaagctcgagagcagccgtgccgccaagatggcgctcttcttcctcaccatcctcggcacctccatggtcatgggcgacggcaccttgacccccgccatctccgtgctctctgcggtgagcgggatcagggagaaagctccaaacttgactcagacgcaagtcgtgctgatctcggtggccatcctgttcatgctcttctccgtccagcggttcggcaccgacaaggtcggctacaccttcgccccgatcatctcggtgtggttcctcctcatcgccggcatcgggctgtacaacctcgtcgtccacgagatcaccatcctcaaggccttcaatccgtggtacatcgtgcagtacttcaggaggaacggcaagaagggttgggtgtctctcggtggcgtcgtcctctgtgtcacaggcacagagggaatgtttgccgacctgggccatttcaacatcagggccgtgcagatcagcttcaactgcatcctgttcccatcggtggcgctctgctacatcgggcaggcagcgtacctgaggaaattccctgagaatgtcagtgacaccttctacaaatccatcccagggccgctgttctggccgacgttcatcgtcgcgatcctcgccgccatcatcgccagccaggccatgctctccggcgcgtttgccatcctctccaaggcgctgtccctcgggtgcttgcccagggtccgggtgatccacacctctaagaagtacgaggggcaggtgtacatccccgaggtgaacttcatgatgggtctcgccagcatcatcgtcaccatcgccttcaggaccaccaccagcatcggcaacgcctacgggatctgtgtggtgacgacgttcatggtgacgacgcacctgatgacggtggtgatgctgctgatatggaagaagcacctggtgttcatcctgctcttctactgcgtgttcgggttcacggaggtggtgtacctgtcgtcgatcctgtccaagttcgtggacggcgggtacctccccttctgcttcgccatggtgctgatgacgatgatggcgacgtggcactacgtccacgtgcggcgctactggtacgagctggaccacatcgtccccacggcggagctggcgtcgctgctggaggagaacggcggcgtgcggcgggtccccggcgtgggcctcctctacacggagctcgtccagggcatcccgccgctgttcccgcgcctcgtccgcaagatcccctcggtccacgccgtcttcgtcttcatctccatcaagcacctccccatcccgcacgtcgccgccgccgagcgcttcctgttccgccaggtcggcccccgcgcccgccgcgtcttccgctgcgtcgcccgctacggctacaccgacgccctcgaggagccccgggagttcgccgccttcctcgtcgacggcctcaagatgttcatccaggaggagtccgccttcgctcctcatcaagagatgatcgatgccgccgccgacgacgacgacgaggcggcggcgaggccgaggcggtcgacgagctcggccgtgcacagcgaggaggcgatccaggcggcgtcgtcggggaggacgacggccagcagcgtccagctccaggcgggcggcgagccgccggcggcgatggacgtggaggaggagaagcggctgatcgacagggaggtgggccgcggcgtggtgtacctgatgggcgaggccaacgtgtcggcggggcccaactcgtccatcctcaagaggatcgcggtgaactacatctacgccttcctgaggaagaacctgacagaagggcacagggcactggcgattccaaacgatcagctgctcaaggttgggatcacgtatgaaatctaggcatttgatacatctgatctgatatcaaagtatacatatatatgtgggaaaaaaaatgagcctagtataaaccatgggttttgttgatgatgctgatgttggaagagagggcaaagtgccttttttgtttgttgaataagtagtttcagctgaaagtgttggcaggcagggagggtttggtttttctttcgcctctgtacagtgtggtttgtgtaaacggcgtgtgccaacttgagtagaaggtttctcactggtggtgtgttgtccatgc

SEQ ID NO: 26281 - DNA, 1629 bp, Oryza sativa
  ref <308>: DATABASE ACCESSION NUMBER: AK101723
  ref <309>: DATABASE ENTRY DATE: 2002-08-28
ggtcccccaaacaaccccatccccaagaaactaaacctcatccccgcccccacccatgtccgaccaccaccacctcaccggcgaccaccacccctccccggcgagcgccgccaccaccgctctaggtcccctgctcctcctcccgtcggagctcctccacgacatcctcatccgcctcgccctcccggagctcctccgcgtccgctccgtcgcgcgcccgctctcccacgtcatctcctccccggacttccgccgcctgtaccacctctcctccgccgcctccgggccaggccccgcggccgcgtggctcctcgtcttcaagaagctccgcccccgcgacgccgcgctccgggggttccatgggccgtccggccgctggttccgcatccccgtctccgccatcctcgcgcccgcggtgccacccggcgaggacctctacttcctgggcgcgtccggcagctccttcctcttcgccgccaacggccgccgcgagctcgtcgtcgtcgacctctcggcgcacgccgcccgccgcctcccgccgtccccgctcggcccccgcggcacctcctcctggcgccgcttcggcctcaagctcgtcgccgatccccccgggtcgagccagtttaggtttctgttcgctgagctggtgaacaacacgccactcctcttcgagtaccagtccgagacggacacgtggcagtcatcggaggcggtccaggcggagggggcgtcgacggcggccgggacggaggggacgttcctgtgcgcggcgcacgccgggccggactgcgtgatggtgtactccgggccgggcgtggagcggccggtcttcttccggccgcggttcccgcacaacccgaacggcggcggcgacaggctccacgtgtacggcgacgggagcgccgcggtggtccggtcgacggtgatcgacgagccgggcaggccgcgggtgaaggtggtggccggcgtggacctgtacgggttcgggtcggtcgtcggcggcgactggcagctggcctccaccgtgccgggcgagctggtggaggggttccggaagccgtacgccgtgatgaccgggctgctgtcggagcgggagggcgtggtccggctcgtcctcatctccaactgccgtggcgcctgggacatcgtgtggctgtcgtacgaccgcgcccgcggcgagtggtggtgggtgcccgtgccggactggggcaccaaggggctcaacgtggccggaatcgccgtctcctccaccttctcccgcctctggccgccggccgccgcctcgtcctgcaccaccaccacctcccagtgaaccgaactcgccggcgtctctgcgtcaccgtgcggcttacggcgagcggtggggaattggattgttaggcccaacgtggcaatgggccccgcacccgtgtaagtggtgggcctcctcccccgtgcccgtggggccgtcgcataatgcgacatgatcttgcacaatggcttctccgatggcgacaaatcgtcgagtgcgagtgagtgtgcttcagataaggaggggtgtactggcgtgcgtgcaagcactcttctctatagttctcttttagtatcactgttcattgttcataagccgtgtgagtgtagctttgtgtt

SEQ ID NO: 26282 - DNA, 1370 bp, Oryza sativa
  ref <308>: DATABASE ACCESSION NUMBER: AK101724
  ref <309>: DATABASE ENTRY DATE: 2002-08-28
ggcggcgccgcgccgtcgccgggcggcgcgggcggcctcccgaacggccgcttcttcaccgtggggctcgtcaccgcctggtactcctccaacatcggcgtcctcctcctcaacaagtacctcctcagcaactacggcttcaagtacccaatcttcctcaccatgtgccacatgtccgcctgcgccctcctctcctacgccgccatcgcctggctccgcgtcgtccccatgcagctcgtccgctcccgcgtccagctcgccaagatcgccgccctcagcctcgtcttctgcggctccgtcgtctccggcaacgtctcgctccgctacctccccgtctccttcaaccaggccgtcggcgccaccacccccttcttcaccgccgtcttcgcctacatcatgaccgtcaagagggagtcctgggtcacctacctcaccctcgtccccgtcgtcaccggcgtcatgatcgccagcggaggagagcctagctttcatctgtttggattcatcatgtgcattggggccactgctgcaagggcattgaagacggtgttgcaaggaatcctcctttcatccgagggggagaagcttaattctatgaatttgcttttatacatggctccaattgctgttattctcttgctccctgctaccatcttcatggaggacaacgttgttggcattacaatagaactggccaaaaaggacaccacgattgtttggttgctgctgttcaattcctgtttggcatattttgtcaatttgaccaatttcttggtgactaagcatactagtgcattgactctacaggtcctaggtaacgcgaaaggtgctgtggcagttgttgtctcaattctaatattcaggaatcccgtatctgtaaccggaatgctcggttacactcttacagttataggcgtaattctttacagtgaatccaaaaaacgcaacaagccctgaatattttagaatgccgtaaatatggctgtcctttctcattccggtggatgcccagggctaatatatgacggggaactacatcggggacaattgcaacaaatcctgcactgtatggagcctgattggatagcaaggatagaagtccaataatacatgtagtttgcccatgggatctgggaggcattttgttttgctaatggaaatgatcaatagaatatttttttttttgtgtttagagaactgtggctcacgttgccaacattggttaatacggttagttcgtggaaattgtttgagtcattcatcggttattgtaagttcatgttcccccattttgttttttctctgaagattgcctgtaccaaactttgctccaggaccccctaatatattatgacagtgaatttaatccc

SEQ ID NO: 26283 - DNA, 1463 bp, Oryza sativa
  misc_feature (790)..(790): "n"=any one base of a, t, c, or g
  ref <308>: DATABASE ACCESSION NUMBER: AK101725
  ref <309>: DATABASE ENTRY DATE: 2002-08-28
ggtccattttgccatgagaatgattcttggtcgcctcctcgttgtggccgttctcgccgcggcggcggcggcggcggagagcgagccgcgtctgccggcggcggagcaggagggcgtgtacgcggtgctcgaggcagtcaacccgggcttcccctggcgcgccagcttccccgacgacctctgcctcgccggcccgcacggcgtgtcgtgcgacgacgacgacggcgggaacgcgtcccacgtcgtcggcatctcgctcggctacgtctccgacttctccgccaatccgagctgcgcggcgccctccgccgccacgctcctcacctccggcctcctcgccgcctccttcccgcgcctccgcagcctcttcgtctacggctgcttcgtcggcgacgacgacgcgcggcctctcccgccgctcccgtggcggctccctcccacgctccaggacctcgtgctcgtcaacaaccccgcgctcaccggccgcctcgccatctccgccgccagcctcccgctcctccgccgcctcgtcgtagcctcctccggcctgtccggcgacctcccgtccacgcccttcccgcgcctcgagcagctcgtcctctccggcagccgcttcgccggccgcatcccgagcgcgctcgtccagggactcgccaacgtcaagatcctcgacctgagctccaacctcctcgccggcggcatcccccgcgcaatcggcggcctcacgcagctcgtcaagctcgacctctcctccaacacgctggccggcccgatcccgggagagctcggngggctcgcgtcgctcgagctgctcgacctctccaacaaccggctcaccggcggcgtgccggccgcgctccgcggcatgacggcgatcagggagatgtacctcagcggcaaccgtcgcctcggcgggcgcgtgccggccgacatgttcgccggcctgaagggcatctccgccgtgggcctctccgacgccggcctcacgggcacgatcccggcgtcgctgggggagtcgctgcgcaacgtcacctacctggggctggacggcaacctgctggagggcgaggtgccgccggcgctggcgaagatggcgggcagggtccggcttcacggcaaccgcgccgtgtgcatctcgccggagttcctcgccggagcgcctcgccctcgcatcgcaggtgttccgtcgtgcaacgccacccaggctgctcccgtgacgcggcgccctgtggttatgccggttcccttggcatcagcggagaagccggcggcggcggcgccgccgccgccgatgaggatcggttcctgtgtcgtagtggcaatgctcttgcttatgctcagttagttgctcctgaatgattagtcaggctgtttagtttagcattagcaggtagattttgttgagttaaaaaaatgtaaagtagttatggtattggttgtgctactaacaagaaacaagtgac

SEQ ID NO: 26284 - DNA, 2182 bp, Oryza sativa
  ref <308>: DATABASE ACCESSION NUMBER: AK101726
  ref <309>: DATABASE ENTRY DATE: 2002-08-28
ggtctttggatgatgtgcttgttcatcgcaccagttgatctttactattggtgcatatttagttccaaggcgtcgttttagttaagctgctgaagcgttgagcatcttgtcatgctgatattcttatgagtggttcaagatggtttgttctgttttagtggaagtgaaagaaggggctgtcccctgcttatgggaagagaaaaagagatgtattttagcaaccatgtgtttacagtacaatccaattagttcactaagctattatttatggctgttatatcctgttctgagtatttatttgttatactgtaatggtattaaatttctggcattgttatacatgattatattcgatcatatacagctattagtaattcatgtagttagagctgaatgggagttttgctagaaagacattgcttctttcaacgacccttattcaaacaaaattaaagtacctttttctctgttgtgctgattcccattgttacatagctgaaacttaagtaattgcaaaatttgatggaactcatatattcttctactcttataataagggaggtttgtatgtagctacactcatgctatatgcatgcgctctgtctatctgacttttgtatttacatttgtattcaagacattgaggtcaactaaattctatgcccaatggtgcagccatatttcatacatgaatatggctatctctttgcctggtaggttatgaaatatgaactctatgtgtttattttgatgtgaaatggcctcagggcaactcattttgatgtatgagtatacatgtcaatccacacagtaggtcctgagatattttattaatgaccttttcacttttcaccatccttcacttgagaatatgctctggttgatagtagttagtttccgtgctttgacttattgccgaacccttgagagcatcttgtaatgttcaactcttatgaattgttgatgatgaccttatctcttttgatgaataggatgaatagcggcatggcaacccaagggccaaggccagagcactagggcctagagccgcaggagtggagctagagcgaaacagagggtggtgccacttgcttaatttactctactttagatcaagtttaagctgatacgggtgcttaagtttgtattgaggagggtgcatacatggtgaaaataggtaaggtatagctaaaaaaatttcttgatcgggttcctgggcacccccctaatatatactagctccgcccctgcctagaggcattcctagaaacttaggagcaaacgaagaaaggtagcagaaccagtgtagaggaggcattaggagaaatcttaaggacatttggtaactttgaaataccataatgcgtctcataaaaaatattctaattttaaaatttgtactatgtaataggtggttaaatgctgttcttctgagtgatggagttgcagattgtaaatcaatctttacttatacaaacgatgggccaatcattggcttgttctcgtctctttttttttgggtcaaaatgaattggaatagcaggtgcctttgaagtgtaaatataacagaacaagtgggtaaattttaatataattccgaaagaatcatcatccatgtgtcattttctttttcatgcaatgaacaacagatttgtatatatgtatttttaccatcagtaacagtcctttattaatgcatagtatgtggttctgcttttctgtagggggacgttgagttgtaagaactaagaagaccagatgcatctgctcagattttacaggcctgtataaccagttaacgagtggcaaaaaaaatgtctcgcggccgtgtctgatacataactttgccaggagatctatctgttgatgcacacaggctgccatggcattgttacccagttgctcttacatgcatttctgctggcataagatggtggaggttctgttgttgaacctggaacacaaccggtgctcagaagaattttgtatcactacaacctatcaggatttgatcgaacaatttggtatgttcatacacatttgagcaattgtacagtactccgaagttggtgttttctatcatctggtaattgtggatcactggcatatcgaggaattgtggatcactgacatatggaggaattgtggatcactggcatattgaggaatcaacctgacatat

SEQ ID NO: 26285 - DNA, 1480 bp, Oryza sativa
  ref <308>: DATABASE ACCESSION NUMBER: AK101727
  ref <309>: DATABASE ENTRY DATE: 2002-08-28
gactcgcactcgccgccgctgccgttccccatcccaagtcccagaccaaacaatgtcgacgcctagccagaagaagaggaggagtaaggggaaggacggcgcggtggcgccggtgggactgaggcttaatcgcctgggtcgtgcttctcctcgcgaggccgccgggaagccggtgtaccttgcggtggagcacgacgatgaccaggaggtgcccgcgcactccatcgtcgagctcggcggcggcggcggcggcggcgaagcccaccttgtgcttcacaacgtccgcgggatgtccttcgccaccgtggagtcgcgctacgggccccggatcgtaggcgtcggcggcaagttgttcaccacggtgtacgaccccaagacctcgatggagatccccggccccttcctcgtcgagcctaagctccggcccgtcctcatcccgcggggcagcaagctgtatgcgctctcccgaaccccttccgtcgtgcccggcctcgacttcctgccctggttcgtgtacctcgacctcaactacgtcttggtcgcccctcacgacgcgagaaccatgggatggcaccacttgccgccgccgcccatcttccctgtccgcctcaacccgctcaagtaccgtgacccgccggaggtccgcgtcgcctcctacgccgtggtcggctcccacatactgctctccgtgcagcaagacaagggcacctgcgctttcgacatggacaccaaccagtgggatatggtggacgccaacaacttgcctttcatcggcaaggctgttccccttggtggccacctcttcattgcccgctccatagccaatggcggtgctgctgcagtgtacgacatcagggtcttccccttacagccaacaagttcagggtcacacaagacggagttgtccatcctcaacatccccgtggtgtccaagggcattgttccagggcagcttttctgctccttggggaagggcatcttctcttccatcgacgttcgatctgctgctactcctggtccagacgccaagctgcataaagcgcgtatcgttcatcgcacctactctcaggttggaggggatgacactgaggacaataattatactgtcataaccaaacagcacagacagatttacaaacttattgatcggactcgtcatttggctcatccttcgccggttgttgctgctttaactatggaagcagaatgaccatgtgaaggtttgaacgaacagtggcaagactaggctgtatttggactgaaactgtccactatgatgaatgtaagtttggtgaaagcagcagtaatttagcagctataattttagatttggtgtttcatgcgaaatttgacttggttttggttatgcatctgcttgaactagacaacttctccggtgtctgttgtcttgtttatggtaatttgtggctagcaatggaatcgttatggatccttataaatatgcttatattcgttggtc

SEQ ID NO: 26286 - DNA, 1263 bp, Oryza sativa
  ref <308>: DATABASE ACCESSION NUMBER: AK101728
  ref <309>: DATABASE ENTRY DATE: 2002-08-28
tgaaccatcaaaccacacaccagacaatacttactaccactactactgctgctgctgccagttctagctagcctactgctcttctccgagctgaagatttttcgagctagctaggatggcagccagaatgggcagcaaggtcgctgcaatcctcgcgattctgtccgtgctcgtggtgcatggctcttgcaaggggcatcctgtgaactacaacgtctccgacgcctccgcctacggctccggctggctccctgcccgggcaacctggtatggcgctcccaccggcgccggccctgacgacaacggcggcgcttgcgggttcaagaacgtgaaccagtaaccattctcgtccatgacctcctgcggcaacgagcccatcttcaaggacggcaagggctgcggctcatgctaccagatcaggtgcaacaaggacccgtcgtgctcgggcaacatcgagacggtgatcatcaccgacatgaactactaccccgtggccaggtaccacttcgacctgagcggcacggcgttcggcgccatggccaagccggggctcaacgacaagctccgccactcgggcatcatcgacatccagttcaggcgcgtcccctgcaactacccgggcctcaagatcaacttccacgtcgaggagggctccaacccggtgtacttcgccgtgctcgtcgagtacgaggacctcgacggcgacgtcgtgcaggtcgacctcatggagtccaagtcggcgtacggcggcgccaccggcgtctggacgccgatgagggagtcgtggggctccatctggcgcctcgactccaaccaccgcctccaggcgcccttctccctccgcatccgcagcgactccggcaagacgctcgtcgccaacaacgtcatcccggcgaactggtcccccaactccaactaccgctccatcgtccagttcagctagatcaatcatccactgctgatcgaatatggaatcatattggctcgcgatcgatcgatcgatcgattagtttattctctactactgctgctgcaaaatttgcgtgggattgaggtgtttttttttattaggcgaggcctcatgtgctgtctggtctagtgtgtgaagtggtgaagtgatgcatgtgtgggaaaatggaggaggggcacagtaatacagtatgtgcatgtgctctcccgcccactgtcactgtactacccagtgctttgtaaccaaatcttaaggctacagaattataaatacaatgcttaagttaattacct

SEQ ID NO: 26287 - DNA, 3225 bp, Oryza sativa
  ref <308>: DATABASE ACCESSION NUMBER: AK101729
  ref <309>: DATABASE ENTRY DATE: 2002-08-28
gattcctcctctctccagagactcgccgtcgccgcagccattcccatttttgcccactcctcctcctcctctccagtaaaccctagcccacccaacctccaatccccccccaaccagcgcccgaatcgcagccccgcgaggccccaatcgagctagggttcaccgatttcgggggccgagccagcgaaggctctcagttttcgctgcgatttgtggggtgaaattttcggggggattttgatttctttctctcacggtgggggatggggagccggagggaggaggagaggaacgagaagatcatccgtgggctcatgaagctgccgcccaatcgcaagtgcatcaattgcaacagtgtggggccacaatatgtatgtaccaatttctggaccttcatatgcttgtcatgcagtggaatacaccgggagtttacccaccgtgtcaagtcagtgtcaatggctaaattcactactcaagaagtgcggtctcttgaacagggagggaaccagcgagcacgtgatatctacctaaaagattgggattggcaacgaatgaggttgcctgacaatagcaatccagacaggataagggaattcatcagagctgtttatgtagacaagaagtatgctggtgggaagtccacggacaaaccagtcaatgatagtgagagtgtaaagagcagcgaaaatcttactagaagacctagctcctaccattcgtattcccaaagcccaccttacgattttcaatatgaagatagacgatatggtaaacaagtggacacacttgcacgaaggccttcagatagggcattctttgatgggaagcttggcagttttttatacagtccaggtcgtttgagagatcagatgcatgaagatcgatttgctaatgagagtactgggtcaaggttttctgatttttcggcctcaagcactggtgacattagaaatgatgtgctttctcctagctctcaggatacagggtacagcagtccttctatccaccattcaaggaatgtgtcttctgaaaatcctccatcccatcggcatccgaatgcaacttctcaaattgattttaatggagtccgacgatcacagagaacaggttcttcaggaagttttggatcatttgatggtagctcagcatctaataagtcagttgattcaggtgccttacctgatgcacctacagaaaagccagtgaattctgctgtaaatcgtcagtctgttgcgccccccatggctcattcagcacaattgtatgcctcacagagcaatataaactcttcagtcagccaaactgctcccaccagggaatctgtgcaacatggaagggttcacatggtctctgtagcaaagccgccggtttcaacacagccaacgacttccacaaatcaggacttctttgatcagtcaatgcaacatccggtcaattctgcggcaccaatagatctttttgctggctttaaccaacaggctccatcagttccccatagagcagttgatgtaggcagccattctgttcctaaagaaactctgcatgacgttgtggttcagaaagccgtggcatcttcaccacctgttcaagccgaagcaccctctacatctcatcctgtccatcatgatctcttgagtctgtcgcctttgcaggaaccttcaatttcctctacccctccgtcaatagatttatttgctggctttgaccaacaactgccacctacaactagtgttcagcaaagtcaaccagccgaaccatcaatttcctctacccctcagtcaatagatttatttgctggctttgaccaacaactgccacctacgactagtgttcagcaaagtcaacaggcagccccattggttgctgacgaaggatgggctttcttcctcgatacacctcaacacgtacctccgacttccatttcaaacgtgcaagctcaggtagccaccgcaatagctgcattccctccaagtgagagtcttgctaaaggaactaatcagtcaatgttgccaacttcgccaccaaatgctttgattccacaaagttacccgcttatgatggatcagtggagtttaaatgctgaagaggtgaagacccctgtctccaaagaaacctcacagccttggaatgcctttggtgcatctactgggaacacacccaacgactcattcacatttaacactatctctcaagtagcacctaatcacttcaatgtgcctagtgttccacatgctgaagccagaggtccacaggatttgcctagcagtgaacctgaaagactaacccctggggatataacccctggtttcaatgtctctcctggtgacatggctgggccatcatttcgtggaccacttcaacagcaactggacatcgtgccatctcagcctgcaaaatcaacaaatccatttgacatggcatttgagtctgatgttgaagccagtaacatgttcatggatctgacctcgctgcaagaaacgttgccaaatccccatgtcaatacagattattccaacttgactgagtcatggatacctcataattctaacatgccttatatttcctctgggccacagggagggttatcatacatggcaacacaagtacaagactccctcatgctgaactccgcacaagggtcatttccgcccagaaatccattcgaatgaatgctgatagtggtggacagataagcgaagcagtttgcaactgcgtggaacctaaatggaccatggggtagtcgggtgtaccacacgcatcgaagtatatttgtgtcaaatctgcacattgaagtgaatatatatatctcggatttcatactctctggtttcctgtatatgagaaaggagtgttcagaataccaaacaggcgggctggagttcttttttgcctgaagcaagctgccctttttcattgctgttaccctgtctgggaccctggtgaaacctgcgggttttttctcacctggctgtcatttgaccttattggggtgtccttgttaaacccaattgtcattaaaaaaggtcgtagacgcatacccatcaaatgactagatcatttgcattctttggttcttcagcatgaacttgtgaaaatgtgttggttcaccgaatggacgcactgttgcgaggtgttatttattgagaagtagtagtatattgcttttcttggtactacgttgaaactgtttatatataactaaaacttgtcattggccttgtttgt

SEQ ID NO: 26288 - DNA, 1742 bp, Oryza sativa
  ref <308>: DATABASE ACCESSION NUMBER: AK101730
  ref <309>: DATABASE ENTRY DATE: 2002-08-28
ggcggactctcggagagcggttcgagggggccgtcgtttgcgaggccgcaagtcgccgtcggcggccgtcgccatcgccgcaacataaaaaaagcgagcaaacccgttgctgcgcgctctgcgcttctgcccttttacgaccgaagaggtagccaacccacgcatcccccccctgacctgccccctccacagccgccgccgccgccgccgctacggctcacgagagtaccgaacgatctgctgccacccccaacccaagtgaccaaccgaaggcggagggtagcaacttcggtctgctcatcccaagttaggcatggcatcaactgttgccatcaatttgattggtgctcaggctggcattatctcaaagttaaggaattgcgacatcacaagctacagtggcttaaaggcaagatcatctattagttttgagtcaaggtcatcattcctgggtcagaatgcatctcttcgatcatctatctctccaaggattgtaccaaaggcaaactctggatctcacatttctcctgaggcatcttacaaagtggcagttctcggtgctgctggtggcattggtcaaccgttgggcttgttaattaagatgtctcctctggtctctgcactacatctgtatgatattgcaaatgtcaaaggagttgctgctgatctgagccactgcaacacaccttctcaggttctggactttactgggccctcggaattagccaactgcttgaaaggtgtggatgttgttgtcatccctgctggagtcccaaggaagccaggaatgactcgtgatgatctttttaacatcaatgcgagcattgtcaagacacttgttgaggctgttgcagacaattgtccagaagcctttatccatatcattagcaacccagtaaactcaacagtgcccattgctgctgaggttctgaaacagaagggtgtctataaccccaagaagcttttcggagttaccaccctagatgttgtcagagctaacacatttatagctcagaagaagaacctgaagctcattgatgttgatgtcccagttgttggtggtcatgctgggattactatcctaccattgctgtcaaaaaccagaccatctgtcaccttcacaaatgaggaaactgaagagctgacaaggaggatacagaatgctgggacagaggtggtggaggcgaaagctggtgctggatctgctaccctgtcgatggcctatgcagctgccagatttgttgagtcatccctccgtgcattggctggtgatccagatgtttacgagtgcacatttgttcaatctgaattaactgagctgctgttctttgcatctagggttaagcttggtaagaatggtgttgagtccatcatttcttccgaccttgagggagtgactgaatatgaggccaaggcccttgagtcattgaagcctgagttgaaggccagcattgagaagggcatcgagttcgtccacaaacagcaggctgccgctacttcttgaagtgtggagaatgactatcggcatgagagaagataataaatgcagaaatggttctcaatagcttttagttttgaaggcggaatttttcgtgtctagttgttgcttgtttagtctcttctgatcacatgagggcgtggatgcccaaactgttgcctgttttcatgagctatttgacccttgtgcctgcatcttgatgagatacacaaactaaggaataaagtagtttttgattgttgcc

SEQ ID NO: 26289 - DNA, 1974 bp, Oryza sativa
  ref <308>: DATABASE ACCESSION NUMBER: AK101731
  ref <309>: DATABASE ENTRY DATE: 2002-08-28
gaccccctcttctttcttacctcccccaaaccctagccatcccgatccatccactcctcgagatttcggcggaatgcctccgccgccgccgcggtctcctcgctccctttccagctagggctctccctgcccacaccctcccccgcccgcgagatttgcgcgcccccgcccagcgccgattcgagctgctcctgctttgctgtttcggtgggggaggccatgaacaacagcgcgttcagcgaggagatactcgccgagaagctcgccaagctcaacaacacgcagcaatgcatcgagactctttcgcattggtgcatataccatcggaagaatgcagagcaaattgtccagacatgggcgaagcagtttcacagctctggaaatgaacagaagaccccttttctctatcttgctaatgatatcttacagaacagtaagcgcaacggtacagagtttgtagaagaattctggaaggttctccctggtgcgttgaaagatgtaactgaaaacggtgatgagcgcgggaagaaggtggtcagtaggctggttgaaatatggcaagaaaggagagtttttggttcacgtgcggggggcatcaaggatgtgatgcttggaactgttcccctgcctgtattagatatgaccaaaaaacggtctcacggttcctcaataaagatcgtcaaaagagactctcgttctgtaaaacttagactaggtgttgggggaaccgctgagaagattgtatctgcactgcacactgttctcagtgaacaagcagatgaagactctgatctggagaaatgcaaaacctcaatgcggcgtgttggaaagatgcagaaggatgttagcagtgcttgtagtaaaggtgatgatcctcgtcgtgaaaccctttgcacagaactaaaggaagaggaggatagcatgacagaatgcattgaaaagcttaaagtagttgaagcaaatagagcaactgttgtgtctgaactgaaggaggcattgcaggaacaggaatctgagctggagaaagtccgtactcagttacagctggctgaagctatggtagaagaagcagccgacatgcaacggaaactcaagaacgagccagtcattccttcgtccaagcacttatcctcagtagaaccaggaaagccactttctaatgggcaggcgaaggatcagcagaagacagctgctgctatcctcgcagacaagattgcagcatcatcaaactctcagcagatactgcaatctgcactttccaagtttgctgctgaggaagccaaaaattcatccgaaactcaccaggataagaggctgaaaattgaacattcctcacaggtcccaagtgtcgcgaatgctgccgcttttgttccaatgccacaaatgaccaccacaacagcacagcagccccaggcaatcttagttcagcagactcctatgcaaaaccagcctcctgcacctcaaccccaatacaatatctaccaggcccctccccatcagtttgtccagcagcctggtggtgtaatgatgggcatggcgtacaatatgagcaccatggctccaccaccgcctccaccgccacagatgatgaacctagcaaggccctcaccttcaacaccccagccaccaatgggtataatgccacagactcagccgccaccgcccgcaccaacgatgcttcagcaacaaatgccgatgaacgtcggaccaccaatgcagttcgcccttcagcagtccggcgcgccgtctttcaggcctttgcagccgcccccggggatgcaattcttccacccccaatctcagtgacatttttggtagtccagctcctgttaaaactgtcgcgttttcggtgttagtattgactggtagacaaaaggttctgactgttgtagggtatactgtttggttgttctttacctggagatgttgtacatgtaatgcgaggaaactaacaggaagattcagttaagtgtt

SEQ ID NO: 26290 - DNA, 1613 bp, Oryza sativa
  ref <308>: DATABASE ACCESSION NUMBER: AK101732
  ref <309>: DATABASE ENTRY DATE: 2002-08-28
ggcgggaggaagaagggaatctgattgcttccttcttccttcttcgattcagaatcactttgtttcttctttcttcttctatctatctatctacctgtggagacgagaggagaggaaatctatggcgtctcctccttcgccctccgcatcacgcgcagtcgcagtcgagagatcaccggggttcggcttggagccctcctcctcctcctcctcgtcgtcgtcggccccctcaaggaatgagctgctgactatggtgaaaaaacattcccatttgattgggtggacagttgttgatgctgaagatgatgcatcagacgtgggaatggatgatcgattctggcatgaaatgcttgatcttttcttcgtgcgtggtagggtttcaaagaggagggaagaggatgacctcgtcttttttgttaataataatatgaaaatgcatggccatgggttcaacgataacatggaagatccacctcctttttttgtgagaagatgggctcctatgcttgaaaagatcagcaatataaattcagctggagttgattgggagcgttcattctatttgaatttaattgctcacacatcatacactgttacagttgcaatatgcagtgtcagggatcttcgcagccgtgtagagaaaagcaaaccattatcaccagtttataaggtcacaaaaactgtgtatgcatccccaagccgtgtaaattttcatcttgatcgaagaaaggctgtggaaactgtacctgcatatcccaatatttgtttctcagttgatgacttcgatgatacttttgatgctgttgttttgtcagaccccgaacattgctattgtgtgattctcaatgcacatgatggggcagcttttcctgaagacactgaatcgaagaatgccagctcaaatctactaaacactgggagcaaccaagaaaaaccaccaaagagaacactcttctcaggctacgttagctaccaaaatgttcgagaagcctacaatgctggcagatcacaatttgggagcttactctcactcgggcatgaccaaactaaacttgataaactttatatgaggggccctgaagggcgtggggaagttgaagtagctgtttctggaattgcagatcagagccatgagagatcaaagaaagatccaggagatagctttcgagtctttgttcatagggcagcttctgctgcatcaaagctggcaaagcatgcctacgaggctgcatctaccaacaaacgatttgatcatgagcttctgcctctgaaatgttgcttgatgtcggtatctcttccttgggactacattgcacatgacctgctacacaaggaaacccctccgctggacctatgagagactgcgaattcccattgtgcaccagaaagaatgatatatgtgcatgattgtgggaaagtttgtgtcccttgggctcgatatagtgtaagaaaacagtgagcagagaagcagtgctgcgatgtacatgtgtactttaaacagactaaaacttgtagaattttcatgtgtgtttgtacaatgttgaaagtaggcgatgaaataatgtaaatatatatttttttggttgtcatgaggaagactcttcactgttgcc

SEQ ID NO: 26291 - DNA, 1855 bp, Oryza sativa
  ref <308>: DATABASE ACCESSION NUMBER: AK101733
  ref <309>: DATABASE ENTRY DATE: 2002-08-28
aatggttcacaaactgcacaggagagttcggccgagtcaacacttggtcagaacaaagggaacaacatggctgcaaatggtagtggaacaacagatagtagtcagtcagtgaaaagtaatggagttccagattgttccacaaagggaaacagtaatgcctctcctgtacctgttgttccttcatcactgttgggtataggtggttttgttccttctgcgcagattgccgggatgcattcttatatgatgcatcctcaaggtgttcctccatctttagcatcgcctaactccgctgttcctcagtttggtagtttccagtcacagtcgacaattcaaccaaacatgcagtggcccaatcaacaggaagctcagaatgcctctcagacaccagatgaaacaaactatcacacatccccaccagatcagaaggcattgcaacaagctgctggtaataatgatgagctttctttgaagcagaatcaggcaacccgtgcagaacatcttacagctacagcccatgggaaacaacagcaacaacaacgtttcccaagtgtggtttctgaatccactcatgaacaaaagttacaggttgtggaatccaatgtaactgaacatttagtttacaatgagcaacaaaaggcccaggattcatcttcaattgtcagccctattcgaaaatttgaacatcaagagcaaacaaatgaattcaaggatgaaaaagttgcatcgggcaaccagtcggaggagcaggtagctaggcatcagcataaagcttcagattttgatgcatcaactactcaaatccacttgaaaggtggtgcagcagagttcactgctaacgttgggaatcagactgacacgcatacttctgctggtggtggtttgggttcactcttacctcgcataccaaaggagccttcccttctagatgagagatcccttctggcttgcattgtacgtgcagttcctgctggacctgatggccgaatcaagattagcacaactctaccataggcttggcaaaatgttggctcctcttcattggcatgactataagaagcactatgggaagctagatgattttgtggctagccatccagagctctttgtgattgaaggagacttcattcaccttcgggaaggagcacagcagatcatttcagctactacagctgccgccaaaattgccgctgttgcatcttcggctccttactcattgttaccttcagttgctgtcactcccgtggcacaaagcactaggcaaaagagaggacctgttgttgattccagatcttcaaatgtaatgccatctagaaatgggtctaccactgctagctttggagatcagtttgacaagggtggacatatcccaaaacccaacgatagtgttggttataacattgttcaggggattggtgatgtaacaattgcaagtaaagtaaaagacatccaggagaatggcttttcagatgaagttcgacctgggcagtcatccatgcatgctgtttctgcaaatggagtcagacaggaacgatctggccttcctgcaggtaataccaggcatggttatggtgggaagcaacagggaaggtctacggggcctgcatacatttccagaagatgagcaagtggcttgtcgttcggtccagttggtttgaagggcagtgagcaaatcatgtgaagctatgttttggtttaaggtttaaaagggttgaagtcgaagatgaccagaatgaattgttgtgaatttaattccgcaccaattgcttttcgcagcgcctgtattgggccatgttttggcaagttgtactgaaactagttcccgatcagaaaatactgaggaagttttgcaacc

SEQ ID NO: 26292 - DNA, 2320 bp, Oryza sativa
  ref <308>: DATABASE ACCESSION NUMBER: AK101734
  ref <309>: DATABASE ENTRY DATE: 2002-08-28
gactcttcccccaaatccctcctccccatcgcggcgctgccgccgctcctcctccggcagccagccatggccacggtcacgccgggggtgctgctcaagctgctgcaggcgatgcacaccgacgaccgcgtcgccggcgaccaccgctcccacgtcctccaggtcacggccgtagtccccgccctcaccgcctccaccgccgactccctctggccctccaacggcttcctcctccagctctccgacggcctccactccacctacgtccagccatcctccgccgacgccgacgccctcgtctccgcgcgcccgcaactcgtcggccacctcgtccacctcgaccgcctccgcttcgcccgcccggtgccccgcgccgtcgggatccgccccgtcccgtcctcccgcagcgtctccttcgtaggaaacccggagccgctcgtcgcccgccccgccgcgtgctcccgcggctacgtcatccagcccgggtcccactccgactccgcgccgccgctcatgccatccagttccggcaatgcggtgcagtccgatgcaacggatgccgtcaagaggattgttctcgcgcccaagagcgtctccgaggccgcgccgccgcccgccgtttcagccgccaagaggcggttctcgtctccggcgccgtccaagcagcgagatccgtcgccttcggtcaagggcggcgcgtcacggccttcgtcgccctcggtgaagggcgcttcccgagcgtcctcacctgcggtcaggggcacgcccagggcgacgtcaccagcgccttccaaatgcgtggtgcccagccttgtttcggccaaggaggagaatcgccgcacggcgagggagccagcgattatcgtgccatcgaggtacaggcagccgtcaccggtaggagggaggagaggggcggcgtcgcccgcacccggtgggaggcgcgcgtcactgtctcctagctcccggaggctgtccggggaaggtagcagcaagaagaaggtcggggtgttggtggctggtatctccaagatgacggatttgacgaatgggtcggctgttaagccggggaggaagagctgggacaatacctcaatcgcagcagcggctggctctgtgatgaaatcgaaggtcaaggtggataagagtactattctgaggacacaggaagcaatggcaagacgactgagtgatgttacaacagaactatccagtaacgatgatgattcatctgtagatgagaagccaaagccacggaagaagatagagtcacctgcagtaaagacgaaagcaatggctccaaaaattatgcttcatgatcctaaatggaccgatggaagcattccattggatggagtttctgatgtgctttcaaagatgggaaaggaagccactgaacgaagagacgcagcagcaattgctgcagctgatgctctccaggaggcattaatcactgaatccgtaatcaggaacctaagtaaattttctgaacttacttcagcatcgaagacctccaatccccttccaacagttgatatcttccttgctgtctatgaggatactctcaaatggaagaaaattgctgagtctatatccaccaatagaactgaaactgcatcatgggagaattcagctactcattgggttgaagcagcattggcaactgatcttgaagtcctaaagttgatgaataaggcacctgaatcgctctctcggaaaaggggtgctgataagccaaaggctccctcggtggtagaagctccaagaacaaccatatccaagaggcaatcacatgggacttctgcaaaggtccagtcaaaggtcttaccgacctctacagcgagctgcgcatggaacaaaactcagggcgtgaatgagacggctgagcttgccacgaccttgtgccgtgagatgcatacgtggttcctgaaatttgtggacgaggcaatggatttgggtttccacctttttgaagatcagaatgttgcaagtaggggaaagcagagcagccacataacaatggtactgtcccagttcaagaagatcagtgactggttggatggagtaggcaagattgcagaagaggctacaactaaggataaggttgagcagttgaagtgcaagatttacgggttcgtcatcaatcacatgggatctgcatttgatagctcggtctcgatttcatcaaggaattgaggaatgcttaaagtaagcctttaagtttcttctcttttatttttgttcattggggatgggatcaaagctacataattctatgacgagaggtctgctacagtttgtagaagctactccttcagttatt

SEQ ID NO: 26293 - DNA, 1582 bp, Oryza sativa
  ref <308>: DATABASE ACCESSION NUMBER: AK101735
  ref <309>: DATABASE ENTRY DATE: 2002-08-28
gtcttggtgcaattgtcttccaggctggtgcagccataatgacgttcgccccttcattcaccgtgctcatgatcgggaggctccttgctggtgtgggcattggctttggtgccatggtatctgcagtctatatcgctgagatatcccctgcagctgcccgtgggactctcacatccctccctgagatctgtatcaatttagggatcctccttggttatgtttccaactatgctttctcgggcctttcagagcatatcaattggaggattatcttggtgttggtatcctcccatctgtcttcattggatttgcactttttgtgatcccagaatcacccaggtggttgatgatggaaaagagagttccagaagccagggcagtattgctgcagataagtgagtctgaagctgaggttgaagaaaggattgctgagattgaggaagctgcaaatcttcttaaatcgacgaaatccgaggacaaggcagtgtggatggagctgttgaacccttctcctgctgttcgtcggatgctatatgctggctgtggtatccaaatgttccagcagatcacgggtattgatgctactgtctattacagcccaactattttcagagatgccgggatcaagtctgatcaggagcttcttgcagccacagtggctgttggttttactaagacagtgttcatattggttgcaattttcctcattgataaagttggacgcaaaccgcttctttatgttagcaccattggaatgactatgtgcttatttgtcttggggattgcactcacattgcaaaagcatgccatgggacttatttctccaagaattgggattgacctagcagtttttgcagtttgtggaaatgtggctttcttttcaattggcatgggtccaatatgttgggtcttgtcttcagagatatttcctttgagattacgagctcaagcatcggcactaggtcaagtaggtggtagagtgagcagtggtttggtttccatgtcatttctttccatggcccgtattatatcagtggcaggaatgttctttgtctttgcggttatctcgactgtctctgtggcctttgtgtatttctgcgtgccagaaacgaaagggaaaactctggagcagattgagatgatgtttgaaggtgggaaagaatggagagggagtgagatagagcttgaggatacacaacatttaatacagagcagcaagaagtctgtgtctctaggctgacactattagaaacaataaattcgaaatcattcgatgttcaatgatgaaccatacttatcctgcttccatcgcctacgggattctgaaattcaggtctgcaaaatgatcaggctgccttggactgctacggattttgagggcttaacacgagtatattaggtgtaggcgcaaaacagcatgtaaatgtctgctttacacaactacatcccaaaatgttacctgggaggacacagatgatgttgtatatggcggtatcttccacctaccaaaaaatatagttgttgaagttccttattccacagtttaattttaatagaggaagaggtgtgtgatttccaaccg

SEQ ID NO: 26294 - DNA, 2514 bp, Oryza sativa
  ref <308>: DATABASE ACCESSION NUMBER: AK101736
  ref <309>: DATABASE ENTRY DATE: 2002-08-28
gtcgtctcgtctccccttcccttcccccccgccgccttcgccgccgacgcgccgatctccaccaccccccacctcgctccgccgccgccgccgcctcttgctactgcctccctccctccgccgcatactcccctcgccctccgaccactccccctcctctactcccccgtctcctcctcgccacttcgccaccccgccgccttcgccgatcccctcacccatcccgccgcgagctgagcagaggagccgtgggtttccgtcgtcctgctgcttccgcctccgtgatcgagtggtgcgttctcatcaacgggccttgtgcgctaaattatgcgatcttcatgggctgactcagctgcgaacgccgaggaatcggcgcccgcggctgctgctaaccacggcaactcgcgcctcccgcgcagctcatacgttcccccgcacctccgcggccaagcggctcctgcagcgccggcgcaagctggcgcgctgccctcggccgccgccgccgcgcagccttctgttggccagcctggtgtggttggtggccctcgctgggcgggcattgtgaatggtggtggtggtggtggtggtgggagcgtaggtggttctcgccagggctttggtgctggtggccgcggtggaggaggtggtggtggcggtggtgcatggaactcccgccctgggggttgggaccgaagagaccgtgaaccggatccttttgccaatagtgaggctgcggaagttgactttgagggcgagaacactggcatcaattttgaagcctatgaagacatccctgttgagacaagtggccatgatgtgcccccaccagccaatacatttgcggagattgatttgggtgacgcgctgaatgagaatatcagaaggtgcaaatatgtgaagccgacaccagtgcagcgttatgccatcccaatctccattgcaggacgggatctcatggcctgtgcacaaacaggatctggaaagacagcagccttttgtttccctatcatcagtggattcatgaggtcaaggccaccccccaggtcacggggttccaggaccgcatatcctcttgcactaatcctatctcccactcgtgagctttcggtccaaatccatgaagaagcaaggaagtttgcataccagactggtgttaaagtggtcgttgcatacggaggagcgccaattactcagcagctgagggagttagaaagaggtgttgaaatccttgtggcaactcctggccgcttaatggatttgttggagagggctagagtctcactgcagatgataaagtatttagctcttgatgaagctgatcgaatgcttgatatgggatttgagccccagatacgtaaaatagttgagcagatggacatgcctccacgtggagagaggcagacgatgttgtttagtgctacatttccaaaggagatacagagaatggcttcagatttcctcgccgattacatatttcttgctgtcgggagagttggttcaagtactgatttaattgtccagagggttgagtttgtccttgatgctgacaaaagaagctacctcatggaccttcttcatgcacaaagggcaaatggtacacatgggaagcaagctcttaccttggtctttgtggagacaaagaggggagctgatgccctggagaactggctttataacaatgggttcccagcaactagcattcatggagacagaacacaacaggaaagagagtatgccctgagatccttcaagagtggagcaactcccatcctcgtggcaactgatgttgctgctcgtggactggatatacctcatgttgcccacgtcattaattttgacctcccaaatgatatagacgactatgtccatcggataggaaggacagggcgtgcagggaaatctggtctggcaactgcatttttcaacgagagcaacaccccactggcaaggccgctgagtgagctcatgcaggaggctaaccaggaggttcctcaatggcttgagaggtatgctgcccgttcatcgtttggaggcggcggcgggagaaaccgcaggtcaggtggtggtgctaggtttggtggccgggacttccgacgagacagaggcagtggtggtggagggtatggtggtggaggtggaggttatggaggtggcggatatggtggtggtggcggtggaggcggctatggtggcggtagcagctacggaggtggcgggcaaggtttttctagtgcttgggactgatcctgatccagagctgtcatgagaactgaaatttgaaacaatcgtgctctattggcctccctttggtgacatggaaatttgaaatttgagttgccttttgatgatagtatggtgtggcatcgccttcatcattggcggttctctcagtctggtgttgatttttccttttttgtgtactgtactagggattgcttgtgtttttttatctgcgaattgtgaactcatcttttaatggggcctcttttattaatttctcctttctactgttcc

SEQ ID NO: 26295 - DNA, 1760 bp, Oryza sativa
  ref <308>: DATABASE ACCESSION NUMBER: AK101737
  ref <309>: DATABASE ENTRY DATE: 2002-08-28
gagactgatcgccgcctcctgattcccgaagctctcaacctcaccgctacgccggccgctggcgtcgtcgcgctcttctcgccccggcccgcgcgaccagacaagcacagcggccagcggccgccaccgccagccaagccaagccaaagcaggcatgggctccctcttcatcaggttccaagaggctgtcaaaacactggctaagaatccgatgtttgctaacaatcgattgtttgctcgagatccaaggcatctccaattcgaagctgacgtaaatcgcctgtttctctacaccagctattaccgtttgggggctaatgctgaagagaaggacgcagaggagattattgacatggctagcaaagcttctgtttctgagcagcagaagcaagtacaggagaatgttcactatcaacttacaaatatgtgtcaagcaatggatagcattcttcttcctgatacaaaaaatggtgcttcagaagctaataattatcctcgacgtagtgggttgagtttcgctgttggcacaggagttgcatctgcaaacaagccagatgtcccttctactaggcctttaaatcgcgctgaattgtcaaataaatttagggatcactttcaatacacccttgacatcaggccgtcacaaatccctcacaaagatgcagggcaaggtctgttcttatctggagaaactaatgctggtgctgtcctagccatctaccctggagttgtatattcacctgcttattatcgatatatccctggatacccaaaaatcgacgcgtgcaacaactatctgatcacaaggtatgatggaacaataattgatgccaaaccatggcaattaggtggtgatagcagagaaatatgggatggctcagatttggtggattacaatgcagtgccatccaaaagccaagagagcaactctgatagggcatggaggatgctcagcaagcctctgaagaagggtcacactgaaaattttggggaagtgcttgaacgacgaaacccactcgcttttggtcactttgcaaaccatccaccaaaagggtcaactcccaatgtcatgatctgcccatatgattttccattgacagagaaggacatgagagtctacatccctaacattacttttggtggtgaagaagagcccgttacaatgaaacgatttggttcattctggttcaagtctggacgttctggtaatcaggaaggggagtctccagttctgaagactctagtgctggtgagtacaaggtccatatgtgatgaagagctcttcctgaactaccggtacagcaactcgaagaagcgaccagagtggtatatcccagttgatgaagaagaggataagagacgatggagctagttttgcacatcttagctgtgagcctgtaacaattcttcctgcattgctttctaacaattatttttgtcccggtgtcgatcggcaaattgcaactgggagtgatttagcttctgaagtgagatggcaattttattatgctcatctggagtccttgatcttaattaccattttggtagagtgcctgttctatactcttctcacaaggcttttgtaatgcataaaaaatatgagtaccaaactaccagttacatggtcattagtcctgggaactatgtgttcttaatcccaatattcttacggggaaataattcatcaatggttatggatatatcattacggttgctaaataagtactatcatatggttgtgcatagaaaagggaatcctg

SEQ ID NO: 26296 - DNA, 2528 bp, Oryza sativa
  ref <308>: DATABASE ACCESSION NUMBER: AK101738
  ref <309>: DATABASE ENTRY DATE: 2002-08-28
cctcctcccttcccttcccttcctctcgccgaaccaacgcggaagaaggagctcgcccgccggctagggtttgccgcacacccgccgccgagcagctagcaccggagtgttgggaggggaggctcgcccgccgccgccgccatgccgcagtcggtgctcgtcgaccgcgcgacgagcgagtcgctcatcgggcccgactggtccctcaacctcgagatctgcgacatcctcaaccacgacccctcccaagccaaagatgtagtgaagtctatcaagaaacgcattgggcacaagaactcaaagatccagcttctcgcactaacattgctggagacactgattaaaaattgtggagactttgttcatatgcacgttgctgagagggatatactccatgaaatggtgaagatagctaagaaaaagcctgattatcatgtaaaagagaagatactaattctgatagacacttggcaagaagcttttggtggttcccgtgcaagatatccgcaatattatgtagcatatcaagagctcctgcgcgctggagctgtatttcctcaaagaccagacagctctgtgccaatctatactcctccacagactcaacctctacggaatcttcctccagctctgcgtaatactgagcgtcaacaagaagcacctgaatcttcttcaacaccagaagtacctacactgagtttgacagaaatccagaatgcacgtggtgtcatggatgttctttcagagatgttgaatgctattgatcctggcaacagagagggtctaagacaggaggttattgtggaccttgtggatcaatgtcgttcttacaagcagagggtggtacagcttgtcaactcaaccacggacgaggagctgctaagccagggtctttcattgaatgatgatttacagcgtgttcttgcaaaacacgatgcaattgctgcaggcatagcagttcgtgtagaaaaaccaaaatcagtccaggcccgaggggacaagtctccatcaatcaaaccagaaggggcaaaacagccagatcagaggtcttctgaagctgccagtaccgtgactccatttgagcaattagcgcttccagcacctgcatcatccagcagttccaaacctcctgtagaaccagctgttggccctagtattgacctacttagtggtgatgactacttcaagccagaacctgttaattcccaggcccttgtttctgtaggcaatccacctgctgcttcagccaacaataccttggacctggtagacatgtttgcacaaagcaatgttggcaacaacccgaaccctgctgtcacctcttctatgttgaattcaaatcctagtctctctgagccacagctgtatccctcacagcagactgtgccaccacaacagccttctccatactctaatgggttaacttcaaatacaatggcaccgtatgatcaaccctctgacataaacgccacaggttcatggaatagtcaatttgctcatggaatgcttcctccacagcttcctccacaacttcctccacagcaaccaccaaattacggtcaaggtcaagatcagagtggtgatctcccaccaccaccctgggaaactcaacctgcagaaagtgatcaattccagcctgggcaacctcgtgggctagcaatgccatcagggcaaattggaggcattcaatcccaacctgttcaagttcagcccgggcaagttgcaccattacaaccaatgctgaccgggcaacccacaggaatgcagtttcagcaagggtttggggatcagcttggggctcaacaaacacaacccttgcacacaatatggtggaatgtatcctacaatgcaaggtaaccaatcagctggcatgtatccccagcagatggctggagatttctaccagcaacagatgtatggtggtcagatggctggttatggatacggtcagcagtctggaggatactatgctccaaacgctgcgtatgggtatggcggtgcaaacgagctttctcagggaatgaatggccttgcagtgcaagataacagtttgtatggaacttctgcatcctcttccttccagcagccaatgaggccatccagacccgaggattccctctttggtgatcttgttagcattgctaaaacaaagcctagcaaaactgcagctaataaggctggtggcttgtaaagatgagtggatgcttattaacacttgtggccgcggagatagcttttcctcatagtacataagttctttgaattatttttctctattggaaagtagtaggtgagcgttatagattctgaaattcatagcgagtgcggttcagtaaatttttctctgtcaacttgcaagcaattatagtgtgtttgcttcttgcaagctcttaatttcctgcgccatcaggagttttctgtagtctgtaaaccttggtaagaaaaaaccattgaacattctttaatgtttcctgtaaagaattgatatcgtcaagtattatactggtagctacaatcttgttcacagg

SEQ ID NO: 26297 - DNA, 1422 bp, Oryza sativa
  ref <308>: DATABASE ACCESSION NUMBER: AK101739
  ref <309>: DATABASE ENTRY DATE: 2002-08-28
gagctcctccgcgcggtaggctgcaacctgcagctcgtcgacgccggctttgattccgatcgtctcaccctctcctctcctcgccgcaccagatccgcatcggcatcgttggctaggcatggagaatggggagggaggaattgtactcgtgcctgtcggtgcctcggggtggagtaggattaatcagagttggggggtgctcctcgtatcgttgtcggctactcggccctctgactttagcagttgaaggtgctgccggcggcgaggtggtcgaaacctcctcggcggtcaatgctcccctccaccacgcccagagatgcgcatctctaccgtgagggaggagggcacgccagctgaggagacagggacggcgaccgcaacggccatcctggtggaggtggtagtgtacgaaggagccgtgcagcaccatatcctcactgtccctgcagttccccacacgagcctgttgcctctattgctgtcctgcgacgccaagacatgaaaagaggcgccgacaccctgcgatggctacttctccgtctgagtctgcgacctgcctcttgctccactttggtaccaccaccaccacattcccatggccagtgctggcctctcatcctccctacctgccactgctgctagagtgctcggtaagttcttcctaaatataccgacgacgggtgttcattgccaaatcttcagcactaaatattattaggttggtagagtaataatctcctttcagcacttatctttcagatctgtgtgtactgcatggcattttttcctaggtgagaagtgatattaaacttatctaaagccatcgagcaacaaacttataccacttcctaattttgtccagctgttcatatgtcacactctttatatctgaagctgtttttgtaaaggcagtgttctatgattatagaagtaactatttattcattttctggtatatgtatgactccatgttagcttgaccaacaataaaatggatttacacttatgaatattttcactgtattctttttcttgataggagcgcaatcaacaatagaaccgtgttgaatgtaccagacaatggtatggccatgcaggtcccatgaatatattctttttgctaccagctagagggatctgatgtacaccagttccatcagatactcacctgcgctgttcaggttttcctagtcaatcggcttatgctatgttatgaggagtggtcaaactgcctatggtgccgttcatatgatgttttcttctgtttgcaagagttcctggttgcccaagcttgttggtagaggaagtaatgctcaaattcatctcaattgtagctgtttctgagattggtatttcaattgttccatattagattgtcatcaaattgattaactgaacatggatgtcaatgcatttcaatcc

SEQ ID NO: 26298 - DNA, 2087 bp, Oryza sativa
  ref <308>: DATABASE ACCESSION NUMBER: AK101740
  ref <309>: DATABASE ENTRY DATE: 2002-08-28
gaccgccgccttcttcgcctactcttcttcttcttccacctccactccattcctccacctccacccacactagccactagactactagagctgtgggtgtagtagctaagaatcaagatcgatggggaagccgccgcgcgccatgacgccggtggaggaggtggacctgtcggcggtgaggtaccagtcgccgtcgctgcaggcgccgcacctcaccggcttctctctcagggccttcgtctggctcatggagtcgcccctattcggccgcctcctcacctccgtcctcaagtcgcagaacaacatcacaaggatgctgcaggacacggtgatccccgagcgccccatgtacctccccgagtacccccgcaggagccggagcaaggagttttgcttctgggggatgacagggaccctgtggacagagttgaggaagcacttcactgcctcccgccccatgatccgtctctgcgttggccggccggggacaaaccccctttcctctactggaagatccgtgattttgcgcatgcgtaccgctccgggatcacaaccccgtctgttgttgcggagcatatcattgccggtgtggaagagtggagcaacaagaagcctcccatgcctatgttggtttattttaacgcagatgatctaaggaaacaagctgaagcttccacaaagagatttcagcaaggaaacccaatttccatcttggacgggatctttatcgccattaaggatgacattgactgcttcccatatccatcaaagggtgctactacatttttcgacaaaattcgctctgtggagaaagacgcagtttgtgttgctcgtttgcggaaatgtggagtgttattcattgggaaagctaatatgcatgagctaggccttggagtaactggaaacaatccaaactatggaacagcaagaaatccacattcaattgatagatatactggtggttcttcatcaggtccagctgcactagtctcatcagggttatgctcagcagcaattggaacagatggtggaggttctgttaggataccatcttctctatgtggcattattggtttgaagacaacctacggacggacagatatgactggggcactttgtgattgtgggaccgttgaagttgcttctcctctagcagcttcagtggaggatgctttgctagtgtattctgcaatagcaggctctaggcctatggataagcttaccctgagaccatcaccgctctgtgtccctaatttggtgtctcctgacaacaacaatatactgggatcggtgaaaataggaaaatatactgagtggtttcatgatgtctccgatcgtgatatctctaatacatgtgaggatgcacttaaccttctttgcagcagcttcggatgtcaaatagaagaaataatactgccagaacttgaggagatgcgtactgcccatgttgtctcaattggcacagaatcattctgtgatttgaatcctcattacagagcaggaaaacgaactgaatttacgttagacactcgaacaagtttggcactttttggatcattcacttcgactgactatgttgcttctcaacgaataaggagaaggataatgtactatcacaatgaagctttcaagaaggttgatgtcatagcaactcctacaactggcatcactgctccagaaataccacaaagttctctgaagttaggagagtccaattacgttgtgtcagcttacctgatgcgattcgtgatagctggcaatcttcttggtttgcccgcgataactgtacctgttggtcatgataagcaagggcttcctataggcttgcaactgataggtcgaccatggggcgaggctagcttattaagggtggcttctgcaatcgaggagctctgtctgcagaagcggaaacggccatctgcatttcatgacatcctgaacgcttgagttgacaaattatgtatccatccatcaatgatgtatggcacttggtgctacgcttttattcagaacatttgtacagtgcagatgattcagtctttcctggtgttggatgtaataaaagtttcccaatggagggctaacgc

SEQ ID NO: 26299 - DNA, 2396 bp, Oryza sativa
  ref <308>: DATABASE ACCESSION NUMBER: AK101741
  ref <309>: DATABASE ENTRY DATE: 2002-08-28
gggagaagttgccttttgctgtgtgcgctgtgttggtgggctgtgacgagggcgcgaatggccggcgcctcctccacctccgcgtcggcgcgggccacgccaccggctcgctcattgcctccgctcggcgcgtcggggagccagcaggagccggctgccactgcgagccaccacgccgccggcgccggcgcctcgtccaggccgatgcggcgcaagggaaggaagcagaagcagctgtggccgaagacggtgcttcggaaatggctcaacatcaggtcgccggaatccgacttcagcgccgacgagggcgaagccaccggcgacgacgacaccgatagcgagttcgagtacgaagaaatgtgccattgggagcgccaactatatgatgaggagaggagactgcgtggtttgggcgctgagacaattgatagccaaatggagggtgctccctacaagcttaatagaaggcgcaagtcagagacccttcgtgcccaatatatcgacattaaggaactcagggtctgcgtaggaacatggaatgttgcaggaagacttccacctgatgacttggatattcaagattggttggatatggaggagccggctgatatttatgttcttggatttcaagaaattgttccattaaatgctgggaatatatttggtgctgaagacaaccgtcctgtcgcaatgtgggaacatatcattcgtgaaacattgaataagattagtcctgataaaccaaaatataaatgtcacagtgatcctccttctccatcaaggttcaagccttctgacgatgtggaagatgaacttgttagtgaatctgacagcgaaagtggcggggaagtgcacccatggaatgaacaagattttaccgttgatgatgacagtgttcatagtaataaatatgagcactctacttctggtcctactgaaactaccgtaaatggaaacaacttcagcagggtgccttcaatgaagattttcgatagatcacacaacttaagttttaaagactatgtatctagtttggaagagccaatccatcaaaaaatgttaactaaaacactcagctactcagagaggcttggaatgatttggcctgaacaaccgttggatatattggcccagcgtcttccagacagcacgaaaccatttatttcagagaaggcactgaggtcatgtttgtctttcaaatcagcacatggagattccaatgcttttccagatgattgtttagttcatgattttaacatcaaagtgcactagtcaaaacgaaaagaccatacttcgtaaggataataagcaagcagatggttggagtttttatttcaatatgggtacgaagaagcctgcggaagcatattcaaaatttgaaagtatcaaccgtaggtgtcggtgctatgggttatattggtaataagggatcaatagcagtaagcatgtccatttatcaaacactcttttgctttatatgttgccacctgacctctggagaaaaggatggagatgaactgaaaaggaatgctgatgtgcaagaaatccatcgaaggacaatatttaatccggtttccagagttagcatgcctaagactatatatgaccatgaaaggataatatggttaggagatctcaattataggatcaacttatcatatgaaaaaacacatgaattcatatccatgaaggactggaatggtttgttccagaatgaccagctaaaacgagaatttaagaaagggtatttatttgatgggtggactgaaggagttatcagctttcccccgacatacaagtacaaggttaactcagagaaatacacgagtgatgagccaaaatctggaaggagaacacctgcctggtgtgaccgaattctttcctttggcaagggaatgaggctgcaggcctacaggacagttgatatcaggctatccgatcaccgccctgtgacagctgtgtacacttccgatgttgaggttttctgtcccaaaaagttgcagagagctcttaccttcaccgatgcagaggttgaggaccaattctcatttgaggaagagagcacttctggaatctttagcttttgactaggatgagcaccaagtacatcggggaatttatgtaatgaattgcgatgcttttctgaagtctccgaggaattattgttctcacatttcatccgctatttacagtatccatcctactcgcaattagcatcggccatcatgtacattccttccacactctgtatttggagaccacggcgtggcatgattcttttttatgagcttaaatcaagtgtgcctattctaaaaatgaggagtttgtacgcaataatggcctcatgtccgatattattttgtaattaaacatctgaatactgtagattcttaggc

SEQ ID NO: 26300 - DNA, 1764 bp, Oryza sativa
  ref <308>: DATABASE ACCESSION NUMBER: AK101742
  ref <309>: DATABASE ENTRY DATE: 2002-08-28
gagtcacacgcacagatccacacgattccaaactcccaactctcgactagaaccgactccaatggcggcggcggcggctgctgctccgcccttcgccgccggcgactcgccgcccccgaccgccttgctcctcccccgcaccaccaccaccaccgccggcgccgcccccgcgccccggcgttcctccgcctcctcccgcctccacctcctcctcaccgccgcgctcgccgtcgcgacctcctacctcctcctcatcctcccccgcacgcccctctccgccgcgccggcgcctgcggccgccgcgcgggcgcaggtgaagctcgagaagccggtggtgatcctcatctcctccgacgggttccgcttcgggtaccagcacaaggccgcgaccccgcacatccaccgcctcatcggcaatggcacctccgccgccacgggcctcgtccccatcttccccacgctcacgttccccaatcactactccatcgccaccggcctctacccttcctcccacggcatcatcaacaactacttccccgacccaatctccggcgactacttcaccatgtcctcgcatgaacccaagtggtggctcggggagcccctgtgggtcaccgccgccgaccagggtatgcaggccgccacctacttctggcccggctcggaggtgaagaaaggcagctgggattgtcccgacaagtattgccgccactacaatggctcggtaccattcgaggagagggtcgatgcgatccttggttactttgatctcccatctgatgaaatgccgcagttcctgacgctttattttgaagatccagatcaccaggggcatcaggtgggtcctgatgacccggccatcacggaggcggtggtgcggatcgatgagatgattgggaggctcattgctggtctggaagaaagaggagtgtttgaggatgtcaatgttatattggttggtgaccatgggatggttgggacttgcgacaagaagctggtgtttctcgacgaattggctccatggattaagttggaggaagattgggttttatcaatgaccccgttgctggccatcaggccgccagatgacatgtcgctgccagatgttgtggccaagatgaatgaagggcttgggtctgggaaggtggagaatggtgaatatctaagaatgtacttaaaggaggatttgccttctcgacttcactacgcagatagttatagaatcccaccgataattgggttgccagaggaagggtataaagtggagatgaagcgatcggacaaaaatgaatgtggaggagcacatggttatgacaatgccttcttctcaatgagaaccatatttatcgcgcatggtcctcgttttgaaggtggtagagtcgtgccatcctttgagaacgtggagatatacaacgttattgcttccattctcaatttggagccagctccaaacaatggttcatcttcttttcctgacacaattcttttgccgagtgaatgatcacatatacatgtgactgctgtggttttggatgagaaaggtcttgctgttggtatcctcctttagtcgtaattgcacttgtacacttatcatattagattcgtgtcactagtggctattcactgcctgaatgcaaatgctgctagtagagagtatctttgtccttatggacaacatttgctgttgttatcatgtcttatccttagcggttttcttatgcttaaattttcatgcaagttcaattaagctcgcattctctgctt

SEQ ID NO: 26301 - DNA, 1641 bp, Oryza sativa
  ref <308>: DATABASE ACCESSION NUMBER: AK101743
  ref <309>: DATABASE ENTRY DATE: 2002-08-28
ggaaggcgatacctcacccacctacctatccgcggcctttgtcattgtttctttattctcgagtcgtccggagagtttgtattcgcgggaggccggtgcctggaatgcagccaatttttaagtccagttcccattccagctccgtctttctttcttctcctcctggatttctgccggctcgagatcttttcaacgctcttgagctagcggcggctttgtttaattcgtggtgagcaacgtcgtcgtcgacgacgaattcgatccggaggaagggttcgttgtccggcccagttcggccggccggatggcattgttgggcgtcctcgtcggggcggtgatcatcgtcgtcgccaccgcggccgccgtttcgggcagcgggctgccggtgcctggatacgacgggctcgccatcgggttctaccacgagacgtgcccacaggcggaggacctggtgctcgccgagatgagggagatcgtccaggaggacaggaccctcgcgccggcgctcctgcggttcatgctccacgactgcttcgtcagggggtgtgacgcgtccatcatgctgaaatcgcgggaaaaaatcggggagagggacgccaactcgagctgcagcctccgcggctacgaacagatcgaaaggatcaaggccaagctggaagatgagtgcccgatgaccgtgtcgtgtgcggacatcatcgtcatggccgcgcgggacgccgtgttcctgagcaacggcccacggtaccaggtggagaccggacgccgggacggcaaggtgtcctgtaccattgacgccgacaacgatctcccaccgcccggctccaacattgtcgacctcaagatctactttagtgtcaagaacctgggatggaaggacctcgtcgtcctatcagggagccacacgatagggagggcgcagtgcggctcgttcgcgcgcgacaggctgtacaactacagcggggaagggaggcaggacccgtcgctgaacacggcgtacgcgccggagctgaggaaggcgtgcgtggccggcgaccctttcgacaagacgtacgtggacatggacccggggagcccgtacacgttcgacctgagctactaccgggacgtgtacagaaacaggggcctcttcgtctccgaccaggccctcctcaatgacaagtggaccaagcagtacgtggagaggatggcgtccgcggattcgacggacgagtacttcagggactacgcggaggccatgaccaacatggggaggatcgaggtgctcaccggcgacaacggcgagatcaggaaggtgtgcggcgcgtacgttgactaggcaagggggagtagacggagccagcgcgcggttcgttgggtgcgagttggcgcaatcgcttcgatcgatcaatcgtcatgtggccgtggcaaacgtgggggctagccaaccacagtggagttgcgttattattctatatatcggtcgaggtggttggggcgttgacgctcaccgcccgctgaaattttctcacaactggaaagaaaaactgtaggtatatcaacacatagaatagtccttctctcttttttttcttcgttcaccctgttcttcacggtatggcatggtgcaaatatatatatacggcatcttttaaaagttctacg

SEQ ID NO: 26302 - DNA, 1561 bp, Oryza sativa
  ref <308>: DATABASE ACCESSION NUMBER: AK101744
  ref <309>: DATABASE ENTRY DATE: 2002-08-28
gaatcatccatctccgaagtgtgtctgcagcatgcaggtgctgaacaccatggtgaacaaacacttcttgtccctttcggtcctcatcgtcctccttggcctctcctccaacttgacagccgggcaagtcctgtttcagggattcaactgggagtcgtggaaggagaatggcgggtggtacaacttcctgatgggcaaggtggacgacatcgccgcagccggcatcacccacgtctggctccctccgccgtctcactctgtcggcgagcaaggctacatgcctgggcggctgtacgatctggacgcgtctaagtacggcaacgaggcgcagctcaagtcgctgatcgaggcgttccatggcaagggcgtccaggtgatcgccgacatcgtcatcaaccaccgcacggcggagcacaaggacggccgcggcatctactgcctcttcgagggcgggacgcccgactcccgcctcgactggggcccgcacatgatctgccgcgacgacccctacggcgatggcaccggcaacccggacaccggcgccgacttcgccgccgcgccggacatcgaccacctcaacaagcgcgtccagcgggagctcattggctggctcgactggctcaagatggacatcggcttcgacgcgtggcgcctcgacttcgccaagggctactccgccgacatggcaaagatctacatcgacgccaccgagccgagcttcgccgtggccgagatatggacgtccatggcgaacggcggggacggcaagccgaactacgaccagaacgcgcaccggcaggagctggtcaactgggtcgatcgtgtcggcggcgccaacagcaacgccacggcgttcgacttcaccaccaagggcatcctcaacgtcgccgtggagggcgagctgtggcgcctccgcggcgaggacggcaaggcgcccggcatgatcgggtggtggccggccaaggcgacgaccttcgtcgacaaccacgacaccggctcgacgcagcacctgtggccgttcccctccgacaaggtcatgcagggctacgcatacatcctcacccaccccggcaacccatgcatcttctacgaccatttcttcgattggggtctcaaggaggagatcgagcgcctggtgtcaatcagaaaccggcaggggatccacccggcgagcgagctgcgcatcatggaagctgacagcgatctctacctcgcggagatcgatggcaaggtgatcacaaagattggaccaagatacgacgtcgaacacctcatccccgaaggcttccaggtcgtcgcgcacggtgatggctacgcaatctgggagaaaatctgagcgcacgatgacgagactctcagtttagcagatttaacctgcgatttttaccctgaccggtatacgtatatacgtgccggcaacgagctgtatccgatccgaattacggatgcaattgtccacgaagtacttcctccgtaaataaagtgaggatcagggacatacatttgtatggttttacgaataatgctatgcaataaaatttgcactgcttaatgcttatgc

SEQ ID NO: 26303 - DNA, 1289 bp, Oryza sativa
  ref <308>: DATABASE ACCESSION NUMBER: AK101745
  ref <309>: DATABASE ENTRY DATE: 2002-08-28
ggttgctgccgcctgcgtttctccgatttctcccccctccgtcctcctctcgccgtcgctgcctcgcctccggcccgcgccaccggagcccggcgaggccgccgggcgcgcgccgctcgctccgcccccgctggaacctccgactccgcagctactcccccggcgagcgtcgccttttttgcggcgcgccgtcggccgtagcgttccacccgggcccggacttctggggatgcaatgcctctcttaaaaaggagaccgttcttcttactggatccgccaaaggacttgaatccagaggacaaggtgttccaagttcggtataccaaggagatattccgagattaccaggaatacctgaatagggtaaacctttatcgtgaaagagtttggacatgtaaggtgtctggaaaatcaaatttaacatatgaggaagcgctggtctcagagcatcatgctgcagagaaggctcaacagttgccaagagagttaatagcgcctgttctacatatgattcaatacatattctccaagaagacttttttgaaggattagaactaaatggtagaaaagatggttctgtgtatgcttgcaagatcttaaaggttattattggctctggtaacaccaagatgtatgaggtgggttggattggtcaggacaatgcagagactaacacttcagttcttcaagccgatgatctagtaattcgcaagaaggcacgtgctagtcgtagcatgctgaaaatatatattagggagtcaacatcacagaattccccatggattatacatgcaaatcttgcaaagaaatatggaatacccactgagcccccaaaagacttattgaatggtcaagggttgccaaaactgaggagaggactcgagaatggaaccacagatgatgtcagaaaaaaattgaagaaaggtgagccaattgatgatcttttattaaggcctacagcagatgatcccagtctgtcaaaaagacgtccactgtctacagatttcagagtgcctgtagattctgttggggatctacttatggtttgggacttctgcatgacttacgggaggattttatgcttgtctccattttccctctcggacctggagaatgcgatctgccacaaagaaagcaaccttgttcttcttgtggaattacatgctgcactcttccatttgctcattaaagatggaagcgggtattttatgtttctccagaacaagagaaggaaattaaaggtaacattggtcacctgggctgagtatctatgtgatttcttggaaatg

SEQ ID NO: 26304 - DNA, 1515 bp, Oryza sativa
  ref <308>: DATABASE ACCESSION NUMBER: AK101746
  ref <309>: DATABASE ENTRY DATE: 2002-08-28
ggttaccgccgccccatccctattcgcccatcgccaatgctcgggctccgtctgccggtgcccttctagccgagctctcaccggccgcctcgtctccctcaacctcgccgtcgagcaacgccgccaccgccactccctcccatctccaacccacccggcggatgaggcggcggcaggtctccggcgtgcgcggtaacgacgctctagcgcgagtcgacggccggcggggcggcggccgcgggccttcctgctcccttgtgcggcgagacaggtagcggccgtgggtttccggcacgacgaagacaggcggcggtcgcgggggtcctgacgcggcgaaggcaggcggcggccgcagggttccgacatggtgaaggtaggtggcggcggcggggctcccggcgcagcgagtcaagcggcagctaggcttccggcgcggcaaggtaagcagtggcccgggccttctggcgccttgccagccttcctcgttcctccctcgccgtcgagccgccccgtcgccctcgtcatgccgccgatggccgacgccgaagaaggactcatgcgtcgtcaagccgccccgtcgacgacagcaacggcaacctcggggacgacggcagtggatggcgatgactggcgacagcggctggcgacctcgacgatgatggtggcgcttcggcgtgggttcaagatgcacggcgcctgcgtcggtggcagcgtcgaggtcgtggctgcctgcgccattgtagagaagagccgaaggagatgggggggggggggggaatctgtgtgggtctcatggttggccagtgatttttgggctggccaaatttggctagtggaggggggttttgggcagccgcggatggctgcttagccatccggttggagaggctgttggagcttttttttttttttttttttactagaatggctaaaatttggcttggagagtgggatggagagactgttggagatgctcttacagcagtcaaataacattgaaggtgagatgcactgcaaaatgccggtgtatagaatgcagaaacggccctggaataaagaatcattgtgatgctagtggcctaacctatgaagaatctatcgtggaaaacaccacacaatatgaggggacttcgaatcgaaacaaacgcccaagaaatttttgataacaaccttcagatcgtgttaccttaccatcctcaacctcaagacaatagccactttctgccaaaaatgcaactgtaaacacaatcatccattgcaaaatctcaaagcacggtaaggccttcatactccatgacccttcaaacctttgcgaaatctcaaagcatggtaagaccttcatactccatggcccttcaaaccttgtcacccactcgatagtctcagtgggttcagttgacgttgcacctgatcaaaaactatggggacagttgtcaccttcggttagtatcaaccatacttttgccgaagaggtatataaacatttcactcatatatgaaatgcttttttttgcc

SEQ ID NO: 26305 - DNA, 1865 bp, Oryza sativa
  ref <308>: DATABASE ACCESSION NUMBER: AK101747
  ref <309>: DATABASE ENTRY DATE: 2002-08-28
gtgtttatcttcgtctcgcctttgttttccccttcgcgcaccaaacaccaaacaccaaaccctcgccgccgccgccgccgccgccgccgccatgcggatccccacgacggagacggagacggggacggggacacgcagccacaggcggcgcaagggatcgtccgacggttcgcgggccgtacaccggaccgacgcatcccgtcgcggaccaacgccgaccaaggaaacggagattcccgggcggccgccgaagcgatcctccttaaccctatcgttggacgacgcgggcgcctccaatccagcctcaacctgggcgatcctgaatcggtacggcgcccggagggattccttccgcggcgacgaccgcgaccgcaccacgtcggcggtctcctacacctccggcggcgaccagatctccgtctccttcgagctcgtgaagccgccggagacctccctcctcaccctcgactggccgcaggggccccgcccgtcggcgggaaccacatcctacccatacgtcatcgccgcgcacgacaacgtcgtcctgttccagatcatctcccccgacaagtacgctcgcccttccgccatcgactacttcgtctacaatgccaacagcagcagtagcagcaaccaccacccctccttgacgcggctgcccgtctcctactggaggaggagagacacccttcgcccgcgcatcatgagcagggaaggcacatgtattctgtcctgcagcaacaattctccttcgttcgttgtggctgagctcgagagaagatcatgccaatcttccgaaaccaacatctacctctttgcttctggctccgatgactggagagtcttcaggaatgtgccgatccgccatggcgacggcctcgctcacctgtgctggtggacaactgatgcagtgttgtcgtaccacaatcgctacatgatctgggtggactacttggtagcagggatgatcgtcgccaaagtggcacatccaggaagggttgacccaccggagcctgttctatggtacgtgccgcttcctgtcgatccagttgatgggaacccttatgacattgaccgtgggcgaggatgccctcaagcctcccgtagtgtgtgccacccaccatggcatcaagttcgtcaatgttaaccaacatggcggcggcagcagcagcagcagcagcagcagcagaagcttcagcatcaccctgtggtcgtggcgcgaggaggatcaaacatggggagaagatgcaacattggatgctgaccaacttcgggacctcgattctgagaaccgccttccaaatatccaacctgaattccccgttgttgacatggaaaacccttacgccgtttgcttcttgttgaacgagcgctaccacactgctgaccccaatgccacaacgtggatgatcaaggtgcacatgaagaagaaggttctactagattgtaccggatattccaacaaaggaagcccttctactgccagaaggatgtctgaggggctctccttcatctccagcgaaatgccatcttacctgtctagaaaaaccatcagaaggcaggaggttgataagctaggaatatgacaggagattcaggaatcgtcttaccagtttgaagattggatgcatcaaaacgaccaggatgtgagctcctgcatgttaggctaaattatagatgttcggaaagaaatttggcagactatgacacctcgtagttggcagactatgacacctcgtagttgtgttaaattatgtatttttgctcgtataatctaaaacaggattatggatggattgtatgctatattattttgtctcgcatgtccatattatttttatatttttgttgctgtggcactgctc

SEQ ID NO: 26306 - DNA, 1663 bp, Oryza sativa
  ref <308>: DATABASE ACCESSION NUMBER: AK101748
  ref <309>: DATABASE ENTRY DATE: 2002-08-28
gagggcccccgccccgtccccgcgcccgctcgtcctcgtcctctcgctgcgccgcacctgtcctctactgtcatctactccctcgtcggctcgtcgccgtcccccctgccaacctgccagtgccaggggatctcagcaccctcacttcctccccaccgcaaaaaacccccacgaaaccctcgtgctcccttccgtgccccaccacccctgcactgacgcgcctcgtcgccacccgatcgatcgatcgcctcgtgaagcgccccgcgcgcggcccctctctcgactgaaatcggaaatccccaccctttctccaatcttcacctctcccgtacgacatggaagccgccgcgcttggcgtgccgttggtgcaggtccgggctgcggtcgccgcctatggccgcggcgccggcaagggcaagggcaagcggcgcgtcgtaggcgctttccacgcgccgcccggccgccgccggacggcgctcgtcgccgcgctcccggaaccccttcagccgctctcgccagcgcaggacggcgccgtggcactcgcgtcgactgaggctgatggtggggaggaggtccatggggatgtggcttccgcagaaatctcgtctccctctggtgttcttgggaagacggtgcgtgttagatttgtgctgaagagggaatgcacgttcggccagagcttccaccttgtcggcgacgacccggcgctcggcctctgggatccgtcgaaggcagtgcctttggattggtcagaaggacacgactggactgtggagaaagacttgccagccaacaagttgattgagtacaagttcgtgctgcaagatttgtcgggcaagttgcattggcagaatggtcgtaatagaagcgtacagacaggtgaaactgcaaacattctagtcgtatatgaagattggggtaatgcaaatagtcagacagtagaagaggagggtaaagtgtccattgggatggaggagggtaaattgtccgttgggatggaggaggctgtagttccagatgatagtgaaagcagagatgatattattgtagcagatgagctacaggtggatgacaatctagcggtcatgcaaaatgaatctagtgttcgagaggatgacaagaaatcaacagttgggacagttacttctgttcaagctgaattaatgaagctacatgaagctaaccaaccagagttaattgtagatgaaccacaaattcaagaggcgcttcctgaaacagcggacacagaaccagagaacggcggtgtggcaacgtgcgctgacgaccgttatgccgaaagtacagatgatgacggtgttccagtaggaggtacagatgatgacggtgttccagtagaaaatcggtggaccggtgcttttgaacatgagttgctttggggttggaaggccctgcagcagctactcatgagcctgggcttcaagatggatacatcatgaacgagtcataaggtactgcaatacataggtggcaatcttgatgtattctgttccttccatcgatttagtactagtagtaaagactagcagctgctgtctgttggtattgtttgaacgttcagttctgtacatattatttcccagaaccaaacatcaataagctgtcaagtttgttctcagctaatgagcagccacacttcaacact

SEQ ID NO: 26307 - DNA, 1815 bp, Oryza sativa
  ref <308>: DATABASE ACCESSION NUMBER: AK101749
  ref <309>: DATABASE ENTRY DATE: 2002-08-28
gatccatccatctatccgtctcacttcctcccctgttccgttccatcgcccgatctgcttcttctacttctgtctgctcttaattggagtaccaagttatcacctgcagttccctgataattttgggaagaggcaaggacaggatgccctgggcagggacgacgtccgttcggctggcggtgttcttccgcgtcatcctgtgatcgatctggtcacgggcaaggcgatcggtcaccggcggtgaggggatccgagccgtgccgcggcggaggacatgtgcgttgggttcaacgggaggagccttgacaccgtcgttatgacaagtggcgccgtcgcatattactacagattgatgcaagtgtgccaggccgaatacttccgccagctgctcaagcccgtgacgtagattagctcacgcacacattccatccaaacagcctggaacccccaaacaaactaaccaaatcaattttgaattggaccaaaaaaaaaaagccaagctccagttagcaaaacacctttgaattcatacttgtttagtttcgtttcaatcaaaagcaaaacatttcctgctttcccagacaaacacagccacacaaaaccagcacgaatttgagcagcacccgatgcagggcgacccagggtacgggtacggtggctacggctacggctacggctatggctacggcggcgccggctacgacatggccggctacggcggcggcggtggagggtactacacgagcgatccgtacaatgccgctcctgctgcttatgaagacccgctcgccgtcgctggtcggaggcagcacgacttcccggcgccgctcaccggtgtcgagttccagccgtcggacacctgccccaagaactacgtcatcttcgaccagacctacgaccggagccgggtcatgttccacccttcgctggccaacaacctgggcaactccggcggcggctacgaccaccaccaccactgcggctacggcggcttcgagcaggactacgccagcaagagcgcctactatggcgtcgaggacgacggcggcggcgggtgctcgatccggcagaaggaggacaccgacgagatcgacgcgctgatgagcacggaggacggcgaggaggaggacgacgtcctgagcacgggccgcacgcctgggtgccgggccgggggctcgccggactccacgtgctcgtccggcgcgtccaggtccgactgcggcggcgggcggaagcccgaggccggcggcggcgagaggaagaaggagcggatgaagaagatgatgcggactctcaaggggatcatccccggcggcgacaggatggacacccccgccgtcctcgacgaggccgtccgctacctcaagtcgctcaaggtggaggtcaagaagctcggcgtgcgtggctcaagcagctagcgcgcgccacaacatccacagtcaaaaatcttcctactttcaccctttggcagataagacgagactgactggaactcttgttcgaaaaagcccaaaagccgagactgccatgatcgtcctgcctgccaacctctcgatcgtcccgaggatcgatcggtggagaagaaggattcgggaaacagagctccgtcgccgcacgcttttcttgctttatttcgttctcgatggctctagctgcgtgcgtgcatggattgtgttgctttctttttcttttctacttcttttcttttttcagaacttgctgcttttatttcttgttcctttcaatggtgcctcgtgttgtaactatcatgcatgctgatgatatacaccgtgttttttttgctatcctcgtgct

SEQ ID NO: 26308 - DNA, 1963 bp, Oryza sativa
  ref <308>: DATABASE ACCESSION NUMBER: AK101750
  ref <309>: DATABASE ENTRY DATE: 2002-08-28
gagaaaccactcactgcgcgctcttggcagctgtggtcgcagtctcaacaagtcagccaactagctagggaaccggtaataatggaggaggccacgggaatggaggtgggagtctcactggaagcaggtaagccggcggcggcgccgtggggcatgctctactacggcgtcccggccctgctcgtgctaggcgcgctctaccgggcggcggagaggtgctggctggggccgcggcgggtcgccggcgcgctccaggggcaggggctccgcggcaccgcgtaccggttccccgccggcgacctaccggagaacgcccggcgcagcaaggaggcgcgggctaagcccatgccgccgtgccacgacattgtcccccgggtggccccgctccttcaggacatcgtcaaggagtacggcaacgtgtgcatcacctggttcggcacaacgccgagagtggtcatcgctgagccagagctagtgaaggacatcctatccaacaagtttggccacttcgagaaattcaccctcaaaagtctcgggaaattgatcgccctcgggctcgcgagctacgaaggcgagaaatgggcgaggcacaggaggatcctgaaccctgctttccatctcgaaaagctcaagcacatgttgccggctttctcgacgtgctgcagcgagatgatcgaccgttgggacagtaaactagctggctctgatggaccgttcgagctagacatctggcaggagtttcagaacctcaccggagacgtgatctcccggacggcgttcggcagcagcttcatggaagggcgaaggatcttccagctgcaggaagagcaagctgatcgaatcatcaagaccatccagtatatctacatcccaggctacttgtactttccaactgaaaacaacaggaggatgaaggagaacagccgagagatagaagggctcctgaggggcatcatcgagaagaggagccgcgccgtcgagaacggcgagctcagcggcgacgacctgctcgggctgatgctcaagtccaacatggacagcggtgagccgtccaacctgaggatgagcacggaggacgtgatcgaggagtgcaagctgttctacttcgccggcatggagaccacgtcggtgctgctcacctggacgctcgtcgtgctatccatgcaccccgaatggcagcaccgcgccagggaagaggtcttgagcgcgttcggccgcgacaaacccaacttcgacggcttgagccgactgaaaacggtgacgatgatactgcatgaggtgctcaggctgtacccgccggcggtcacgttgagccgaagaacattcaaggagattcagattgggggcatcacgtacccggctggtgtgggccttgagctgcccataatcctgattcaccacaacaccgatgtgtgggggaaggatgcccatgagtttaagccagagaggttcgcggatgggatctccaaggcgaccaagaccaatcagcaggcgttcttcccgttcggttggggcccgaggatctgcattggccagaacttcgcgatgcttgaggccaagatggcgttatgcgtgatacttcagaactttgagtttcagttgtcgccctcgtacacccatgctccttacgccagtgtcacgctacatccgcagcatggtgcacaaattatactcacaagactatgatcatctggttttggtagcagcggccacccgtgaatccgcttatatatatatatgtcattttcgattttccataggctaatatatggatcgacacagaaaaatggttcacaataatcacatacattagtatgtaactaggtgcacgtatgttgacacggtatagtatgtgtggatgtcaggggaacttgtacgtgctgatgagcgtgaaaaataaagcaaacaaataattgaatatggtgaggtgaaaatttatagagctagagaaagccaattgaat

SEQ ID NO: 26309 - DNA, 1406 bp, Oryza sativa
  ref <308>: DATABASE ACCESSION NUMBER: AK101751
  ref <309>: DATABASE ENTRY DATE: 2002-08-28
ccccctcttctctctcttcctcggttcctcctctctctcagtcttctctgcctgtagccggtcagtggggcgaaataggagaggagggcggcatcacgacggtggccagtggcggcagcggcggggaaccaaggtggcagcctggcggagctcgacggtggccaaagataggcctcgggaggaggcagcgaggcaggaacggcgcgggcatcgacggggaggcgggggtcgtcaacggtaggcgcgatgccgtcgaggtcgctcacctcgccgccaccgggatcttcgacctcgagctcgcttgtgccaccgctaccaacacctcctaggcctctccgacggtccgacctcgaggtcgcacgtgccgccgccgcctcccttctcaaacgtcgcagccgccaccgcgtcccttctctcgtgtcgtcgccgccgccgctggggtggtcgggacagcgcgcagccggcggcggggaaggaggcacaactgatagatcgatgacgatgcccaacgaagacgaccggttcgacggagacgaagccaagtgaagaagagcacgtggtgatgcccccatgggccaacctcccgttcgatctccacgccaccacgacggctcctctcccccagcgacgctatcgaccaccggacggcccgctgcgtcttctccaagtccagtcgatggggaccaaaagagccaggcaaatagatccaatccagtcacctcctcgaatatcgcggcgagctgctctaggcgttcgtcctcgtcgatagcggctactgcaatgacgtccggggctacaaacctcgccggcagcggctactgcaacgacgtccgtgtctccttcgtgacggcggtagcggcggcggtgccgccgggtgctcgcacgctgcctccgccggacaccgctcaaccccactcgccacctccaccgctcaggcctgctcgccgcctccgccgctgtgctccgccggccgccactctgccccacgtcgcccgtagccgccatcactgcagagaatggacaaagagagatgatgaagggatagaagagaggaaaagagagagggggtgatttggcatcctgacatgtggggtccacgctgactcagccgtcacgttagacaaaaccggagtcaaaaccacataaggacctcaagtgaacggttttgttagttgagggaggcccaatatctggttttgcggttgggggacgattttgtaactcgatgacaagttgaggggaccttcggtgtactttttccaagctagaacctagaagtcctctcaaaatgaaaaaggaaagaaattgagccccaaaaccagatatgaaggggaccttcggtgtactttttccgagctagaacctagaagtcctctcaaaatgaaaaaggaaagaaattgagcccc

SEQ ID NO: 26310 - DNA, 1045 bp, Oryza sativa
  ref <308>: DATABASE ACCESSION NUMBER: AK101752
  ref <309>: DATABASE ENTRY DATE: 2002-08-28
gtgctattgctattgttgttagttacagattaggggcacccgtgatcttgccgattgcttcagtatttgcatgcccagatggcacagagaaagaggtgcttaaaatactccgtctgggcactgacattggagtttcaaaacgtgaaggaaggtacaatggttccctgggagcagagttgttgtcccaagatgctcgccaggttcaattccttcctttaagaccattctatagtggagaaattgtggcatggaagacggggaaagagggtgaaaagctcagatatggcagggtccctgaagatgtaaggccatcagctggccaagctctttacaggtttccagtagagacttctgctggtgaaacttgcatgctactttccagtcaggtttactcatttaaaagcgtttcaatggctgatctctctcctgcaccattgcaactggatagtggtagagctgcaggtggacagcagggcttctcacccatcaacacaggaactgaagctgcagatgatgtggctactggccttgaatatgggaaggtatcttcaaccgagctggtacaggcagtccacgatatgctttcagctgcaggggtaaggatggatgctacaaaggaaacgcttctacagactactctttccttgcaagaccagcttaaagaatctcaagtggctctactcgtggagcaggagaaagcggaggcagcagttagagaagctgatgttgccaagtcagcatggtcatgtcgtgtctgcctgaatgcggaggtcaacatgactataataccatgcggtcatgttctttgtaatcgatgctcaagttcggtttcacgatgcccattttgtcggacgcaagtatctaggatgatgaaaatattcaggccttaatttctctttctacaactttcgctttctattagtatgtataatattagacacgttagttttttagctgtaaaactatagggctgtaaatcgagggtgtaaatatacattatagtccatgtacagctacggtgcattttactgtgccgattctttgg

SEQ ID NO: 26311 - DNA, 1020 bp, Oryza sativa
  ref <308>: DATABASE ACCESSION NUMBER: AK101753
  ref <309>: DATABASE ENTRY DATE: 2002-08-28
ccagagcactgcacttcacagttcacaccaccttccttccttcccgactccccacaccggccggtctccttctcgctgcagggagagagagctcgagctcttctctgctgctgctgctgccatggcgattccgttgctgctgctgctcttgctggccatgtccacaggctcagatggggcgttctgcgtgtgcaagcccgaccagagcccggcggcgatgcagaaggccatcgactacgcgtgctggcgcggcgccgactgcacccagatcatgcagtccggcgcgtgctaccagccgagcaccatcgtcgcgcactgctcctacgccaccaactcctacttccagaagaacagccccatcggcgccacctgcgacttcggcggcgtcgccaccctcaccaacaccgaccccagctccggcacctgcaagtacccggccaccgctagcggcgtaggcaccggaatgggaaccggaaccagcaccggcactggcactggagttggcaccggcggcaccggcactggtggcgcaggcgtcggcgcaggcaccggcacaggcgttggcacaggaaccggcaccggcgcaggcatgggcaccggtgctggtgccggcaccgggatcacgaccccgggatcgaccaccggcactcagggaggcgccctgagcccaccgtttggcggcgcatatggcccgtcggccggcgccatgaaccccgactacaacgaggccgcgccggcgcgctcccagctggccgccgccacctccgtcctcctcgccgccgcaccattcctgttccatctcatctagagccacacaagggggcagtggattccgtctcgtcggtggtgggggcgcacggcgccggccggagtttggtgggcattgcaatgcagcggcgttgccggcgttggtgctttgtctcgcccgcgctttccggcctgtgccgccacccctgctggttttgatcgatcatcagtgtattcagtagtggtactgggagtactccttcagtagtagcc

SEQ ID NO: 26312 - DNA, 1836 bp, Oryza sativa
  ref <308>: DATABASE ACCESSION NUMBER: AK101754
  ref <309>: DATABASE ENTRY DATE: 2002-08-28
ggccgcctcccgctccggcatcgccctcccccgagagacttccgccgctacatcatcttcggttgccattatcgccaccccaagaaggtgaaattttatccaaatataatatcggaatgccatctattcccctcatctcatcccatgtctgctctgcaacgatttcccgtgattaatttttcgcctgcgttgcatacgttggagaagaggataggtgaacggctctcgttttactagggacttgtatctttgtgatgattgaggcaggcaggcaggcttgttcatatccatgtctactttctcaacagaggagctgatctgcaactgatggatatacacccattatagttctaatcagacctaatcactgttacctccaattcaatctgattaatctttcaaagaaaatggccataatgacatggatcatggtatatgttgggctgatggccaattgtttatctttcactaactaatggtttattaataccgcatatatggattttttttttcttttggtgcccatttatatagtagatactagtatgtaattgagttcctattattgacctggtcttacgatgccagttaaaatttcctaaggactaatccttctatgttgctattggcgctatctgccaatgtgcttgtgttcagtcagaactaccataaaagttgttctttcatggaattgcaaaatttttggggaaaaaccaatacaagttaagtactcaatgtttttttccttgatggacattatcatgtttttaattcatgttcttaaactccagactcctccacgaaatctaaatgttctttctagaaatcaatccttgttacttcatgtaatcctggtctgatgttctgtacagccgaaagcacccgcaaaagacaaagtccaagagaaagtaccacagcagaccatgattgctagctggggcatggccaattatgttgaatataatcaagtgcactctaccattttatgggatatcatctgatgggacgccctttaaaacttgcatggttcgatcccaaggactttgctgttctcagagatatacctactcgtggggagagaatgcctaattatttaatgcagactgtatgtgtgaccggctttgattcatccctcgagattggaacgattaggcacgcacttgaagaaattttcgcgaacgatcatatgaaaaaacttgtaactcccgtgaatctagatggcacaagcacagggaaagcatacataagatacgatgttgcgagcagctacaatggtgcgctccactgtgacggcgtgtccgagattggaggccgcattctgcgcgtcacaaaatggcctgatttttcatggtgcaagaaacgaagaatagggagagctggttgtgacaaggacgacgcaggattggcagtgccagatcaggacgacactcctaagtggcacacgcctagcacaggtaatatgcagaggttgctgatctttaattgtttaaccatcatcataggtgctgctcttgccttaatttgtagctgatgtgatgacttgctgtgcagtcaatcttggttaatgttataacatttctggctttggttagtagatgatgatgatgatttggccatcttgcagggaagaggaccttgttcgacgatgggagtggcgatgaagccggcgttaccatgtgatatagtatcatgtgaattcaatcaattcatcgtggtgtgcatagattggaaacagtttacgctcaattaattagtcatgtttgctagtgcatttaaatgataatagtactgctaacttattgatttgatataaaaattcatgccttttttttattc

SEQ ID NO: 26313 - DNA, 2176 bp, Oryza sativa
  ref <308>: DATABASE ACCESSION NUMBER: AK101755
  ref <309>: DATABASE ENTRY DATE: 2002-08-28
acaggacccgtacctgcccccgcaccccccgacgcaatcgtccaccccgcgtcgtctccggccgccgcccaccgccgccggagccccgccgcccccagcccgccatggcggatccgccgtccgcggccgccaccgcctcgccgcagcccgatcagctcgccgccgccgccgtctccaccccgcaaaaccccaaccctaaccccctcctctccccccaaatcccaccgtcgcccaccgtctccgacctgtccgccatctcgtccccgcagctcgacccgtccgcggcgggcggcggggccatggactaccccccgcggccgccgcagatgcaggctccttcgcccggccaggcggcggccggggctggaggcttcggccagatccaccgctcgggctcgggctcccgcctcgccgctgtcggccagcttccacagtacgctgctgctgcggccaggatgtacggcagtcaggtgaacttctcgggaggtggaggacaggtgggacaacagcagcagcagcagcagctgctggctgctcgcgcggccatgcttagtcaaggccagattgggatgctgcaagggcaggggaacgcagcatctgcggcgcactatggtctccagtcacagatgatggcgcagccaaggcagaagggtatggtgcaaggtgcacaatttaatactgccaatgcagctcaagcattacaaggtatgcagtccatgggagtcatgggtggtatgagaggaaatggaactattccatataatcagcaacgttttgcccatgcacaagcacaattgaggccgcagcagacatcacagcaaggcacactgtctccacaggttgtgggtcaaggcttgacaagaacagcatcgattgctgcattaaatccacagctacctggatcgtcgacaaatgggccgatggcacaaatgtcccttcctcagaaacagcagcaggcagcatggttaaaacaaatgcaatcatcgctgggatcacctgtttctccacaacaatttcagcatcaacaaaggatgctattaatacatcaacttcaacagcagtcaggattgaatcaacaccaaatcgcacaaacccaacaacagcatcctcatctcaatacccagcttttacagcagcaacacattctacagcaacttcagcaacaacaacaatctccaaggatatcagcatctggttcccagaagtccatgaacctgacaggatcacaaccgggcactcctttatcaggtggaactatgactggtggaagtgcaagtcaaggagcagaagtaactaatcaacttcttgggaagagaaaaatacaagatttggtttcacaggtagatcccctgggcaaggttgatccagaagtggaagatttgcttttggagattgctgatgacttcattgattcggtgactgcatttgcgtgtacccttgcgaagcataggaaatcatcagtcctggaagccaaggatgtattgctgcacctagaaaaaaattggcacttatctgttcctggtttcttaagggaggacaagaatccgcaaagacatcctgtaaaggtatcagtggaccctcaacaaccagaatgtgatgctgctggtattagaagcacaggaaataaattggtaattaacaattcagttgccaaccatcaaacaagacctccggttactgagccttcaccaatgcccacaatggggcctctgtcaaaagtgccccgtttctaagcatcatgcctcctcatcagtgcaagggaaaagggaaattacattacaggttctaggacatttcacatacagcttggtattaattagtatctaacttgaggattgctagcaaatggaagcacaataaatgtatgagcatctacgggcaaaagtgggatgcttgtgttctttaaaggaaagaagttgctgactgacagattgttcgcgacagcctcatccaggagctcttgtgtaaccttattagaagtattcgttgatcgctgtagctgacccctctcgttgtacataaatgtttttttgcgaacggggcagcccttttcgttcttgttgttcctatatagatgtagaacccatattatggtatcgtgtatttgctacaactcataagttgatctaaaagatcagaaaaaaatgtcattatatcgtgtcattgggcgtcttgc

SEQ ID NO: 26314 - DNA, 870 bp, Oryza sativa
  ref <308>: DATABASE ACCESSION NUMBER: AK101756
  ref <309>: DATABASE ENTRY DATE: 2002-08-28
gacactgacaccagagaaccctagcctcgccggtcgccgccatggccgcctcgctcctccgctccggccaccgcctccgcctcctccgccacggcagcctctcctgggcctccttctccgccgccgccgcggaggagctcatcgacgtccgcaagctccccactgactacgacgcctccaccttcgaccccaccgccccgtcccgcccaccgccctccgaccgcgtctggcgcctcgtcgaggacgtctcctccctcaccctcgccgagtccgccgctctctccgccctcctcctccgccgcctcgacgtccccgctccccccatcgccatcctcaactccgccgcgggcctcggcggcggcggcggcgcgggtgccgcgggcgccgccggggagaaggccggtggggcggcggcggctgagaagacggtgttcgagctgcgcttggaggcgttcgatgcggcgagcaagatcaaggtgatcaaggagatccggtcattcaccgacctgggtctgaaggaggcgaaggagctagtggagaaggcacccgctgtgatcaagggtggtgtctcgaaggaggaggctcggacaatcatcgataagatgaaggctgttggtgccaaggtcgtcatggactgatcagcatcctcatttcaattttcaaggttctgttcacagtttttaactgtgctttctcatggtttgatggttgatgcggattggggtgccagtgttaatatcctgtcaattggcattttgaaagcccaatgatcttacaacacactggccaatccgatggtgccatcatgtgtttcttgttcggtcgatgaattctctgtcactaacaagaaacatggaataatttctgttg

SEQ ID NO: 26315 - DNA, 2763 bp, Oryza sativa; identical to SEQ ID NO: 25595
  ref <308>: DATABASE ACCESSION NUMBER: AK101757
  ref <309>: DATABASE ENTRY DATE: 2002-08-28

SEQ ID NO: 26316 - DNA, 1637 bp, Oryza sativa
  ref <308>: DATABASE ACCESSION NUMBER: AK101758
  ref <309>: DATABASE ENTRY DATE: 2002-08-28
gaagtgcaaacgtgcagcagcagaggcagcaacacctcccctgttcttgctctgtttcctcactctgttggtacacaacaaaaagaagaagcttaattaggtggtttttgatctgatcacgcgccatggtggcgatcacggcgccgagctccatcgagcacatcccgctggtgaggtgccccaagggcgccaatgccgggccgcaagctgtcatcccgtgcatcgacctgtcggcaccgggcgcggcggcggcggtggccgacgcgtgccgcaccctggggttcttcaaggcgaccaaccacggcgtccccgcggggctcgccgacgcgttggagtcgagcgccatggcgttcttcgcgctcccgcaccaggagaagctcgacatgtccggccccgcccggcccctcggctacggcagcaagagcatcgggtcgaacggcgacgtggggtggctggagtacctcctcctctcggccggcgccgcctcgtccggcggcgcggcgctgccggcggcgctgagggcggcggtggaggcgtacacgggggcggtgaggggggtggggtgcagggtgatggagctgatggcggaggggctggggctgggggcgtcggaggaggggaggtgcgtgctgcggcggatggtggtggggtgcgagggcagcgacgagatgctgcgggtgaaccactacccgccgtacctcctcccgccgggccgcgaccgggacgagtgcggcgtgacgggcttcggggagcacacggacccacagatcatctccgtgctcaggtccaactgcaccgcgggcctccagatcctcctccgcggagactactcctcccctgcccgctgggtccccgtgccccccgaccccgattccttcttcgtcaacgtcggcgactccctccaagtgttgacgaatgggaggttcaggagcgtgaagcacagggtgttggcgccggagggggaggagtcgaggctgtcggtgatctacttcggcgggccagcggcgtcgcagcggatcgcgccgctggagcaggtgatgcgggagggggagcagagcctgtacagggagttcacctggggggagtacaagaaggccgcctacaagacgcgcctcggcgacaaccgcctcggcccctacgagctgcagcacgccgctgccaacgatgaggccgcgacgaagaaataaatcgatcaacccgacgactgtgaacaactgtgaagtgttactgtactagtgtagttagctccgtggtactggtagctgtgaatatgatcgagatcgatcgatcgatcgatctatccttgtgttgtgttacttttaacccatttctggtaactaaaggccgccgttgccttggcttgcttggccagcccaaaactggcactggcgagctgcctcctcctgcatgcctctgctgtgcagtagtgcagcagtactcctctgtcctggggttttctgcagcagagcagtggagtgcagttcagtgcagcgttgtgcatgttgtgtaaaatagcttgccgcatgcatatgtgattatgtgctgctcctgtcgacgctgccgccccttttgtagcatggtttttaccggctgggcggtcggcaggtgcagtagtagctaatgatgcttactgcgcc

SEQ ID NO: 26317 - DNA, 2017 bp, Oryza sativa
  ref <308>: DATABASE ACCESSION NUMBER: AK101759
  ref <309>: DATABASE ENTRY DATE: 2002-08-28
gtgatttcagtttcaaaggaactttggattggttcactgggaaatagtgctgcagagtcactagttagatcgaaatttgaggagtttggccccttagcaaacttcttattttatcccccaaagaattttgccttggttgagtacgggaacataatgcatgctgttcatgcatatggatgtatgcagggttcctctgtttggggtggtggtctccaaataaggtatttagatagacttataggcagcaagggatttgctagtggtatagctgttggtgaaagtcgtcatatttatgttgctaaagttaagaacaaaaaagataaagatgaggtgtttgatgaattaaaggccgcagggttgaagaggccatgtagctttacagatatttccagtgaaaatgctttgcttcttgaatttgagacagcaactgatgcagctgctgcgaaagcccatattaggcgccagcttcatccagatgtctgttcccaggacaagaatacttctggtcatgaactttttgtgcggaacatagacaattcagtccctgacatggagtttatcaatgcattttcacgatttggtgaggtcataaggtggcagttcaataagcttgatgggaactgcttgatagattatagatcacctaatgctgctgccactgcaaaatctcacctgcatggtgcaagatttgggctgaagtcaattagtgttgaatcgagatctgtgcatgataaaactttgtcgccttctgttccaatgctagccccgagtgtttctgacagcagtcaccatgagatcaggaatccaagggtttcagggtataatgcaggcttcacagtaccaacagagcgaccaatttatggtccatcggctcccagagctccacaaggcatccttccatgcccacctgtttctgcacaccgtggtcctgtaataccaccgccacctattcaaacttcttttgtccgtcctgtatatcctggtccaggaagtccgtgggaaaatactaccccaaatccatccttcagtcacgcttctcctcgaatgatgcctggaagtagcttccgtatgaatccacctgctcctcttccttttataccatcttctgttacccctcttacacagtttcctggaggttcagcacagcagtctgagaaaaggccacctccacctccacctccaccaaatgtagcccccccaccatttactcgtcaagatataccacccccaccaccatctccaccaccactacctattactcagccaccttctgtgccaccacccccaaattcccctcctccgcttcaacctgctactgacccttctgactcacaaaagcaacgttctcatcctcgatggcagggctctctttcaaaaagtggtttacattactgttcaatctatgcaagtagaatagagttggatgcttgtagatatgaacatgcagtttctgaaccgacagggtggccttcaagattagatgtgacaaagcgaacggattaccaacatgtgaagacaactttctccaatactccacctagcaaaagagaggtctgtcggctattaccctgttcgaatggtgatcagaaagggttccgggattttatatcctatctgaaacagagagaatgcgccggtgtgatcaagattccatctgtcaagccattgtggtcaaggctactatttatccttcctcccacgcctgaggcctgtgggatgctagaacttccgccccatccgaccgaatgcctaattgcactgattttgccaaaggagacgactgctgaagcgacctaacatgattgtcgcgtagacacattccgtaacctcgttgcttccagtttcgtgcacagtaaacaattttgcatgaatgatactaagttcctacagctgcttatgaataatatgcttccagtttcgtgcacagttaacaaattttcatgttttcttttgacgagacaccaatactgtacttattccttttgctgcataactgatatatagttgctacaatatc

SEQ ID NO: 26318 - DNA, 3202 bp, Oryza sativa
  ref <308>: DATABASE ACCESSION NUMBER: AK101760
  ref <309>: DATABASE ENTRY DATE: 2002-08-28
ggagagaggaagaggagtctcgggtggtggcgccatcggcggtgggacccgggagccgctacgggaggcgtagacgacgaccggggaggagaagaagaagaagaggaagattaggcacgagcaggaaaagaataattagcgagcgcccgggtggtgtacccatctgtattcatcatttccgcgattccaccctctctctctctctgcggccgcgccatctctatccgggctcaagggtgtggccggggggcgacgaacgccgctctctctgccttcctccttgaccgatcgctcccttctgaccgtcttaatattctggaaagatcggttcttgccttcttgggctgcttcaggggcgtgggagaggtttggggttggttcatctcgcgggcttgggcggcgggaggaggagaggggttttgctttgactcctgttccgactctccggttgattcctccgactgagttcagggggagttcttcaatcaggaaggtcttgactctcgacgaggagttcaaggttcttggattaaagattggcagtcattcatcgtggatggagaataggaacaaagaagatatgggtccatcccagcgtaattcttgccctaaggttcacagctcaatgtgcagtgagctgacaatgatgttagataaagtctcctctattcttccattaattgaggcagctcgaccaggatgtaaagcaggtatacaggaattatgcaacctatacaatatagttgagaaagggaaactcataattcagcactgcgttgaatgtagcaagctctacttggctattactggagaggcgattgtatctcggtgtgaaaggatcagagactcacttaggcggagcttgttcctgattgagaacatggtcccaccagcactagctaatcagattgttgacgtccatgatgatcttggggacataaaatttgttattgatcccacagaagaagaggctggcaaaaccattttagagatgcttcggcaatctgatgtgactgaagaacttgaacttgagacattcctgcaggcagcttcaaacttaaacctgacatctcctaaatctatgctaattgaacgaagggctatcaagaaactgcttgacaagattagcggtactgatcccaaaaaggagggagttcttaagttccttctataccttgttaaaaagtatggaaaaaacatcaaaccagaaactggtgagcggaatgaaaacatgcaatctgaaagccagtcttcgactccaagctcaagttttgttagtgataccagcactcctggaaagtggtacacacccacagacatccagaggaatgaggatcagactagtatgtcaggagcagccacaccacctgcagagttctgttgcccaatatcaacaaagttaatgcgtgatcctgtcataataacatctgggcagacttatgaaagagaaaatattgagagatggtttagggagggatatgatacctgtcccaggacacatataaagctagaaaatttcgcgatgattccaaatacttgcatgagggacctcattttcaattggtgcaaagagcatggtttcataatctcagatattctccctccatccaaaaatgcatacagttacttgccggagcaattgcatggttactccatgtcaagtctgcacaatgtttcagtacctctaattgctggaaaagtcagggattttgtgattgaccatagcacttcatctgttgcattatctgaggccagttatatgtcagattcatatcatgtgcgggacatggaggaaccgaaagatagtttttctcagttctcttggagtgcggactatcaagagtgtttgtcttttcgcaacttcaaccaggacaagttcctaaggttcttttacgagctgtcgaagctcccattggaactccaagacaggtccattggtgatttgaagatcattctcaatgaggaaaatgaggcttcatgtgctatggtttccaatggatttgtagaggcattctttgatttcttaatgaatgaagatggaagctacagtatgcaagctcagaaagttggatttcagttctttcgtgtttttctttccaatagcaggactaatattctacacatgaatgaagaagcattccgtctatttgcatcctttattgattctgagttaaaaaccgaagctttgctgacacttcacgagctggttcaacacctgagttgtcgacaatcccatttgatggcctctattatcactcctttattggagtctgaagatgccgagggtctcaagctttgcctgaagattgtctgcaatctttcatctgattcggatgtaaaaccatacctaatttcactgggaattgtctcaagattgtcacccattctttctgaaggaacctttgctgagtgttgcttggagattttgcggaacctgtgtgatgtggaagaagccacagtgcttattacaaaaactgatcgatgccttggttccgttgcagaatatctggacactggaagccctaaagaacgagagcatgcagtggttatccttttagcagtatgttcccatagttctgaggattgtttacttgtaatgaaggaaggtgtaatccctgcccttgtggacttgtcagtaaatggaattgatgaagcaaaaggttgttcaatgaagctacttcatcttctcagggatctgaggcgaaccgaccagttgaacaactcatgttcacaagaagtggttgtcacagatgtagtggagggtcctcctgacagttcaattcacaagcagccaataccaaagtcatctcgttttttccaaagaaagttgaacattttctcaaagccccggtcacttacgctattctgaaaactggtaaagatcgatctagtagtccttgtatattttataacactaacagttcttttgtatagggtggtagaggctgtattgtccaaaggaaatgcttgatgagatgatctttttcatcctcatgtattccagtagagtttgataaactattgtgatgcatcttgcagattgcagttgttttgcatcttgctgcgtgtaaaaagtaggctagatatagtttttgtatttttgtactctgctgtagtgctgttccattgacagctggaaagcctgaaaacaaggttttgtttatcttatctgaagttctgaagaaagcagaactggtgatcc

SEQ ID NO: 26319 - DNA, 1888 bp, Oryza sativa
  ref <308>: DATABASE ACCESSION NUMBER: AK101761
  ref <309>: DATABASE ENTRY DATE: 2002-08-28
gtattagagttgtggagggaaaacgaggcatcaccgctttatttcggcgctggaaatacaaagagattgttcgtcttcctcctcttcacagcccaaacaccgagagacgagcaccaaaccaatcgagcgggcttccacgcgcgccacctgttcgacgaaaggcgtctgagcgggtgctcggcggccatggaagagccgcctggcaagaaaggtccggccatggaccccgcgcaagactcgggcagggactggctcagcggcctccccgagggggtcctccaccgcatcatgtcgttcctggactcgcgccaggccgtgcggacgtgcgtgctctcgcggcgctggcgcgacctctggcgctccataccccgcgtccacgccgacatctacgacttcaccccggacgggaccatcgacggcgagggagaggaggacgtagaggaggccgaggtggtggtggtgttcaacaggttcgtcgaccggctgctggagcgacgcgatcccaccgcctcaatagagacgttcttcttcagatgctgcataccagacgaagacgacgatggatccgcagacgcgaacaggtggatttcctacggtttgcagaagaacgcctggtttctggaggttgtcgtgcagctcaactcattggagctcgatcgctcggtgttcaattcaatctacctgagaagaattgccttcggcaatgttttcatggaccaaggtttcttcaagcaactccagattggctgtccagcattggaacgtctctacttagatgattgcatcgttgcggatgacgagatctcctccaacacactgaaggttttgaccttcgatactactgaattctgctatgagcacaggatttctatttctattccgaccgttactactttagccctgcgcaatactatttgcggcaagcctgtactaaaggacgtggcatcactagtgagcgcatcagtggtactttattgtgtggaaagcggcaatttcgatgcttatgatctccgccactatctctggagcttttctcacgttaaagatttgattttcagttatcaggggagaaagctgacaattgaaaacaatttgcaatggtgtccaaaattcttcaatcttgtcggcttgactctgggtaaatggtgtctgaatgcaaacttctatgcactaattgtcttccttcaaaactcaccaagattggagaaactgactctgatactcgctgaggataattgtaaaacatcagaagtattcatcggtgagcttgaggaaaaatcatttacatgtgagcaccttacgagtgttgaaatgaaatgctgggaggatgatcccctggtgatcaacgtggttgacttctttgttggtagtggaatgtcttcttctcagattcatatcgaatacgaagacgacgatgaggatcaatttcatatcgaatctgatgacatgtttgggtttgagttcgagtatgaggacgaggacgaggatgaggatgaggatgaggatgagtaaagctcactcagtctaaggacatgaaacatcaaagcggcacattccatccaaaagatcgctctcttccgtcttcctctgattccagttgacttcgaaagcagagacatgtttactgatcttctttggagctatgatgtgaagaatcatgtctttcgttgcatataagctcagtcgtcttttgcttgtttgcttctgtgatattccaagaaccaagactatgtgctacatgtctgagtacttcattaggcctttatatatgacgtgatattaaaattccatatcgtacttccactttctattactcgtttttatctatcactgcctactgtcaggatgtgaccattctgacaatggaagagatacatcatttgtttct

SEQ ID NO: 26320 - DNA, 3488 bp, Oryza sativa
  ref <308>: DATABASE ACCESSION NUMBER: AK101762
  ref <309>: DATABASE ENTRY DATE: 2002-08-28
gggatccccctctcccatctcccatctcaccacctcggccgccgccgccgccgccgccgccgccatcgccgcagcgatctgtcacaatcaccaccgccaccggcaatgcccaccgcgtcataggtcgaggcgcgccatgcccccgccgaccccgctggcccgcctcctcgcggccatctccgccgccgcctcctcgcccgccgacctccgccgcctctcccaccgcgtcctgtccccctccgcgcctcttccccctctccgctgcctcaacaccctcctcatggccctcgcacgccaccgtatgttcccggacatggagtccctcgcctcccgcatgcccgcccgcaacctccgcacgtacaccaccctcatcaacgcctactgcctcgccggcgacatccccgccgcgaagcagcatctcacctccctcctccacgcgggactcgcgccggactcgtacgcgtacacctctttcgtccttggatattgccgcgcagggatgctgacgcacgcctgccgggtgttcgtgctaatgccgctccggggatgcctgcggacagcgttcacgtacacggcgctgctccatgggctgcttggcgcagggatggttcgtgaggctatggcagtgttcgttgggatgagggcggacagctgtgctccggatacccatgtgtacgcgacgatggtgcacgggctgtgtgaggctggacgaactgaggaggctgaggtgctgcttgaagaggcaatgtctaacggatttgagccaaatattgttgtctacaatgcgctgattgatggctactgcaatgctggagaaatggaacatgcacttaaggtcttcgagggcatggatggcaaccggtgctccccaaatgtgcgaacatacaccgagctgatacatgggttgtgcaaatcagggaaggtggaaagggccatggtgctgttcagtcggatggttgaggcaggtttggagcccaatgtagtgacatacacagctttaattcaggggcagtgcaatgagggtcacctgcaatgtgcttttaggcttcttcatttgatggagactaatgggctggttccaaacgactggactttctcggtgttaattgatgctctctgcaagcgtgagaaggttgaggaggcccagttgtttcttgggtctcttgtcaagaagggagttaaggtgaatgaggttgtttacactagcttgatagatggattgtgcaagacaggaaagattgatgctgctgatgaattgatgcagaaaatgatctcagaggggtttgtgccagatgcccactcatacagttcacttattgatggattatgcaggcaaaagaagttgtcgcaagcaacattgatgttggaagatatgatggagaagggaatacaggcaagtcctgtaacatataccattataattgatgaattagtcagggaggtaggatcagaaggtccaaagaaaatattcgacaagatgatcgcgacaggtatcaatcctgatattgtaacgtacacagtatttgtccgctcctactgtgaagaggggagaatggaagatgctgaatccatgatagttcaaatggttgatcgtggtgttttccctaacctagtcacgtataacactttgattagagggtatgcaaatctaggactagtcagtcaagcattttcaacttttgaagtaatggttggtaaggggtggaaaccaaacgaggactcctacacagttcttctcagacttgtggtaaagaaaagttcctctgataactctgttgatatatggaaaatagcagacatgaaagatctccaggtacttttggaggacatcactgagcgtcagttgccactagccgccgatatttacagttgtttcattagatgtttatgccgagttgacagattggaggaagcaaaacatttttttatggggatgcagaatgctaacttgacccctagcgaggatgtatatacttcgataatagactgctgttgcagattaaaaatactaacagatgctttgacattgcttgattcaatgacgaaaagtggttatttgccacatttagaatcttatagaattataatttcttctctttgtgagggaggaaactttcgcactgctaaggaagtttttggtgatttgttactgaaggaatccaattatgatgagattgtatggaaaattctgatttatggcctattacagaagggcagtgttgctgagttctcaagtctgctctccgtcatgaaggaacatggttaccaacctagtaacacaattaatgccatgattacaggtgaaataacagttacaaatgaagttcaggaaatcgctagataaatttggagaaactaaccaactgttgtgttgatggtctacagcagaaggtgtgcaactcaacattgttgcctttctgtgcacagtgaagcaacagatcctcatggactacttccatttgtggcatcagcatcgggctcagtcgagccaggcgcagtaccgtcattcgagcttgagaacacgtggacatgcgagtggtcaagctcatgggcatgctgacggccatcaagctcgagcctcgaggacggtgtccggctagcattcgagcttgagaaaggagagggggctggaggaggaagaaggaggaaaagttggttatgtgtcaatccactgaagcaagcgggctatttgagaagatagggtagctatactttcagtggctccagaaactgctagacttggatatgtgaaattaacatccattacgaattatctgatcccggagctagcattctagttaaattgctgtgactggccaaataacgatcggtacatactcaattctattgagaactcaacttcatcaaaatttggtggaagagctagagcaattttcagtcagtttgcacacgccaaggtagctgtgatcacagggactaagaaggatcaatttccaggtcaaaagagatatccatatacattatatatccagaagttgaagtgtaattgcttgtgaaaatggttcgcaggagactggaacatgatgaaattactagattctacttttgttatggtgaagaacatatacatagaatgatggctgagtatgttctgagaaggtcactccaaaaataactggatcagatagatgaggtgatcgactccttaaaaatgctacagatgtttttcatggtccatgcactgactaagcttcgtttattttcaagagtttcaagatatgtcatgaaaggcagcatgatggaatattggcccccattttgcagaacttgggcgaggttcttggaaagttctgaacctttgcctatatgaactctggggaagttagtattaagctctatatagtaaatgatattcacagcattcaacttgtgttaatagtttgcaggcgtggaatattctttttgaccggaacatggactaattatttgacaattgtatatagagattcaatcaatacattcttgac

SEQ ID NO: 26321 - DNA, 2875 bp, Oryza sativa
  ref <308>: DATABASE ACCESSION NUMBER: AK101763
  ref <309>: DATABASE ENTRY DATE: 2002-08-28
aaggtggtgtgggcgctcttgaacttgttgccatggacatgaaagccaggggtatgtatgtttgccgcacactgagttataagggggttgattttgatattgtggaggctccccttgaggaaagaatgatgaatatgtacagaaaggcagccgaattttgggctgagttccgccttgagctcctatcagcaggtgaatcatttacagaaggcatttcaaatcaaatatggcggctatattgggctagccatcagcgtttcttcaggcatatgtgcatgtctgcaaaagtacctgctgttgtgaagttggctaaggaggccctggcagagaataagtgtgtggtggttggtcttcagagcactggagaggctcgaacagaagaagctatcacaaaatatggtgttgaaatggaagactttgtttctggtcctcgggagctgcttctaaagctggtagaagaaaattaccctctacctccgaagcctgattcttttcaacaaggtgaagaaaaagtcacagaaattcaccgtaagcggcattctgccccagatgtatcatttaaaggacgtgttagaaaagtagcaaaactggtagaagtgagtgatgatgacagtgatgattactctccatctgagtcagatcatggatcgacagagtctgatgaggagtttcacatgtgtcaaatctgtaacacagaggaggagaagactctgttgcttcattgttctggttgttctcgacatgttcaccctggttgtctgacaccaccttggactggggtattaactgatgactggtcatgctacacatgcaagaagttagaaggagaggaaaatgaacaagatgctcatgtagctgatttttcacagaggtatgatgctgcagtagagaaaaaaaagaagattttggatatgatacgttctttggatctccctaacaatcctcttgatgacatcattgatcagctaggaggccctgacaatgttgcagaaataactggacggcgtggtatgctaataagagcttctgacggaaaaggcgttgtttatcaggcgcggaatgcgaaagaagtgtcgatggagatgatcaatatgcatgaaaaacagcagttcatggatggcaaaaaactaatatctattatatctgaagcaggatcagctggcgtttcgctgcatgctgatagaagggcaaaaaaccagagaagaagagtacacataacacttgagctcccttggagtgcagatcgtgcaatacaacagtttgggagaactcatcgttctaatcaaacttctgcaccacaatataggcttctctttacaaatcttggtggtgaaaagcgatttgcatcaatcgtagcaaaaagactggagtctctaggagctttaacgcaaggagatcgcagggctggaccttctctgagtgcttttaactacgacagcaattatgggaaaaaagccctaaccatcatgtatagaggaataatggagcaggattcttttccagttgttcctccggggtgttctgacaatcaatctagcatccaagagttcattgctgaagcaaaagctgctctagtatcagttgggattatcagggatgctgtagtgtgcaatggaaaagttgctgggaagctttctggtcggattgttgactcagatatgcatgatgttgctcgttttcttaaccgccttttgggactggctccgaaaatccagaataggttatttgatctttttacaagtatacttgatgttgttttgcacaatgcacgaatagaagggcagctggattctggaatcgttgatataaaagctaaaaatgttgaaatgaaagaatcacccaagaccgttcacattgatagcttgtcaggcgcgccaactgtactttttactttcaccattgaccgaggagttacttgggagacggcaaaatcaatgcttgatgagaggcaaaaggatggtgctggttcttctaatgatgggttttacgagtccaaaagggaatggatgggaggaaggcatttcatacttgcttttgaaggctcaatcgaagggatgtataaaataattcgacctgctattggtgaagcattaagagaaatgcctttaacagaactgaaaagcaagtacaggaaagtgtcatcaatagaaaaggttaacaaaggttggcaagatgaatatgatgcttcgtccaagcagtgtatgcatggatcgaaatgcaaagtgggaagctactgtacagtgggaagaaggttgcaagaggttaacatcttgggtggtctcatacttccagtttggggtacaatagaaaaggccctagctaagcaggttcgtcaaagtcacaagcgagtacgtgttgtccgtttagagacaacaactgacaatcagcgaatcgttgggctactcattccgaattcagatgtggagtcagtttaacaggcttacagtgggtccaagatattgatgactgacatggataggcttgatttgttttgttcacattcatattggtggtgtcgatcgctttctgatgttagatgcagcagctcagaggtgcggcacatttgattttgtttttttattgagccagcaagctaatatgactaatgtgacagtgtcaacttagaaattaggcaggtaaatacaccctcaacttctgtatgtaaaagatgtggtgtaccctacccccctcttttctatttccttgttatgttgtatattgggatgtaaaacaactaaaccccagcttatatcagaaaaaagaaaaatgcgagggcgcacccaccaatatggcgccatactgtttcggaggaataggccacggttgcttattccctgcatatcatcagaatgaaaggttgtctatactctatacc

SEQ ID NO: 26322 - DNA, 2907 bp, Oryza sativa
  ref <308>: DATABASE ACCESSION NUMBER: AK101764
  ref <309>: DATABASE ENTRY DATE: 2002-08-28
ggccgcattcctccgcgcccctcagatctccgctgactccgccgccgcccgccgacatgtcgtcccgcggcggcgaggacgacgaccacgcctcgctcctcagatcccaccccgcggccggcgccggcgccgggtccggctcatcgtcgccgtgcccatctccgcgggctgtcggtggccaccaccacaaccagcacgcggacgtcgaggcggtgggggaggccaccgtcaccgcctccccgaggcggaacggcggcgtgcgtggcctcctgcggcacctcgaccgccgcctctccgcgcgcggatccggggggcgtcgaagtcagcagccgccgcagcagctcgatcgccccgagccgtccccgacgtcgtcgccgcagcagagggagagggtcggggaggagctcggggatggggcgccgccggagtgggcgctgctgctcatcggctgcctcctcgggctcgccaccggcatttgcgtcgccgcgtttaaccgtggggttcatgtcatccatgaatgggcttgggcaggtaccccaaatgaaggtgcagcttggctccgccttcagaggctagctgatacttggcacagaatactgctgatccctgtgacaggaggcgttgttgtaggaatgatgcatgggttgcttgagatatttgatcagctcaaactcgtgaaaccgcctcagaaacaaggaatcaatttccttgcggcaatctttccaactgtaaatgctgtccaggctgctgtaactctaggtactggttgctcactggggcctgaaggtcctagtgtggatattggcaaatcatgtgcaaatgggtgctcggaaatgatggagaataacagggagaggcggattgctcttgtagctgctggtgctgctgctggaattgcttcaggcttcaatgcagcagttgctgggtgtttctttgccattgaaactgtactgaggccactgaaagcagaaaattcacctccttttacaactgcaatgataatattggcttctgttatatcatctactgtgtcaaatgttctgcttggagaaaggccagcttttatagtgccagcgtatgagctaaaatctgctgccgagctacctttatatctcatcttaggaatgctttgtggagcggtcagtgtggtatttggccggttggttgtatggttttcgaatttttttggatacttaaaagaaagatacgattttcctattgtagtataccctgctttgggtggactgggagctggcctcatagctctcaaatatcctggcattctatactggggtttcacaaatgttgaagaaatactacatactgggaaaagtgcttctgctcctggtatatggttgttaactcagcttgcagctgcaaaggtagttgcaactgccctttgcaagggatctggccttgtgggtgggctatatgcaccaagcctaatgattggggctgctgttggagctgtttttggagggtcagctggatatttgataaattctgctgtacctggtaatgctgctgttgcacagccacaagcttatgctctagttggaatggctgctacactagcttcagtctgttcagtcccactgacctcagtgctgcttctctttgaactgacaaaggactacaggattttgcttcctctcatgggagcagttgggttagcaatctgggttccttctgtagtaaaccaatcaaaggatggtgaaccatctaggtttagaacacccaggcgtggttattcttcactttcttcagaagatagaaatagtaaaagctggaggcgaggtgacagtgtaaatgatcttgagctcactagcttacggactgataactatgacacctataatgaggaaatgcttctagatgatttgaaggtctcccaggccatgtcaaagagctatgttaaaattccaacatctgccatggtgacagaagctctcaagcttttgcatgataagcagcaaaattgcggccttgttgtggattgtgaagattttctcgaaggaattgttacattaggggatattcgccgtatgggatttgaattacatggggacagtttcacaagtggagaccagctcaagcccgctgaaaattcttcaaccatatcattgtgtcttactcgaggattccagtacgaggggaatgaacgtggattgctaacctgctttcctgatactgatttgaccactgcaaaaaaccttatggaggccagaggaataaagcagctgcctgtcgtgaagcgtggtgtcggccatagaactgaaggaaaacgcaagcttattgctcttctacattatgattctattggtcactgcttacgggaggaaattgagaactggaaggccatatatcaaataaaagaggacttccatctcatagcaaatgggcattgaacagcattacattgaccaatattacaccacatcaatcgcatgcaatttgatatccttaaggcatttttgccaaatggggatacaggaggtatacacgaagttcaacttgtacagatttgaggctcctctacaaagaattaaattgccatctgaggaaattattcaggctagctagccaattttgcaatagaggttatggtccattcttgttgcgaagcaacttctacttcacacgggaggagatgggtatgtatgaattcagttattcagaattggaaagtggcattgtaatgtatatcttgtacctgtactatttgtaactgtgtaacatcctgttgctgggaagcatcatatgcgccagcttgtagaggtgcagtcacacgagaaactagtgtaataaagtgtgcagcagaaaattttgtcaagaagccgatgttgtaggttgtagcgtcacattgtatgtaacactttatatcagcacttgaactgaatttctccc

SEQ ID NO: 26323 - DNA, 1929 bp, Oryza sativa
  ref <308>: DATABASE ACCESSION NUMBER: AK101765
  ref <309>: DATABASE ENTRY DATE: 2002-08-28
ggtctgtcacacacacacactccagtacccccacgctttcggcacattctcctcgcgcgagaggggggaggagaggggaggggggaggagcgagagcggagcgatgggctcgccggggcatggggatgcggcggagagggacatcgacgatctcccacggaacgacgccaactacacggcgctgacgccgctctggttcctggagcgcgccgccgtggtccacccggacagggccgccgtcgtgcacggcccggtgaggtacacctgggcggagacctaccgccgctgccgccgcctcgcctccgccctcgcgcagcgatccgtcggccccggctgcacggtcgctgtgattgctccaaatgtcccggcactgtatgaagctcatttcggcgtccccatgtctggagcggtggtgaactgcgtaaacatcaggttaaacgccgagacaattgccttcctccttgaccactcagtggcagaggtcgtcatggtggaccaggaattcttcaccctagctgaagagtccctgaagatactggccgagaagaagaaatggtcgttcaggcccccgatcctgatcgtcatcggcgacccgacctgcgatccgaagcctctgcagtacgctctggggagaggagcgatcgagtacgaggagttcctgaagaccggtgacccggagttcgcctggaagccgcccaaggatgaatggcagagcatcgcgttgggttacacctccgggactacttcgagccccaagggcgtcgtgctgcaccaccgtggcgcctatgtcatggcgctcggtgtcgccatggtttgggggatgcctgagggagctgtgtacctgtggactctgcccatgttccattgtaatggttggtgttacacttgggcaatggctgcgatgtgtggaaccaacatatgtcttcgccaggtgagttcaaaggcgatatactctggcatagtgaaccatggagtgacacacatgtgcgccacgccggtcgtcttcaacaacctcatcaacgctccggcgagcgagaccttcctgccgctcccgcgcgtggtcaacatcatggtggccggagccgccccgacgccgtcgctgctcgcggcgctgtcgatccgcggcttccgcgtgacccacacgtacgggctgtcggagacgtacggcccgtcgacggtgtgcgcgtggaagccggagtgggacaggctgccgctggaggagcggtcgcggctgcactgccggcagggcgtgaggtacggggcgctggagggcctcgacgtggtggacccgaagacgatggcgccggtggccgccgacggaaagtcgtacggggagatcgtgatgcggggcaacgccgtgatgaagggctacctgaagaaccccaaggcgaacgcggaggcgttcgccggcgggtggtaccactccggcgaccttggggtgaagcaccccgacgggtacatcgaggtgaaggaccggatgaaggacatcatcatctccggcggggagaacatcagcagcctggaggtggagaaggtgctgtacgcgcacccggcggtgctggaggcgtcggtggtggcgagggcggacgagcagtggggggagtcgccgtgcgcgttcgtgacgctcaaggaaggcgccgacagctccgacgaggcggcggtggccggcgacatcatgcggttctgcagggagaggatgccggggtactgggtgcccaagtcggtggtgttcgggccgctgcccaagacggcgacggggaagatcaagaagcacgagctgaggaccaaggccaaggagctcggccccgtcaagaagagcaggatgtgagctcctcttttgcctctgcactcggctggttgctgtcgtcgttgtgttcttcggataaaaggatttgggttgcaatgctgttgtatgtaaactgttccgtc

SEQ ID NO: 26324 - DNA, 1800 bp, Oryza sativa
  ref <308>: DATABASE ACCESSION NUMBER: AK101766
  ref <309>: DATABASE ENTRY DATE: 2002-08-28
ggcgtcgcggtttcggtctggtccccccccggagccacgccacgccatcgtcgtcttcctcctccacctcctcctcgtcgtcgtcgtcgtcttcttcttcttctccccctgcaacgcaatcccatctcatcgacctgcttgcctgcatagtgcgcgccaaccccaaccccttcccctctccaaatctcctactgccccggccccgtgcttcttcgacctgggcacccgcactggtgcgggattggactcacagattctagggtttcgcccctcgcggcgattccaccacccaaggtttgcgttccttctgttggtgcatacacgactccacctatcaccgttatgttctcgctgcgcaatgcatagaagctgcactcacgaggctccatctcctatgcttgtaccagtatactaaacaatggccaaacttccaatagttggtcgcagtgcacctcgcaaacccaacgaaagcatgaggcttcttgtagtaacagttattggggtgatgttaggtttctttattggaatttcgttcccagcagttagcataacaaagcttcacttcccatctagtattgtttcgtacatagaagacaagaactcagcattgacagctcaagcgatactaaatcatgcttggacagctgctaggaatgcaaagggaaatgatactgaatcaagctcagacactgccatgaagatttatgtaccaacaaaccccagaggagcagagagcctggcacctggtattgttgtaccagagtccgattttcatccacgcaggttatggggaaacccagatgaggatctacccttcaaaccgaagtaccttgttactttcactgtcggaatttcgcagaaagagaacataaatagggcagtcaagaagttttctgataattttgctatcctgttatttcactatgatggtcgggtgagtgaatgggatgaatttgagtggtcaaagcgagctatacatgttagtgtacggaggcaagcgaaatggtggtatgccaaaagattcttacaccctgatatcgtggcatcttatgagtacatatttatctgggacgaggatcttggagttgagcattttaacgcagaggagtacattaaacttgtcaagaaatatcagctagaaatctcacaacctggtttagagccagatcggggattgacatggcagatgaccaaaagaagaggggatcaccaggttcacaaggagacagaggagagaccaggctggtgcactgaccctcatcttccaccttgtgctgcctttgttgaaataatggccccggtgttctccagagatgcatggagatgtgtatggcatatgattcagaatgacttggttcatggatggggtcttgatttcgctctcagaagatgtgtagatcctgcacatgagaaaatcggtgtcgttgattcccaatggattgtacatcaagtggttccttctcttgggaaccaggggcagtcagagcacgggagggcaccgtgggaaggggtaagggaacgttgtcggaaagaatggggaattttccagacgagaattgcggaggcagagaagtcatattacgagatgatgggcgtccccccaccaaacgtaacatttgtccactaggctactatacattacctgctgttaatccgctcacctattttttagccccaatacaatagtagcacttgtgtagagagctaagctagatatgatgatggtgatattcatgatacgtgtagagcatacgaaacgtcatatctatctattaattccattttttctgtttgatctcg

SEQ ID NO: 26325 - DNA, 2079 bp, Oryza sativa
  ref <308>: DATABASE ACCESSION NUMBER: AK101767
  ref <309>: DATABASE ENTRY DATE: 2002-08-28
ggggattcttctccgcttcccccgccctcaaatcgcaccccggatttactcccccaattcctcgctctgctctgctgctggattagtgtttcttggcgggatttggtgagcgattgattcgattcgattggattcgattcgatttgatccgccggaggggagggggggagctcgccgcggagttcgtcgccatttcgatccgtacggcggcgtcggggtcggcgtcgtccttggatgattccgatcgatccaggggcaaggccgccaagatttcgtcgggcggaggcggggatcgcggcgggaggggtggatccatggcgacgggggagaaggcgccgcgggctttctcgatggaggagctccccggccacctcatcggggaggtcctgacctccggccgcctcgccgccggggacctcgcgcggctcgaggccacgtgccgcgcgctccgcccgctcgccgagcacgccgcctccaggctctgcgccgcgcgggcggcgttcgcggccatgggccccgccgcgcgcggggagctcctggagcggtgcggcggcagctggaagaaggtgctcaggttcctgcagtccgtcgagcagtcctccggcaccgtccacacctcctccggcaacatgcaagtagcgacaggaagatatcacacacttttggtccatgactcttctgtctattcttgtggatccagtttgtgtggggtgctaggtcatggcccagatacaacccagtgtgcggcattcagcagggttcccttcccatcactttctcgtgttgtcaacatctctgcctctcacaaccatgcagcttttgtcacagagttaggggaggtcttcacttgtggagataattcatcattatgctgtggtcacggtgaggtggggcgaactatatttcgaccaaccgaaataaaggccctaaaaggaatttcttgcaaacaggttgccactggtttaagttttactgtcattcttacaacggatgggcaagtatatacatgtggaagtaacacacatggccagcttggtcatggtgacacaatagacagggctactccaaagatcgttgaattatttgaaggccttgctccggtagtgcaggttgctgctggtgccagctatacatttgctgtaacggatgatggaacagtttattcctttggctcttgtaccaacttctgccttggacatggagatcagcatgatgaacttcgtccacgtgcaatccagtcattcaagaggaggaatattcatgtggttcgcgtgtctgctggtgatgagcatgctgtagctcttgatgcactgggttatgtttatacatggggcagaggttactgtggagcattaggccatggtgatgagaatgacaaaactagcccagaattgatcagcagtttgaagagtcaagttgctgtgcaggtctgtgcaaggaaaagaaagacatttgttcttactgatgagggctcagtttttgcattcggatggatgggctttgggagtttagggtttcctgaccgaggatcatccgacaaagtaatgaggcctcgagtcctcgatagtctgcgtgatcactatgtttcacaaattagcactggcctgtaccacactgttgcagtgacaaacagaggcattgtatttgggtttggggacaacgagcgcgcacaacttgggcaggagtacattcgtgggtgcttaaaacctacagaaataatgttccagaagagtatggaagaaatagtaattgcggcacccagcgggtaaattcaactccaagatgcaattttagtcccaataatatgcatattgtttccatcccaggtttcttctctgcaagtgtatttttatactagctttcagtgatttgtgagtatatggtaaacgggagaagatcaaagttggaggacagtgttgtagctaaaggagcatatagtgaggtaatttggtggtgtattaaataatttaactcggccattttctcatgtataaaaattattggtgtgattagagtgacaaactatttctttcccttggctcagttagttcaatcaagtgttgaactgttggctctagc

SEQ ID NO: 26326 - DNA, 1400 bp, Oryza sativa
  ref <308>: DATABASE ACCESSION NUMBER: AK101768
  ref <309>: DATABASE ENTRY DATE: 2002-08-28
ggtttcccctctttttcctgagccgccgtgccccagccgcctctccccacgctagccactctctccaccgccggccgccaactccagccgagtcgcgccgcctctccggtcgtccccgatctgcgccgtcgcctccctcggctttgtagtgaagagctctatcccggccacccgttcttttgccctgaaccccgccggaagtcgtcatcactgtgaaggccgaaccgtcgccatgttttgatctccggcgaagctttgccgtcgactccgtggtcgccgaaccccgctgtctcctccgttggcatcgcagcgacaacagcaagcatggcagccgcccccgtgaagccacaagccatcggagcgtcatcgtcaccgtgaagccgatctaatccatcttcagccgtgccgctcatcgccgtccatcgccgccttcgttcgctgtcgccacccacgggatcgcaggagggaggtgaagactgtccgccccttagttgctgcctcccctcgtcaaaacgccgccgtcatcgtggacagagccacgccgccgcttaatctcgtcgccggccatctcccgtcatcgtccgtggtcatgccggcccttggtttagttttccgttgtttcggatgatcgttcgttcgttggaggagttcctgaagacgaattgaagacgcttgtttgtaagttgaagaaaaaggatccagaaggagaagacgtttggcttataccccagttgagctgcctgtgggagtggagctgaagcttcgctaggttttatttttccactctagttttcttcatggcttgggagaagaacttcagggtgtgacacctcgcgattcccaaccctaaccgccgtctccccgccccaaaggtctccggcgcgtgctccccccaaccaccggcgccgattcccaaccctgcacgccggaagctctcccatcgccaggtgttatatataattttgagataccggtcacgccgacgccgtcttctccctacttcacccgcagggtgaaacgacagttgaaggttactagagcgtttggtgcaggctttctaaataagatacaagtgaagctatttgtgtgagctctagctgtaccaaaatctctcgagttacattgttgaacaaagttggtattggctgtgcaaccagatcagtcgcacaggactttgtccaaattgtgtgtgtcattcctaatggatgcataaacaataataaaacttttgtatgcgatatgtgtttgatcctatgaagaatgtgagggggatttgggtgatctcaccagctgttggctcttacatggcatgatttacagtgtgtaaaaaaacatgacgtgctctgtaagaattgatgagtcttgttcaatataaaagcagaactatcgatatgccgtgg

SEQ ID NO: 26327 - DNA, 2532 bp, Oryza sativa
  ref <308>: DATABASE ACCESSION NUMBER: AK101769
  ref <309>: DATABASE ENTRY DATE: 2002-08-28
gcctccccccacccccccgctcctctcaaatctcctcccatcccccagatcgatctccacaaccccaaaaacaaaagaaaaaacaaaattctgggaatggagcagcagcagaagcaggaacccggcggcggcggcggcggcgtcagagtcgtcgcgaggatctgcccctgcgcaccaccgccaccaccacccgacgccgccctcaacttccaggtcgccgccctcaatgaccccgccctaatctccttcatcccccgtcgcccaaccgcatccgccgccaccgccgcggcctctggccgaggagatggccccaaggataagcagcagcagcagcagcagaagtacagggtcgatggctgctacctcagagacgatcccaaccaccgcgtcttccacaacgaggtcaagccgctcattgatggcagaggtggaggaggaggaggacgcggcggcgccaaagcctgcgtcgtcgcctgtggtgatgcggctgccaaacgtcacctcttcatggggtctcctgatcaacctggcttgttcaccatggcaatggcgcaactcctcgactcctccaaagccattggtgccgctgtcactgtctcatcctatcaggtgctccaagatactcacatcctcgacctcttggagcccaagaaccatgaggttctcatactagaggatgccgacggacagactcacctcaagggcctctccagggttggtgtcaactcaatcgaggagttttcgcagctttgttgttgcgctaccaaccagcagaggcaccatcccgctaaagattccacccagttacaggattggggacaccaagggctgattatctacgtctctagctttgatcagcaaggcaaagaatgtgctctagctaagataaacttcctcaacctggcaggctatgtggatcccaagcagaagaagaatgaaggtcttgctctactaaccggtaacaagtctatgcatgccttgatgaatgttgtccaagcactgaacagcaaccagagatttgtaccatatagacaaagcaaagtaactcgtattctgcaagattctttatgcaagagcaagacgagcggtagcgtcctgatagcctgtttggctgaagattgctgccaagattcagtttctactcttgccttggcttctcgctcgagccaagtggtcaatgaacaatactacagcttatccttgagtgctaaaaaatcatcaaagtcaaatatgaacttacctaccgatgccaaaaccttgtcaaggacgtttattcacaaaacaatgtcgatgcaagagaagaatgcccgacctggattcaataatagtggtgtaaaaggcggacaaactcctactgctaatagaaggactcagccaatcattagttcaacgaaaaaatctggaagctcaatctgtacttcaattaagatgaaggaaaattatgctaaacctaaaataagtggaaggaaattattttgtccaagcaacaattcattgaaggaggagaatgctacggatgttgcttctacagtggtaacagaaactaagtcagcaacagtgagaatacaagctgatgaagtacaaccattagtaggcatggaaattcgagctgcattactaaatgagggatgttctgaaataggaaacaccggagatgttaaatcatctgaaatgcaagaagtggtacattgcagcacacaagaactgctagcaagtactatacaagaagaggactatgccttgtcaaatatggaaccggagaattcatgtactgacatgggattgacctgctcttctatcactgataaccttgttgagaagactcctgccagcagtaccctatcctccccaaagttgagtgaccgactgagagagatttcaaactcattgaagcttcttagcactcggccagtgagcgtgagggcagaaaagtgggacatagaatgtgcccggagaatcaacacgattgcaccagagccaaaaactcctgaagtgcatttgaaatttgagcaagcagaagatcccaaggataaacttacggcccgcagcactgggattaagaaatctctagctcaagagtgcttgacttttctcaacagtgctaataaggagcaattaaaaagcttaaagggaatcggagataaaagggcaaactacatacttgagcttcgtgaggagtcaccagagctatttaaagagataagtgatgtgagagacatcatcggaatgaattcaaaagagatcaaaaagatgatgtccgggattatcgacccctaagaaagtgagcaatgggagtgcgatggttctcctgtggagtgtgcatatgcatctttggtcaaaggtgtcatgtctttgttttgtatttttttttgtccagttgcttctcaagagcgaatgctttggtcaggagttggcattctgtgagagaatcagtgctttgcagtggtttgctgctattatgtgttctttgtaatcatcatacagtgtcgtaccaatattgataatgtgtggcgttaatgtgatttcctctct

SEQ ID NO: 26328 - DNA, 829 bp, Oryza sativa
  ref <308>: DATABASE ACCESSION NUMBER: AK101770
  ref <309>: DATABASE ENTRY DATE: 2002-08-28
gacttctgcatcacgccgctgttcttgccgtgcgcttttctcccctttccaccagctgaactcccgatcggtctcccccgatcagagagatccattcatccacccagcaaggcaatggatgcctctgaccaaggttgccggctgctcggcgcccagagatcgctgcacggcctcctcggcggcggcgccatggcggatgtggtgctgtggaggaggaaggaggtggccggctggtcgctggcggcggtggcggcgtcgtgggtcctcttctattgcttgcctggctacacgctgctctccttcgtgtccagcgtgctcatgatcgtgctcgtcgtcctcttcgtctgggccaaggccgcgcggctgctcaacaggccacctccacctgttccactgatcaaaatatctgaagactcaatgagcaaagcagcagctgcagtgggtaacatcctacataaggcactacagggttttgaaaacattgcacacggaaaggactccagtctcttttacaagatggtttcagtattactgctgatctccatagttggccgtgtgactgatctcattactttggtatatgcatgccttgttcttgctctcaccatccctgcattggtggataaatatgaagaaaacattgccaagttcttaaatcaagcgtcagcaaatattcaggcatgtggacaagcatggaaagcatataaatctaagattaagaactgatcttggaaaacaataaactgttttgatctcattgtacagttgtcaacaaaattttgccttgtatacttgtcttcctagagttaaacatgttgacatccgtctt

SEQ ID NO: 26329 - DNA, 1480 bp, Oryza sativa
  ref <308>: DATABASE ACCESSION NUMBER: AK101771
  ref <309>: DATABASE ENTRY DATE: 2002-08-28
gtggctgtgacgagggcgcgaatggccggcgcctcctccacctccgcgtcggcgcgggccacgccaccggctcgctcattgcctccgctcggcgcgtcggggagccagcaggagccggctgccactgcgagccaccacgccgccggcgccggcgcctcgtccaggccgatgcggcgcaagggaaggaagcagaagcagctgtggccgaagacggtgcttcggaaatggctcaacatcaggtcgccggaatccgacttcagcgccgacgagggcgaagccaccggcgacgacgacaccgatagcgagttcgagtacgaagaaatgtgccattgggagcgccaactatatgatgaggagaggagactgcgtggtttgggcgctgagacaattgatagccaaatggagggtgctccctacaagcttaatagaaggcgcaagtcagagacccttcgtgcccaatatatcgacattaaggaactcagggtctgcgtaggaacatggaatgttgcaggaagacttccacctgatgacttggatattcaagattggttggatatggaggagccagctgatatttatgttcttggatttcaagaaattgttccattaaatgctgggaatatatttggtgctgaagacaaccgtcctgtcgcaatgtgggaacatatcattcgtgaaacattgaataagattagtcctgataaaccaaaatataaatgtcacagtgatcctccttctccatcaaggttcaagccttctgacgatgtggaagatgaacttgttagtgaatctgacagcgaaagtggcggggaagtgcacccatggaatgaacaagattttaccgttgatgatgacagtgttcatagtaataaatatgagcactctacttctggtcctactgaaactaccgtaaatggaaacaacttcagcagggtgccttcaatgaagattttcgatagatcacacaacttaagttttaaagactatgtatctagtttggaagagccaatccatcaaaaaatgttaactaaaacactcagctactcagagaggcttggaatgatttggcctgaacaaccgttggatatattggcccagcgtcttccagacagcacgaaaccatttatttcagagaaggcactgaggtcatgtttgtctttcaaatcagcacatggagattccaatgcttttccagatgattgtttagttcatgattttaacatcaaaagtgcactagtcaaaacgaaaagaccatgcttcgtaaggataataagcaagcagatggttggagtttttatttcaatatgggtacgaagaagcatgcggaagcatattcaaaatttgagagtatcaaccgtaggtgtcggtgctatgggttatattggtaataagggatcaatagcagtaagcatgtccatttatcaaacactcttttgctttatatgttgccacctgacctctggagaaaaggatggagatg

SEQ ID NO: 26330 - DNA, 1256 bp, Oryza sativa
  ref <308>: DATABASE ACCESSION NUMBER: AK101772
  ref <309>: DATABASE ENTRY DATE: 2002-08-28
gattgcatcgcatcgcattgcatctgcaagagtagtagtagtggtgctctggtagtctactgctgcttgatcgatcgatcgatcgccatggcttcttctctttcagtggccgtgctcctgtgcctcgccgccgccgcggcggcgcagctgtcgccgacgttctacgacacgtcgtgccccagggcgctggccaccatcaagagcgccgtgacggccgccgtgaacaacgagcctcgcatgggggcgtcactgctcaggctgcacttccatgactgctttgtccaagggtgcgatgcgtccgtactgctggcggacacggccacgttcaccggcgagcagaatgctcttcctaacaagaattctctcagaggcttcaacgtcgtcgacagcatcaagacgcagctcgagggcatctgcagccagaccgtctcctgcgccgacatcctcgccgtcgccgcccgcgactccgtcgtcgcactgggagggccgtcatggacggttggtctcgggaggagggactcaaccacggcgagcatggacagcgctaacaacgacctgcctcctcctttcttcgacctcgagaacctcatcaaggcgttcggcgacaagggtttcagtgtcaccgacatggttgctctctcaggtgcgcacacgatcgggcaggcgcagtgcaccaacttcaggggaaggatctacaacgagaccaacatcgacgccggctacgcggcgtcgctcagggccaactgcccgccgacggccggcaccggcgacagcaacctggcggcgctggacacgacgacgccctactccttcgacaacgcctactacagcaacctgctgtccaacaaggggctcctgcactccgaccaggtgctcttcaacggcaacagcacggacaacacggtcaggaacttcgcctccaacagggcggcgttcagcagcgccttctcgtcggccatggtgaagatggccaacctcggaccactcaccgggagccagggacagatcaggcttagctgctccaaagtgaactaataattaagtaaagaatcaaactggatacaaaagcaaacacaaatttgggaataaggctgggccatatatgtcacagtagtagtattttactagtctgaaatgtttgctaagagtgttttctctgatcagcacaaagtgtttgaaacagatcaggaagcccatgttatgtaccgatcagtatggttttgaagttatcaaggaatgcatgaatgataatctcc

SEQ ID NO: 26331 - DNA, 3374 bp, Oryza sativa
  ref <308>: DATABASE ACCESSION NUMBER: AK101773
  ref <309>: DATABASE ENTRY DATE: 2002-08-28
gagttcagacttcagaggatgctgctaagcgcgtgggacttgatctcaagtcgtcgcagcctcgcaggctaaagatcaaggcgagggagagagaggggagtagcctctcgacctccaaaaatcatcatctgactagctctgctcttcgatggattagctgacgaaagaagacccttgttctgatttgagggttttcatcacattatttcgccaactgctgcaataatacctagaggctagaactacaagctcaagtcaagccccagaagcactaaggcaatggcagaagctgtgctgcttgccatctcaaagatcagtacagctttgggagatgaagccaccagggctgtcatagccaaactctccggaaaagtatctaacttgagggaacttcctgacaaagttgagtatatcagaagggaattgcgtctcatgaaagatgtaatacaagatttagattccacaaataccaacatgaatgttgtcaagggttggatcgacgaactgcggaagctggcttaccgtgttgaagacataatggacaagtactcatactatgcttgtcaacggcagcaagaaggatcagtgatgagatgcgtaagaggagcacattatgcaggtgttttcagtgaagttgctagtgaggtaatgaagataaagggtgatgttgaacaggttaaaagacagcaaatggaatggttacctacagttcagctcatttcaagaacacccactgacatcgaaacaccgcgatctcaaggaagaagaaagttgcttgaatgtggcgatcctgtggggattgaatacaacaggaaaaggttgcttgaattactgtaccctgaagaaccaggccacaaagtgataacagtgtctggtatgggtggactgggaaaaaccaccctggccttagacgtatttgaacgtgaaaagatcaagttcccagttcatgcctggatcactgtgtcacagacttgcacgatccttagtcttctaagacagttagtcagtccgctcatacccatggaacaagaatcatcagaatccaaggaagatctaatcaacaaaatgggcgttcatgaattgacaaaagaattaaacagaaggactgaaaactgtacatcatgtttgattgtgctagatgatgtctgggaccagaacgtgtacttcgaaatacagggcatgcttaagaatccccaagcaagtcgcattatcatcacgacacggatggaacatgtggcagttcttgctccctctgaatgccatctcaagatacaggctttgggtgaaattgatgcattcaaccttttctgcagaagggcattttacaacacaaaggaccataggtgcccgctggaccttgagaatgtggctgcctccatagtaagtaagtgtaaggggctgcccctagcacttgttaccatgggtggcctgatgtccacaaagctacaaactgagcatgcctggcaacaaatgtacaaccagcttcggagtgagctggccaaaaatgatgatgtcaaggcaattctgaaagtaagctaccatgcattaccagctgaccaaaagaactgcttcttgtactgcagcctgttccctgaagattttcgcatatctcgtgagagccttgtgcggtactgggttgcagaaggttttgcggtgagaatcgaacacaatagaccagaagatgtggccgaaataaatctcatggaactgatccaccggaacatgcttgaagttgacgagtatgatgagcttggcaaggtgatctcttgtaagatgcatgacattgtgcgcaacctggctctctcaattgctggacaggagaggttcggttacgcaaatgattatggagctgtggaaaaggttgattgggaagtccgtcgtctgtcattattcttgaacaatggaaaaggttgtgcatcaacagtgaaatttccacatcttcgcacactacttgaaacaactacacaccctcctggattgttatcctcaattttgtctgaatccaaatacctcactgtcctagagctacaagactcagatatcaccgaagtaccagcatgcataggcaaattgtttaatttacgttacattggcttaaggcggacaagactctgctcactaccagagtctattgacaagctctcaaacctgcaaactctggacatcaagcaaactaaaatagagaagctaccacgtggaatcactaagatcaagaagctgaggcaccttctagctgacagatatgaggatgaaaataagtcagagttccggtattttattggagtgcaagcacccaaatatctgtctaagttggaagaacttcagactcttgagactgtggaagccagcaaggacttggccgagcagctgaaggaactaatgcagataagaagtatttggattgacaacataagttctgctgattgtggaaatatttttgctacactatcaaatatgccgcttctttccagcttgcttctttcggcaaaggatgaaaatgagccactttgttttgaggctctccagcccatttccaatgaactccacaggttaattatcagagggcaatgggctaagggcacactagactacccgatatttcatagccatggtacatatctgaaatatttagctctaagttggtgtcatcttggtgaagatccactggggatgctcgcatcacacttgtcaaacctcacttatctaagactgaacaacatgcacagttcgaaaactttggttcttgatgcagaggcgttcccccacctgaagactcttgtgttaatgcacatgcctgatgtcaaccagataaacatcacggatggcgcccttccatgcatcgaaggtttatacattgtatcattgcggaagctggataaagtccctcaaggcattgaatcccttgcctccctaaagaagctctgtttgatggacctgcacaaagacttcaagactcaatggaatggtgacgtgatgcaccagaagatgctgcatattgcagagatccatgtagggtggtgaagccaggatttagagacggggggtgccatctacgagacgtggtaactcacttaaggttcggtgaacagtgacattgtagcgttgatgtatgattgctaactcgacatcatacatgttatagcgattagctagaagagagaatgagaacctatagatcataatttgccaatttaaacagtttgttccatgattttaattggagtcttgcaatcatttttaaaatgataaatcagttaactaagtcatttcataagtcctatatatatagctaggcagttgtcctatatagttagtctcatccgcaactaatgatgtaattaatggctagattataagggctaattatccttggg

SEQ ID NO: 26332 - DNA, 1347 bp, Oryza sativa
  ref <308>: DATABASE ACCESSION NUMBER: AK101774
  ref <309>: DATABASE ENTRY DATE: 2002-08-28
ggtgagttcgcccgccgcctcgcctgcgccgatctccatcgaactcggcgagcagccgaggcggacctgctgcctccttccgccgcaagcatcctcgccgccggatcataatattgctgattttgtatgatttgattcttgttgggtgagcccaagatgtctggaaatgacgataggtctcaggctgcagctgagagaataaaagcacaggccttatctgctgccaagggattgagcagaactcaagccgagcgagctgctgcagccgctgcccgcaatgtcaatgcttatgggcagaaagaagagggaccttcgcgctggcaggagaggaaggaggccaagagacagatgtatctgatgagtacagagaaggctgtgatactgggagtgaaaccaaaagctgcgcaaacttcttcttcttctggtggcgcatatacccagtgccagaagtgttttcagcctgggcactggacatacgagtgcaagaacgaacgggtctacatttcgcggccctcgaggacacagcagctcaagaaccccaagctgaagaagacggctgctcctgtttcctatcagttccagaatcctgatcttgagaaggaaaaggaagaggaaaggaagctgatgaaagcaaagttgaagaaggagaagtctgagaaaagcaaacggaaaagcaagagaaaataccgttcacggagtgattcagatagtagtgagacttctgtatttgactctgacagtgaatcatcagttaccggctctgaatattcttctggaagtagctcaagctacagctcctcagactcggaggacaagaagcggcgacccaaaaggaagcagcagaagaggaggcacagaagggaaacctcatcatcagcatcgtctgaatctgactccgaatctgcatctgcatctgacagtgattctgatgacaagggcagccgaaagaagagcaggaagcgaagcgctaggcgctgagtttgaagaactggagcaggcaacaaggacatcaattacgatgatatagtactatgtctaaatatcatttcttctcgtcaaaatcgtagatgcatgtaccaggcatcctccgacaagcatgtaacaatttaggtgcagggcgagtactgttctatcctcgattgtaacaatttctatcctcaactcaggtccagggcgagtactgttcttttttccattctacaatgaagtagtatttgaagctctagatcttcgtgttgtttgtatgccgttaatcattttgagaacctgtgaatcatgcaacaatgttttatctcccaatttctatgtttggctcgcttatcttcctgaaagttttctgtaatcatc

SEQ ID NO: 26333 - DNA, 3155 bp, Oryza sativa
  ref <308>: DATABASE ACCESSION NUMBER: AK101775
  ref <309>: DATABASE ENTRY DATE: 2002-08-28
gtaggagctcgcttgctttgccgttgccgacgtcgcccccaatctcccgcataacgccgcggccgtagtagtcccgaaacctccctcccccacattgcttgtctcctccaccttgaacccgagtttctcacccacatccaccagatctgcgaggaggtaggaaagctcgatgcccgatctgtgaagcggaagcagttagctagttgtagttgagagcgggggtggccacaatgggaagctccagattcgtgctcttgctcctcctcctcctcgccgtggcggcttgcgtcgcgcgggggcaaggcggcggaaactcgagcagcgcggcggcgccggcgccggctgcgggggcggggccgttcgtgccgcgggacgacatcctgctcgactgcggcgcgacggggaaggggaacgacacggacgggcgggtgtggagcggggacgccgggtccaagtacgcgccggcgagcctcggctcggcgtccgccgcggggcaggacccctcggtgccgcaggtgccctacctcaccgcgagggtctccgcggcgcccttcacctactccttcccgctcggcgccggccgcaagttcctcaggctccacttctacccggccaactactccagccgcgacgccgccgacgcgcgcttctccgtctccgtccccgccgccaacgtcacgctcctctccaacttcagcgcctaccagaccgccaccgccctcaacttcgcctacatcgtccgcgagttctccgtcaacgtcacgaccccgacgatggagctcaccttcacgccggagtagggccaccccaacgcctacgcgttcgtcaacggcatcgaggttgtctcctcccccgatctcttcgacatctccaccccgaatctggtcaccggggatggcaacaatcagccattcccgatcgacgctggcactgctctgcagacaatgtaccgacttaatgtcggcggccaggcgatctccccctccaaggacacgggcggttaccgttcgtgggacgatgactcgccatacgtttttggtgcggcgttcggggtgtcctacccaaaagatgacaatgtcaccattgcctaccctagcaatgtgccggagtatgtggcgccggtggatgtctatgctacggcaaggtcgatggggccggacaagaacgtgaacttggcatacaacctcacttggataatgcaggtggatgctgggttcacataccttgtgaggcttcatttctgtgagatacaatatccaatcactatgatcaatcagcgggtgttcaacatttacatcaacaaccagactgcttttcagggcgccgatgtgattgcatggactaataacaatgggatcggcagtccagtgtatcaagactttgtagtgacaacagttggttcaggggctatggatttgtgggtagctctctatccagatgtccaggctaaaccacagtactatgatgctatcctcaatggactggaggtgttcaagttgccgcttagtaatgggagccttgctgggctcaaccctgttccaactgttgagccatcgttggatggtggagcagtgaagaagtcaagtgttgggcctattgttggtggagtgattggaggtctggtggttcttgcacttggatattgctgctttatgatctgcaagcgtcggagcagagtggggaaggacacaggcatgagtgatgggcattctggatggttgccactttcactctatggcaactcacactcatctggctcagccaaatcacatactactgggagctacgcttcatcgctgccatccaacctgtgccgccatttctcatttgcggagatcaaggctgcaacaaacaacttcgatgaatccctcctccttggtgtgggtggtttcggtaaagtgtatcgtggggagattgatggtggagtgaccaaggtggctatcaagcgtgggaatccactgtctgagcagggtgtgcatgagttccaaaccgagattgagatgctgtcgaagctccgccaccgtcatcttgtgtcactgattggttactgtgaggagaagaatgagatgatcctggtctatgactacatggctcatggaactcttcgtgagcacctgtacaagaccaagaatgcaccacttacatggaggcagcgcttggagatctgcattggtgctgcccgtgggcttcactaccttcacactggtgcgaagcacacaatcatccacagtgatgtgaagacaacaaatatcctcctggatgagaagtgggtcgcgaaggtttcagattttggtctgtcaaagactgggccatcgatggatcacacacatgtgagcacagttgtcaagggaagttttggctaccttgaccctgaatacttccgcaggcagcagctcactgagaaatctgatgtctactcctttggtgttgtgctatttgaggtcctctgtgctcgccctgccttgaaccccactcttgctaaggaagaagttagcttggcagagtgggccctgcactgccagaagaagggtattcttgatcagattgttgatccccacctgaagggaaagatcgctccacagtgcttcaagaagtttgccgagactgctgagaaatgtgtttcagatgaaggcatcgatcgtccttcaatgggagatgtgctgtggaacttggaatttgcccttcaaatgcaggaaagtgcagaggatagtggaagcattggttgtgggatgtcagatgagggcactccccttgtgatgcctggaaagaaggatcccaatgatccatcgatcgagtcaagcaccactacaaccacaaccacgtccataagcatgggcgaccaaagtgttgctagcatagactccgacgggcttactcctagcgctgtcttctcacagatcatgaaccccaagggacggtgagctaacagtctttgcttgtcacctgcaggcattacttattctttaaacgtattctcatgagtttgtgatgttgattttctgtcaatttatggacctggaagtcagagagttgttccatattagatatttttgttttgtgctgtatattgtccatgctgtggtgacttggatacttattggctttgtattgtactctaccgctggtattaaccaccagttgatctctattactgt

SEQ ID NO: 26334 - DNA, 1055 bp, Oryza sativa
  ref <308>: DATABASE ACCESSION NUMBER: AK101776
  ref <309>: DATABASE ENTRY DATE: 2002-08-28
gattccgctggtccatattctgtgattaacaacatgattaaaaaaagtaaggttacttcgattatgtactgctgcttgaacttcatttactataggtttacaggtacctgtggattgagagggtcactgggtcatcttttgaagttggtttgggtgacctgaagctatcaggtagattgtggtgttcttttcctcaattatgtagaggggagttctttttctggtattggagttcttatgaaagccactgaaagacaatctttacattttgtaacgtattattacatttctcaatacattttgtaaatttcagtatatttcactgaaatacaatccttacatttcgtaacgtgttattacatttctcaatacatttcgtaaattttaagtgtatttacatgttttctatgatgtattataggaatacatctatttcacatgcaggattccaaatgatatattactacgatggattccaaatgtccaacatgctatataatttattgacaataatgattctctattatttctttttgtgtgaatttaaattatcttattatcattgcttcctaaaacatatacaatatagttctttgatttgtatataatttgtatataaaatatcgccacttatattctgtcttgaagggaacaatgatcagattcttcagaagaagactcttcgaggatagcatcattggaacctgctaagcacttttacatccttgacttcaaagactggttccgccgacataccaactcgatttgatttttgctctaatttgctcaatgtggttgagttgtattgttcttctggagttttttttttttcattcgatctgtgttgtgctctttctatctactggtcagaccgaacgcctagtgcaagatgagctgcatcacttgctatggcgggcctgatggttgcatcacatggtgacatgtttatgcctgcaatttaatgtaatagttctctatctttttttttgttatttggacatatgttatcttcaaatatgtattaaagtgattgggtataatggttgatgctcttg

SEQ ID NO: 26335 - DNA, 1291 bp, Oryza sativa
  ref <308>: DATABASE ACCESSION NUMBER: AK101777
  ref <309>: DATABASE ENTRY DATE: 2002-08-28
ggggagaggagacgccatcaccaccaccactccaccttcaatggcagctcgctcgtgcaggttcctctactcctcctcctcctcccccatcgccaccacctccccgctgctctcccccaccccctccgctgccacgaggaggaagcttctgctctcctccacctgcggcacgatcgcctccgccgccgccgcgtccgccatggaggggcagggcgcccccgctgctcccggaggcaagggaagcgccatcgtcgtcgtcgactcccacctccacgtctgggcctccccgcagcaggcggcggagaggtacccgtatttccctgggcaggagccgccgatccgtggtgacgtcgacttgttgctccagtgtatggatgaagccggagtggacggagctctcattgttcaacctatcaatcatatgtttgatcactcattagttactagcgtgttgaagaaatacccatccaaattcattggttgctgtcttgctaatcctgcagatgatggaagcggcattaaacagcttgaacatctaattgtacaagaaaagtatcgtgctgtccggttcaaccccaacttatggccgtcaggtcaaaagatgacaaatgaggttgggaggtcattattcgctaaggctggagaacttggagcaccagttggaatcatggtgatgaagggaatcagtacatatattcaggagatagaggagctctgcacagattatccaaaaactactgttattttcgatcatatggctttctgcaagccaccaatgaacattgaagaagagaaggccttcacttcatttctagaactatccagattccctcagatttacgtcaaatacagtgcgctctttcgtatttcaagagaagcatatccatatgaggacacatctcagcttctttcccgtgtgatctctagctatggagcgaatcgaataatgtggggaagtgacttccccttcgttgttcctgaatgtggctacaaaggggccaaggaggcgatctctcatgtcgccggcaagatacctgtttcctcgtcagatttggaatggatcttaggcaaaacagtgacccaactgttccaaggtgcatgggtttctgcatgataggggtgtcattggttagtgtagcttttattggtcagtaaatatccttgcaatgagagggtgaaaaagattcttgtatgagaggaaaacggcgttatacagttaaagcattattctttctattcgctaattgataacctgtttaggttatccttttttgcaaggtattaaatgttt

SEQ ID NO: 26336 - DNA, 1201 bp, Oryza sativa
  ref <308>: DATABASE ACCESSION NUMBER: AK101778
  ref <309>: DATABASE ENTRY DATE: 2002-08-28
ggcaatactctcctcattaacttcttccgcgggacgagacacgagagagagagagagagagagagagccaaccgcacactacttgaatccaatccaatcgaatcaaattactagcctctcttccacgccacgcacacgcacccaatcctctatcgatcgagacatggcctccaccaccgccgccgccgccggcaacggcagcggcagcatcctccccacccacaccatcgccgccacggcgccacccttcagaacccacaaggacgccgacctggaatccaggaggcgacggcgccggcgacgctgcctgtgctgctgcctgctcgtcaccctggtggtactactcgtgctggccatcaccctcctggtcctcttcctcacggtgctccgcgtccgcgaccccaccacccgcctcgtctccacccgcctcatcggcctctccccgcgcctctccttcccggccatgtcggtccagctcaacgtcacgctcctcatcaccgtggcggtgcacaaccccaacccggcctccttcacctacgccacggggggccacaccgacctcacctacaggggcgcccacgtcggcgacgccgagatcgacccgggccgaatcccgagccgtggggacgccaacgtcaccatggcgctcaccctccaggccgaccgcttcgccggcgacctcacgcagctcgtgacggacgtgatgggcgggtcggtggcgctggaggcgagcactcggatccccgggagggtggccatcctgggcgtgttcaagcgccacgcggtggcgtactcggattgccatttcgtgttcggcgtcacggagatggccgtgcgtagccagcagtgcagcgaccgcaccaagctctgattgatcatgtgattccaacttaatttgcaagtttccaagcacgcaacgtaaggtgggcatgccacatcgcgacgtgggacaagacgagaagccatattttgttgttttgtttacaccacgcaactgctactagaagtacatagagtattactatattctacacgggtggcacattagttcgttattacagatagtataagatcaggaattcaggattcaggacttccgattttcttcagtatttcttgatgggtgttgggattgattcgattcatgtatataacacggtgtgtcagttttgacatatacgtacatatacagtatttcacc

SEQ ID NO: 26337 - DNA, 2434 bp, Oryza sativa
  ref <308>: DATABASE ACCESSION NUMBER: AK101779
  ref <309>: DATABASE ENTRY DATE: 2002-08-28
gacactcaggcgacgatgagtaatatatcatcaaaggatataatggagacattaatttcctcgatcagctactgctgatcctccttcttcgagaaatagctggcacagccacgccgaagccatgattcatcgccatgttcctcttttagtgcttgatcctgacgctgcggcttcttaggtgtaagaacaggtttatttttatgtgctctgatgtctttcttcacctgcttagggacattgtcacagtccagatcaagctccttcaatttctcaacattgccaatgccagggagaggctccaactcagcgaaggacggccgtgaccagatgatcttctcaaggtacggcggaatcggtggctcgacgcaaagcatctcgcccccccccctcccccccacgcatcaccacgatttctgcttctcctcccggcaggcggcggcgctgcccccgaccccccgacgcaggcaccgcatcaccgcatctctcccgagcccccgacggatcactgcatcaccgcggtttccgctagtcctcccggcaggcggcggcgctggtcgcgccacccccgagcccccggcgcggtatttgttttcccatatattttctgtaattagtttttgccaaactgattgaaaggttctttagcggttgacaaggtattccgaggccttcttgcaggtatatgaacctcaactctattgttttgtaacaaaaacaaatcattcaattgcgactgtagtttatgatagagtatctgcagagttttccactgatactgaacaatggcactgcataaattgtttctttatgttatttcgaaagtttgcaagttatttcctcgttaatttcagtattttgaaatttgaatggctgggttatcagatcagtatctgatccgatgtgttcaatttgcattgttgtatttaagccgaaagagaccccctcgctgctggagcaaacaactgccggcaggaaggtgtggcaatatctggcttgctagatggaactggagattatgaaggtgacagggtgcttgttggagatgtgccgtgggggtgtgttttccgttctaccttgcattttcagagagtagtaaacaaagttactacatttattggatactgattacgcaaacagcaatgcttaaaaatgatatgcagtctattgccttaatttttttttcagttttattgattatcaaatgattatcaaactgagaaaaaataattctaccatcaaactagaccatgcctcctatttgataggagcaattttacggttcttaaggagataccatgaggtatcattttttttattgtaaatttggtacctcttggtatcactaaattttttttatctcatagtaccttctcaaaaggattgtagaattgcttatctgatagtctgaaactccaaatcatgtaggatgtttgtttcttcagttaagagactgagagtactgaagacatctgacctatcttcatctgttagtacctctttccaccttccttctattacatcaaactcacggtaatctccgcattattctgaaatttcttcatgccatataatccatgcagcttaacttctggacggaaaagaacagcagctgagtgttgaccttcttttttcgatctgcttaacactttcagtgacctgctgttcagaagaatatgatcctctgagcttgtatcatcgtctctttctctcaatgtcttgctgtgctgagcttgtaaccagccattagagaagacagtccgagattagggcaaaaggatagctccatccaagagacgaaggccattcagtgagacattgcacacaaataaccaataaggttattgtggctcacaaactttgtatcttttgtattaatggcattgtttttttattggattaatggcagcaatagctattatatatagtgtgcaaacaggaggatttttaacctccccaatacttttttttttcggatcagctctgaaaatacatataggccacttgagcactgtattctcttatcaagccatgctataatttacagaagtttgtgagaagaactcaggagattttgcattttatgatcttgcaggactagttgtcatggacacccttttttaccttatccatcaataatattctcagtcgtgcaaatgccttcttttactttcctaaccttctgtatacatgcatagcagggtcaggttcttagtgagagatggtgaaacagaagggagctccagtagcatgttttggttcttgaagccttgcacatttctagtggagtaacagcaaaataaccagaagctttgaagaactgcactttatgtagtcaggatacattatttcattctgttcgattccaatttggccaattcatatgatcgacatttttgtcaggaaataaacagcaagcaatgtatagttacttacc

SEQ ID NO: 26338 - DNA, 2798 bp, Oryza sativa
  ref <308>: DATABASE ACCESSION NUMBER: AK101780
  ref <309>: DATABASE ENTRY DATE: 2002-08-28
gatcgtaaagatgaagccttttcgtacaaaggcccctccctccctctccatgttacaatgatggggaccccggacccgaaccctccgtgaacctggtccacgggctcccaacacatataccccgccataataaattctcggatgtagcccgaggggcaaccaacccactgtagggtgggcccgccgtgcgccgtggtccatacgcccggtccatcgctaaatactcgctcgcgtgctcgtactcctccctcctcgatcccggtaatcaccaccaccgtggcgttccgttcgcgtcgcgccgcgctcgcgttgcctccccgccccgtcgcgagcgagcgagcaatcaatggcacccaccatgtccgccgccgccgcgttacgcccgggcggctgtacactgcccccctcctcccgctttattcagctgtgctcgcgtcagcgtcgctcgtcgtggttttgacctccgccccctgacacgcgcagggcgcgcagggagctgcgctgcacctgcacctgcacgcacccctgcagggcgagggatgtccctgtcccactgcacggcacgcccgctacctgctcgataaaagttgcgcaagcaaagatgttggaggcacgctcctgttgatttctctcaagagctcaagtcttggagaggtgacagctgacaagcagcagcagggaaggctcacagtttttttttttcttgggcgcttcagtctccgcttcttcttcttcttcttcttcttctctctgctgctcacgctgaactggcggtagttttggcggtttaattggagagcttggctgagatggagagccgagggaggcggccgcggagcccggagaggcagaggccggcggcgaggaaggtgccggtggtgtactacctcacgcggagtcgccaccttgagcatcctcacttcgtcgaggtgcctgtctcctcgccggaggggctctatctcagagatgtgattagccaccttaacatggtgcgcggcaagggtatggccgctatgtactcgtggtcctgcaagaggagctacaagaatggattcgtgtggcatgatcttggagaggatgatctcgtccacccggcaaccgacggcgaatatgtgctcaagggctccgagctcttggaccagtcttcttcaggccaattttatcagggtaccaatggaaaccaaaagcaacagagcaggctgaaagagggtgcacggctgcctttgcctagagaggcttcctattcctcctcccctcctagtgtgatagttagagaagccaagccgaggcgttcgccttcggttccttctctagaagaggatgactcaccagtgcaatgcagagttacctccttggagaacatgtcgccagagtcggagcctcaaagaactctcttgtcaagggctggttccgcgagtcctgcagaattcagagtttacaagcccactggctgtgtggatgctgcaactcaaactgatgacctcggcagaaggtcagtccggaaagtgcccgagatgcataagaagagtttgagcactgatcatgactccgtagtccgggaaattactgagtaccggcaaagccaaccacgccggtcagcagagctccaagggatcgccagggaggccatgtcccagtgtcatactccactgagcataccttcatcccgtggcaagtcggagagtttagagtccttgatacgagcagataacaatgcattgaatagttttcggattcttgaagaggatgatatcattatgccaacctgccccaagctgaggccagcgaatgtactaatgcaacttatcacctgtggttcgctttcggtgaaagatcatgagaatatcagacttgttgaaggatacaagccaaggttcccaaacatgaagttcccgtcaccgttaatttctcgtaccatgatgatgggtgagcttgattacctgtcagagaatcccagattgatgggtatgcgtctggaagacaaggaatactttagtgggagccttatcgaaactaagatgcaaagagatgtacccgctgacagatattcagcgcttaaacgttcttcttcctacaatgcggaaaggagcaacgagacgctagattgcgcgagacctgacgaagacaccgtcaacacatctcacgcaaggtgcctccctcggacgccgatactgtcatccttcctgcaccccaagagcgaggcaatgaagtcaccgatctccgactgccggaggagctcgtcggccggaccagactgcagccttgcttcatcaggagacggcagcaagaggttcattgacgccacaggagcaccgggcagcaggatagactctttcaggaaggaggagaagctcgtcaagatcgaagaaagttaagtgctagtggcctctcttaaccctccccaactctttgtcattgctgggctgtcgtcaggagctcgagtcgtgattcagtacacggtgccctgcaatggcgacagcgatgaaggctgagcttgcacccatgatcagcgttgagttattcatataggctctgttgatagagagagatcaagttactgacgaaatgaaatgcctctcgtttctttcttcagattgagatgttaagtttggaattatttttcaagcattcagttagcctagagtattcttctctcttcttcctatctttacgttattatcaaaatctcttctccttatcatctgtaagtgcctttaaattaattatagagtataatgtattgttcgttttgtatcttgcttctgtccttaaatcaagagagagtagtgatcttcatc

SEQ ID NO: 26339 - DNA, 1279 bp, Oryza sativa
  ref <308>: DATABASE ACCESSION NUMBER: AK101781
  ref <309>: DATABASE ENTRY DATE: 2002-08-28
gtccgccgccgcacccgcctccaccatggcggccgtctcgaggggcctcctcgcgcgcctccgccacctctccatcgcgggcccacgcctgcccccttgctgccgccccttctccgccgagcccctcgtctcccaccccgacgacgacgacgccgccgccgggggcggcggcggcggcggcgagggatcgggagggggacggatcatagaggctcgggcgggggtgatgggcccggactcgcggcggaccggcgtgatcggcgtcaagtgcggcatgtcggcgatgtgggacaagtggggcgccaaggtgcccatcaccgtcctctgggtcgacgacaacgtcgtctgccaggtcaagaccgccgagaaggaggggttcttcgcgcttcagcttggagcaggccaaaagaaggaaaaacatctaacaaaacctgaagtgggccacttcagagcacaaggagtccctctaaagagaaaactaagggagtttcctgttactgaagatgcacttattcctcttggaacaacaatcacagttcgccattttgtgcccggacaatttgtggatgttactggaatcacaaagggcaaaggttttgcgggtggtatgaaaagacatggttttagtgggatgcctgcatcacatggtgcatctctatcacatcggagcatcggttctactggtcaaagagatgctcctggaagggtcttcaaaaacagaaagatgcctggacgtatgggtggtgtacagcgcaccgtgaaaaatgtatgggtttatcaaatagaccctgccaggaacttattgtatctgaaaggccaggttcctggtcctcaaggcagctttgtttttgttaaggactcaatatacaagaaacccgacatagctaagctgcctttcccaacatatttctcacaagaaggtgagtcggaggagctcctcgtcgctgatcttggtgacatcgacccattcatggtagcggattaagattagggcctactttggaagggtccttttgttttctgtgcacttcagcttgaccatccgacaaaattgttaaattttgcatggatatatgagtagttgctggattgcgagtcatcccattactggcccgcctctgatcaatgttgttccatgtacactacttggcaaatgtgccagggccctaactcgattagggttttgagctgattgtttgacaaaatggaacttttttgttcaataatttgtgtaatctaagcttcagatagatatataaaatgggaaagattcaccgcg

SEQ ID NO: 26340 - DNA, 2821 bp, Oryza sativa
  ref <308>: DATABASE ACCESSION NUMBER: AK101782
  ref <309>: DATABASE ENTRY DATE: 2002-08-28
ggaacgaaaataaagaggctttttgctcgcaccgcgccgtccttgtcacgggccgcgctcaccagctcacacacacacactcgcaaccaccgcgctcgccgcgcgcgctctcggcgcgccacggcctatataaagtggcagtggcgaggagcaaggggagcaacgaccatggccatggcggcgaggggagtgttggccatggtggtggcggtggcggtggtgtggtgcaataatgtggcgagggcgcagacgccggtgttcgcgtgcgacgcgtcgaacgcgacggtgtccgggtacgggttctgcgaccggacgaagagcagcgcggcgcgggcggcggacctgctggggaggctgacgctggcggagaaggtggggttcctggtgaacaagcaggcggcgctgccgcggctggggatcccggcgtacgagtggtggtcggaggcgctgcacggcgtctcctacgtcggccccggcacccgcttctcgacgctcgtccccggcgccaccagcttcccgcagcccatcctcaccgccgcctccttcaacgcctccctcttccgcgccattggcgaggtggtgtcgacggaggcgaggggcgatgcacaacgtcgggctggcggggctcacgttctggagccccaacatcaacatcttccgcgacccgcggtggggacgcggccaggagacgcccggcgaggacccgctgctcgccagcaagtacgccgtcggctacgtcaccggcctccaggacgccggcggcggcagcgacgcgctcaaggtcgccgcctgctgcaagcactacaccgcatacgacgtcgacaactggaagggcgtcgagcgctacaccttcgacgccgtggtgtcccagcaggatctggacgacacgttccagcccccgttcaagagctgcgtgatcgacggcaatgtggccagtgttatgtgctcctacaacaaggtcaatgggaagcctacctgtgcagacaaggacctcttgtcaggagtcatcagaggggactggaagctgaacggatacattgtgtcggattgcgattcggttgacgtactgtacaataaccaacactacaccaagaaccctgaagacgcagctgccatcacaatcaaatcaggtttggacctgaactgcggcaacttcctggcgcagcacaccgtggcggcggtgcaggccgggaagctgtcggagtccgacgtcgaccgggccatcaccaacaacttcatcgtgctcatgcgactcggcttcttcgacggcgacccgaggaagctccccttcggcagcctcggccccaaggacgtgtgcacgtcgtcgaaccaggagctggcccgcgaggccgcgcgccagggcatcgtcctcctcaagaacaccggcgcgctgccgctctccgccaagtccatcaagtccatggccgtcattggccccaacgccaatgccagcttcaccatgatcggcaactacgaaggtacgccgtgcaagtacacgacgccgctccagggcctcggcgccaacgtcgccaccgtgtaccagccgggatgcaccaacgtcgggtgcagcgggaacagcctccagctcagcgccgccacgcaggccgcggcgagcgctgacgtgaccgtgctggtggtcggcgccgaccagtccgtggagcgcgagagcctggacaggacgagcctcctcctgccaggacagcagccgcagctcgtctcggctgtcgccaacgcctccaggggccccgtcatcctcgtcgtcatgtccggcgggccgttcgacatctccttcgccaagtccagcgacaagatctccgccattctttgggtcggctaccccggcgaagccggtggcgccgccctcgccgacatcctcttcggataccacaatcctggtggaaggttgccggtgacgtggtacccggcgtcgttcgccgacaaggtctcgatgaccgacatgcgcatgcggccggactcgtcgaccggctaccccggccggacataccggttctacaccggcgacacggtgtacgccttcggcgacggcctgagctacaccaaattcgcgcacagcctcgtgtcggcgccggagcaggtggccgtgcagctggccgagggccacgcctgccacaccgagcactgcttctcggtggaggccgccggcgagcactgcgggagcctgtccttcgacgtccacctccgcgtgcggaacgccggcgggatggccggcgggcacaccgtgttcctcttctcgtcgccgccgtcggtgcacagcgcgccggcgaagcacctgctcgggttcgagaaggtgtcgctggagcccggccaggccggcgtggtggcgttcaaggtggacgtgtgcaaggacctgagcgtcgtcgacgagctcggcaaccggaaggtggcgctgggcagccacacgctgcacgtcggcgacctcaagcacacgctcaacctgagggtttaaattgattaggagttggaattaaacgggagatttgctagtgaggaagggcctctgatctgattgatacacggagtttggaattggattcgtcaagggaatttgcattacgagtggccgtcagaaatcagaattggttaatggggggtgtaataaggacggactcccccgttggagagaattggatcctcgggggtgggtcttttgctgtgggtgttaacatttgatttatttggagggtcgatttgcaactgtaatctttggaaaaagaaatttccgcaagtgtaattgattggaagggaaattagctcattttcgtccattcaattcaattcaaaatttcaaatcgttgctctc

SEQ ID NO: 26341 - DNA, 2967 bp, Oryza sativa
  ref <308>: DATABASE ACCESSION NUMBER: AK101783
  ref <309>: DATABASE ENTRY DATE: 2002-08-28
ggagcaccacacttcaccagcttcgctttgcacaaagcctcagtgcctcactgcacttgcaccggtcactaatggctccggctcaatgtgctcgtgtgcagagggtgttccacttcggcaagggcaagagcgagggcaacaaggccatgaaggacctgctgggagggaagggggcgaacttggcggagatggcgagcatcgggctgtcggtgccgccggggttcacggtgtcgacggaggcgtgccagcagtaccaggcggcggggaagacgctgccggcggggctgtgggaggagatcgtcgaggggctccagtgggtggaggagtacatggcggcgcgcctcggcgaccccgcccgccctctcctcctctccgtccgctccggcgccgccgtgtcgatgccggggatgatggacacggtgctgaacctggggctgaacgacgaggtggcggcgggactggcggccaagagcggcgaccgcttcgcgtacgactcctaccgccgtttcctcgacatgttcggcaacgtggtcatggacattcctcatgcactgttcgaggagaagctcgaagccatgaaagcagtcaaggggctgcacaacgacactgacctgactgccactgacctcaaagaactagtggcacagtacaaggatgtctatgttgaagctaagggagagccatttccctctgatcccaagaagcaactgcagctggccgtgttggccgtgttcaactcatgggatagcccaagagcaatcaagtacagaagcataaacaagatcactgggctgaagggcactgctgtaaacgtgcagaccatggtgtttggaaacatggggaacacctctggcacgggtgtgctcttcactaggaacccaagcactggagagaagaagctttacggcgaattccttgtgaatgctcagggtgaagatgtggttgctggaatcagaactccagaggatcttgatgctatgagggaccacatgccggagccttatgaagagctcgttgagaactgcaaaattttggagagtcactataaagaaatgatggatattgaatttactgttcaggaaaataggctttggatgcttcagtgcagaacaggaaagcgcacaggaaaaggtgctgtaaagattgctgtagacatggttaacgagggccttgttgagcgccgcacagcacttaagatggtagaaccaggtcacctggatcagcttcttcatcctcagtttgagaacccatcagggtataaagacaaagttattgccacgggcttacctgcatcacctggggctgctgtgggccaaattgtattcactgccgaggatgctgaagcatggcatgcccaagggaaagatgttattctggtgaggacagagaccagcccagaggatgttggtggcatgcatgcagctgttggaattcttacagcaagaggtggtatgacctctcacgctgctgttgttgcgcgcggatggggcaaatgttgtgtgtcaggatgctcaagcgtccgtgtaaatgatgcgtccaagattgtagtgattgaagacaaggcgctgcatgaaggtgagtggctatcgttgaatggatcaactggtgaagtgatcattggcaagcagccactctgcccaccagcccttagtggtgatttggaaactttcatgtcttgggtggatgaagttaggaaactcaaggttatggcaaatgctgatacccccgaggatgcaacaacagccagacagaatggggcagaaggaattgggctatgccggactgaacatatgttcttcgcttcagacgagaggattaaggctgtcaggcagatgattatggcttcaagtcttgaactgaggcagaaagcactagatcgccttttgccttatcagaggtctgactttgaaggcatcttccgtgcaatggatgggcttccggtaactattagactcttggatcctccacttcatgagttccttccagaaggccatgttgaggatatggtgcgtgagctatgctctgaaactggagcagctcaggatgatgtccttgcaagagtagaaaaactttccgaagtaaatccaatgcttgatttccgtgggtgcaggcttggtatatcataccctgaattgactgaaatgcaagcccgtgccatctttgaagctgctataaccatgaccaaccagggtattcaagtctttccggagataatggttccccttgttggaactcctcaggaattggggcatcaagtggatgttatccgtcaaattgccaacaaggtgttcacagacatgggaaaaactattggctacaaagttggaactatgattgaaattcccagggcagctttagtggctgatgagatagcagagcaggctgagttcttctcctttggaacaaacgacctaacacagatgacatttggttacagtagggatgatgtggggaagttccttcccatctatctgtctcagggtatcctccagcatgacccctttgaggtgcttgatcagaggggagttggggagctggttaagctggctacagagagaggccgcaaagctaggcctaacttgaaggtgggcatctgtggtgaacatggtggagagcctctgtcagtcgctttctttgcgaaggctgggctggactatgtttcttgttcgcctttcagggtcccaattgctaggctagctgcagctcaggtgctcctctgatgatgacgcccttctctttaccggcaaccagatcgcctgctgttggtgcacctggtgaagaataataaatacatagccatggaatggtggaaactctgctgcctgtcaaaggcgccgttgtatgtagtatgcatgttcgcatgtaagcctatgtggtggtagttttctgaaaatttcgcttgaactgccatggtaatgtaccaaacagcgatgacgacgaagaatcgaataaaggtggtgattacct

SEQ ID NO: 26342 - DNA, 1318 bp, Oryza sativa
  ref <308>: DATABASE ACCESSION NUMBER: AK101784
  ref <309>: DATABASE ENTRY DATE: 2002-08-28
gattgctactactaccacgcagcgggtgacacacacacacacaaaaagtcacaaatctctacgttttttttcctcgcgaggcgtagggcgcgcatacgcgacgcgcgccattatttggtccgcctcgtgcctccataaataccgcctccgtcccgtccgcctcctcccccacactccactccactccactctcgccgctcgccgttgccactcgcactcacaatgtcgccggcgccgcgggtgttggtgttggtggtggccacagtggtggcgctgcaggtgtcgccggcggcggggcggatcccgggggcgtacgggggcggggagtggcagagcgcgcacgcaacgttctacgggggcagcgacgcgtcagggacgatgggcggggcgtgcgggtacgggaacctgtacagccaggggtacggggtgaacaacgcggcgctgagcacggcgctgttcaactccgggcagagctgcggcgcgtgcttcgagatcaagtgcgtgaaccagcccgggtgggagtggtgccacccggggagcccctccatcctcatcaccgcaccaacttctgcccgcccaactacgccctcccctccgacaacggcggctggtgcaaccctcctcgcccccacttcgacctcgccatgcccatgttcctccacatcgccgagtaccgcgccggcatcgtccccgtctcctaccgccgggtgccgtgcaggaagaagggaggggttcggttcacgataaacgggttcaggtacttcaacctggtgctgatcacgaacgtggccggggccggggacatcgtgagggcgagcgtgaaggggacgagcaccgggtggatgcccatgtcgcggaactggggccagaactggcagtccaactccgtcctcgtcggccaggcgctctcgttccgcgtcaccggcagcgaccgccgcacctccacatcctggaacgccgcacccgccggatggcacttcggccagaccttcgagggcaagaacttccgggtctgaattgaatgaagcaaaactgcaatataccctcttatttactcatctagtaattactgtcattatagcgagcaggtgtgttttttaccttggttaagtttgggttcttcttcggttggtggccttgtcaaagtgaggggccgggggaaaacaggtggtaaagactagtactagtgtcaattagggttaaactggtaaattgctagtactgctgttactcatcatcatcatcgctagtggtcactgctagtagtagttgtgctagtgcatgtatggttatggatactgcatcatgttggttggtg

SEQ ID NO: 26343 - DNA, 2573 bp, Oryza sativa
  ref <308>: DATABASE ACCESSION NUMBER: AK101785
  ref <309>: DATABASE ENTRY DATE: 2002-08-28
gcttgcccttcgtccctctcaccggcgaagcccccttccctctccgcccgcctctcgttcgtgttcgaccaactcgatgccctcgaccgctcccgcttctccgaccactccgcccgcgacgcggccctccgccgcatccagtcctggcgccgccccgccgcgcttccggacgtgctgccggcggaggcggagccgcgaccggcacccgaacctggcgagccggtgaagaaggaacctgaggcggtggacgttgccggaaaggaggagctggagaggatgagcgtggcggaggtgctaaggagggaagtggagctcgtgcatccctggccggagtggatcgggctgatggatcggctggcgcagcagaaatacttcgaccttgggggcaccggcggcgctgacgagggctgcgtcgccgccgccgtgccaatggacctagcggaagtcactcaagagactggttttgacttctctagggactggaccactgtcaagaatgcctgtatgaacttcggccgtgaccgtttcgacatcgtcaagtcattgcctaggaaggatcttcaggtattggttggccatgggtgccctagcatggatccgaaagttgtgttttctgcaaagctgataagaaaacttgtccatcttgatgagggggatgtatgcagttcttgtaatttacgaaatctatgctcaaggggctatattcttacacgcaaagaagatgaagctcgaactcttgatgttatgcgtattttgttgttctatggttttgatcatgtaaaggaaactgtggagaacaagccactcctcaaactgaaatctgtgaagacagttgttcgtaaattgatacatgacattgccaagctgagcgctgtccccattgatcccaatcttccgccccctataatcagaaagccaccacctaaggtgaaacaaccacctccaccaccaaagaaacgagtgggacgtgatgatgtagagatgaagaaaggagattggctctgcccaaagtgtgacttcatgaactttgcaaaaaacactatttgcttgcaatgcgatgctaaacgtcccaaaaggcaacttctccctggagaatgggagtgtcctcggtgcaactttttgaactacaggcggaatatgtcgtgcttccattgtgaacacaaccgtccaccagatgaatacaccaacagccaaatggaagctaatcaatctgttccacgaaagcgattggaaagacctgctcacaaatctgaagtttgtaatgcatggaactttgattttgatgacaatgaatcagatggtgctgatgttgcagcatttgagtttgctgattcatcaaaggccaggaatagcttgtctgtggacaacacgtcttctagaggtggttctaagttctctgaggacaacgaatttggaattaatgaaacatggagagagggaacagagagaaggttttcagaaagagaaagagttggttttgatgactttgatgacgaagaggatgatattgatagttacgagcttgatttatcaaagggtggtcagacagatggaatgtcaaggatgagttatttggactttgaagatgcttgtgactcggcagacctaaatgggcgtgctaaaattaggaactctaagcacggtgaagaggaggatataatagggtctcctgaggatgaggaatttgatcacccttccctgagatctagtcatcttgctgcttcttggaggaaacctgtaagctgcaatggttccaacaaccacagaagggaatcttttggctcggagagtgatgatgggattatttctgatttggatggggatattaatgaaggattgaaatgtaaaggaggccataacaagcattatcctagaagagttgttgttaggcataatgaacttgatgatgtaccattttcagatatggattgtgacataggtggctgtgttcagtcagataggaggaacaggttctcaacaaagttcagtgatgaattccatgccagggcctccaactcaaataggaagaaaatgaatgaacgattcaagagttctgatatgcgtgatggtcacccgccctttgataggactcgtacaagaggtactactgaactacatgatggctcaagagatctacagagtaacgcaagaagaaattgggttaaaagtggtggatttgatgataacaacaggccgctcaggcgtttgaacagaagataggggaatccagttactgtgcagtccttccaactagctgtcgtattagtgttctccgatgtaaggtgcagcttttttaattggaaacatagagctatgagattgcatgcagatctgcggttgatctcaatccaaagatccacatgctaaatttcctgcatgcaatacgggattgatgctattgaatcccaaggtccggctaaaatgtgtgcctagaatatatttctagccttttctccccgactaagcatttctggtcttgagacaaagatgtttaagcattcccagtaaaataaatgtgtaagtattcatcatggttagggtcgtatgaaaagaactgttctcgattttatacg

SEQ ID NO: 26344 - DNA, 1791 bp, Oryza sativa
  ref <308>: DATABASE ACCESSION NUMBER: AK101786
  ref <309>: DATABASE ENTRY DATE: 2002-08-28
ggcatttcatttttttttttgccttcgaaattcctcgcatttggtttcccttgttgatttgggggaacggcggcggcggcgagagagcggctgcggcggcgacggcggcggcgaagaagaagatggcgtccaacttctcgttccctccgctggcgccggagcagatagcggaggcgctgcacacctacggcctcgcccccaccgccaacctccgcgcggaggacatcgccaacccgcagccggatctcctccccgccgtcatctccaacttccttgccaccgtcgtcgaccccaccggcgccgacgacctcgacgggcagctagggttcgacgcgctggcgtcgctcgacaacccggagcactatagggagggcatccgggtcctccgcctccacaagagggccaacgctttcctcgagtccatccagttccccgggttcacgctccgcgacctcctccgcccagacccgcgccgcctcgtgcaagtcctcagcgccctcatcaacttctctactacagggacgagaagctcgccctcctgcagcccatcatccatgagttccccaacttggatgaacggtgcatggagctcaatgccaagattgccgagcatcagagggcaatcgccgatcaagagctcgccgcgcaaatggaggtgcctatggttcagcagctagaggcggaggtcaattccctgaagcaaaaacttgtagagtacaacaaaaagcagctggcactgagggccaacgccactgcgatcaatgacaagaaagaggagacccacagaaagattgccaaaagcgattttgagttggtgaaactagcccaagaaaattccaagttattgtcaaaaattgttcagtccccagaaaagcttcagagggcccttgaagagaagaaaacagctcgtgctgacttgaagaatgctgagaagatagcaatgcaaagtgtacaagagaaaactgccactttggagatatacagtaagggttatgaaaaattgtcgaagcattcttctaaaatccaggctttacaagaacagtttactgcaactaaagcccttgagaaagaagtcaaagcgcgcaaagctaagattagtgatgaaagtgttgaaattatggcccttgacacaaagactattgaatgggatgggaaagtgcatgaaatggaggagcgtgttaaagctaaagaaaaagaaagggatcaaatagtagcagacgaaaatcagaagctggctgctttgaggtctgaagttgaatggaaactcaagtgtcttgaacctcgtgaaaggaaagtagaggaaacaattgcaaaggctactaaactatgtgcggaggttgattcaacaaggactgatgctgcagaagaactgcggctgatataagctaaatttcaacaaattggacatgcctttacttgctacaaggacaattttaagactttcttggaacaagttgatgaggtgagcaaagaaactttagaaagtttaggtcgccaagctgtggagccattggacacatctgcaacattgtcgattgagaaagagaactcctgcggccccgctccctgaaaagaggatagccaattggagaagatagctagggtgttttgcgccactgttgtaaatttggaattgagctgtttttgttatcactggtgacagttatgctctgtttgaacctcatctgaccaattcggtgagaatacttcatcatcgaatcatctgcagtcgttatgtaaaaaaatcttgagtcactctgatatggaaatgttggtgtcaggttgccaagt

SEQ ID NO: 26345 - DNA, 1223 bp, Oryza sativa
  ref <308>: DATABASE ACCESSION NUMBER: AK101787
  ref <309>: DATABASE ENTRY DATE: 2002-08-28
gctccccgccgcataaatccccttcgcctccccgccgcgccccgcggcgtcgcacgatctcactgaggcataaagtgagagaccgtgattggatcgatcaccggagcgacgatcaatggcgacgctcaccgtgcccgccgccgtgccgcccgtcgccgaggactgcgagcagctgcgcaaggcgttcaaagggtggggcacgaacgagaagctcatcatctccatcctcgcccaccgcgacgcggcgcagcgccgggcgatccgccgcgcctacgccgaggcgtacggcgaggagctgctccgcgccctcaacgacgagatccacggcaaattcgagagggcggtgatccagtggacgctggacccggcggagcgggacgcggtgctggcggacgaggaggcgaggaagtggcacccggggggccgcgcgctcgtcgagatcgcgtgcacgcgcactccatcgcagctcttcgctgcgaagcaggcgtaccacgagcgcttcaagaggtcgctcgaggaggacgtcgcggcgcacatcaccggcgactaccgtaagcttttggtgccacttgtgactgtatatcgctatgatgggccagaggtgaacacatcgttggcacattctgaagccaaaatactccatgagaagatccatgacaaggcttacagtgacgatgaaatcatcaggattctcaccacaaggagcaaagcacagttactagcaacattcaatagttacaatgatcagttcggccatccaatcactaaggatcttaaagctgatcctaaggacgagttccttggtacactaagggcgatcataagatgcttcacttgccctgacagatactttgagaaagtcattcgattggctctaggaggaatgggcacagacgagaactctcttacaaggatcataacaactcgtgccgaggtagacctgaagctgataaaggaggcctaccagaagagaaacagtgtcccattggagcgagctgttgctaaagatacaaccagagactacgaggatatactccttgccctccttggagcagagtgaggtgtatatctgctccatctcgtctgtctgatcctccttgtttgatcggaaaataagatctgcatagaactgtgttctattttgttgtttctgaatgatacaagtgagctagtctgcatagcagtgctcatataataaaatctgtcctgcatactggtttgtc

SEQ ID NO: 26346 - DNA, 1720 bp, Oryza sativa
  ref <308>: DATABASE ACCESSION NUMBER: AK101788
  ref <309>: DATABASE ENTRY DATE: 2002-08-28
gacactgccctgccctatcgcaatttccatttccatctctcctcctctcctcctccacctcgtcctacaaatgcggcgcaggacgagagtcagagcggagtagtagcagacgaacacgacgacatcggagcgctcttgtctcctcctcgtttcttctgctcccgagtcaagcagatcctccaagcccagcgagggggcgggcgcgccgccgctgccgttgttgttgtcggccgcagcgcagacatggacccgtccggcggcggcggcggagtcggagtcggaggcatcggcggcggtgaacaaattctttgggactggcaagcggcggagcagtgcgagagcaatgctgcaaatcatgatgtttctagattcatgtgggactgcctcaatcaagatgatgatgacctactgggattgctgggcaatcaaactcctctaagagattgtcgcggcttctttgatattgatgatttcacctgcaaggagacgttggacctagaggaatctcgggaatcaaagcgccgccgcatattggagtacccttctgagtctaatcaatcagaagatggaaatcgtgaaataagttctaccttgggcacatctgaggtatcagaaatttcattgctttgcaccgatgaaccgcagagcttcaattgggattcacagaacaattcaaataattttggtttgtcttttgtttttcatattatattgtttgacaacttaaattgctatgccttttttgttagctaactgaaaatagtggcatctgatacaatagattctttgtcaactggagcattctaccaaccatcaaatagtcattcgaaaaattgctctgatgaaaatcaaatgcatttcaggcatgaccaaatgttagctactctctgttcccacagaaaacagtatttactttatcattatatttcaatgatgacatgttaagcttggattcatttttaggcattctagccaggagagcgttacatataccaatgatcaaagtggtatttcaggaacaactgagaatgattcagtgacagaaagtcttctaatgcaggagactaggaagctttctacacttaaagtatctaaaggaacctcactggttaaggcgaagcagaatttaactacaactatagcatacccttttaccctcatcaaaccatcctgggaggaaggagatgtcatcactctaaaggatataaatcagcgaatccgtgctcctccgaagaaggctccagaaaccctagggacttcagccttctctggcaagccagtcattggcaagacaaggatcagaactgacgggggcagaggcagcatcacgatactaagaacaaaaggttgagagtccaaacaacaagtttctcagccattacctggattgctttcagcaatttgatctccacagctctccagttttttttttttttttttggccatggatttggtatttaggatgactatcaatggctaactcttcaaagatttaccattcatcctgtgtacattagcggcatgcggctaatgttaaatatatgagagttttgtgttcagaaaccatgtccctctactcatctaacttatgttggatgttgttcagggttttctcccatttttctgaatagttgtccattctcaaatggacgcgtgtaatcgggaaacatttgattattttgttgcttacaatatatagcacagatacaggtgagtttat

SEQ ID NO: 26347 - DNA, 1878 bp, Oryza sativa
  ref <308>: DATABASE ACCESSION NUMBER: AK101789
  ref <309>: DATABASE ENTRY DATE: 2002-08-28
gtcgcctcgcctccgtttcgatttggggagagagagatagagaggcgatcgcatcgaggaggcgcaaaaaccctagaaggcgaaccttccggaagcttctggaagggaggatgcagggcgccaacatgctcctggacgagcccgtccgcctcacctccgtcctcacccccgtcaagcccaaagtattcccatcactcaccaagattgttgggacccttgggcccaactcacactccgtcgaggttattcaagaatgcctcactgctgggatggcagtcgcacggtttgatttctcatggatggatgcttcatatcatcaggagacccttaacaatctgaggaaagctgcacaaaatgtcaataagctgtgccctgtaatgctggatacactgggtccagaaattcaggttcacaattcaactggtggaccaattgagttgaaagctggaaatcatgtcaccataacaccagatctttctaaagctccctcttctgaaatcttgccaattaagtttggtggtcttgcaaaagctgtcaagaagggtgatactctttttattggtcaatatctcttcacaggaagtgaaacaacatcttcgtggcttgaggttgtggaaacttctggagaaaatgttgaatgtcttgtgaccaatacagctacacttgcaggccccatgttcactttgcatgtttcaaaagcccatgtcagtttaccaactttgagtgattatgataaagaggtcatttcaacttggggattacataacagtgttgatattatatcactttcccatacccgctctgccgaggatgtcagggagcttagatcttttcttcaatctcatggccttcaggacacacagatatatgccaaggttgaaaatactgagggtttggatcattttgatgaaattctccaagaagctgatggcgtcattatttcacggggagacctgggaattgaccttccaccagaagatgtgttcatatcccaaaaaacagctattaagaaatgcaatcttgctggcaaacctgtgatcatcactagagttgtggacagcatgattgacaatctacgcccaacacgtgcagaggccactgatgttgcaaatgctgtcctagatggaacggatggcattttgcttggtgcggagactcatcgaggcccttatccagttgatgcagtgagtactgttgggagaatatgtgcagaagctgagtctgtgtataaccagttggttcacttcaagaaattagtgaagcatgtaggtgatccaatgccccatgaagaatctgtggcatcttcagcggttcgcactgcaatgaaggtaaaagctgctgcaatcgttgtgttcactttctcaggaagagctgccaggttagttgccaagtacaagccaccaatgccagtgttggccgttgtcttcccacgtgagggctctgatccaacaaagtggcgttcttacggcacaactcaggcaaggcaatgttttgctgcaagaggtgtctaccctttgatggcgagtactgaggaggctgaaactggtgggctcaccagggaagagtacgggataaaacttgcacagaactatggtcgctcggttggtatgctaaagccctatgacaggttgatcattttccagaagatcggcgattcatctgttgtcaagatcatcgagtgtgacagttcgtaaaagattagacacctaccacattccgtccaagagtttcaaccacacagaggcggattacctttttgctttctttcttgtttgacatgatattgagactagaatagggaaggccaattgtgctgtttggcaatttacccattttaggtccatacttgctttttcaataatttcattcaagagcctt

SEQ ID NO: 26348 - DNA, 1192 bp, Oryza sativa
  ref <308>: DATABASE ACCESSION NUMBER: AK101790
  ref <309>: DATABASE ENTRY DATE: 2002-08-28
gggagccgccacttccttccttccaaaaaggaagaggggaaaaaaaatctatagccaccaaattgagcaagattctcacacgaaaccaatcacaagctagcattcgtttaatttcttggctgctattgtccggggaagaggttcttggtgtccaaagaatttgtcggttctagggagctccaagttgctgtagcttcatttcttggttctttgggttcttggattggcggtactgattgtgggagatgttgtctgtgagctgcccgagagtgtacatgagcaggaaggcgctggatttcggtcagctggcctcctgccggtgccgttgggctggccggtccggcatgcgggtggcgccgaggcggcgcatgccatgtgtttgtttcgtggcctcaccgagccagccaggccttgctgcagttgatgtgccagcagaggcgatttctagtgcgagaacaacaacaatgatccctgagcgaatttctgtttcttcacttttggaggttgtctccgacgacctgctgaaactcaacaataatctgaaatcgcttgttggtgcagaaaatccagttttagtttctgcggcagaacaaattttcggtgctggtggaaaaaggttaagaccagcattagtttttctggtgtccagagcaactgctgaattagctggtttgttggagcttactacagagcatcaacgcctggcagagatcatagagatgattcacacagcaagtttaatacgtgatgatgtcatagatgatagtggcatgaggagagggaaagaaactattcatcagctatatggaacacgggtggccgtacttgctggtgattttatgtttgcacaatcttcttggttcctagcgaacttagaaaacatcgaagttattaagctcatcagccaggtgatcaaggactttgccagtggtgagataaaacaagcatctactctttttgactgcgacgtcacccttgatgattacttgctcaagagctattataaaaccgcttcgttgctcgcctcaagcacaagatctgctgcaatattcagtggtgtaagcaccactatatgcgaacaaatgtatgaatacggcaggaatctcgggctctcgttccaggtagtagatgacattcttgactttacccaatcagctgagcaacttgggaaaccagcagggagtgacttagc

SEQ ID NO: 26349 - DNA, 1334 bp, Oryza sativa
  ref <308>: DATABASE ACCESSION NUMBER: AK101791
  ref <309>: DATABASE ENTRY DATE: 2002-08-28
gtctccctcctcctcacctccacccatcgtgcgctaaactctagccagatctcgctcgctcgccgctcgccgccgccgccgcgttccaccgagcggagagtagagggaatggcgtccgagggcgtgctcctggggatgggcaaccccctcctcgacatctccgccgtcgtcgacgacgccttcctcaccaagtatgacgtcaagctgaacaatgcaattctcgctgaggaaaagcacttgcctatgtatgatgagttggccagcaagggcaatgttgaatatattgccggaggagccacccagaactctatcagggttgctcaatggatgcttcaaactcctggtgcaacaagttacatgggttgcattggaaaggataagtttggtgaggagatgaagaagaatgcccaagctgctggtgttactgctcattactacgaggatgaggctgctcccacgggcacatgtgctgtctgtgttgttggtggtgaaagatcactggttgcaaacttatcagcagcaaactgctacaaatctgagcatctgaagaaaccggagaactgggcactagtggagaaagcaaaatacatctacattgctggctttttccttacggtctccccagattctattcagcttgttgctgagcatgctgccgctaacaacaaggtgttcctgatgaacctctctgcaccctttatctgtgagtttttccgtgatgcccaggagaaggttcttccgtttgtggactacatcttcggtaacgaaacagaagcaagaatctttgctaaagtccgtggatgggagactgagaatgttgaggagatcgcgttgaagatttcccagcttccattggcctctggaaaacaaaagaggattgccgtgattactcaaggtgctgatccagtagttgtcgctgaggatggacaggtgaaaacattccctgtgatcctactgccaaaggagaagcttgttgacaccaatggcgctggtgatgcctttgttggaggcttcctctcacaattggttcaacaaaagagcattgaggactctgtgaaggctggttgctatgccgcaaatgttatcatccagcgttctggctgcacttaccctgagaagcctgatttcaactagggctaacccaaccacatattgaggaacaattattcgcacatccaacctactagtggtttggtgtgttctacctgtaccatctcgaggctttccatatgatccggccaatatttttttgccgtgatttttgtttcactgctgcaaaccttactttattctcggtataaggcacaattgccaatcggtgtgttgttttggtc

SEQ ID NO: 26350 - DNA, 1422 bp, Oryza sativa
  ref <308>: DATABASE ACCESSION NUMBER: AK101792
  ref <309>: DATABASE ENTRY DATE: 2002-08-28
gatgcagttgaaccgcaaagccctaaacctattcgattcgatggaaggcggcggcggcggcgattgccggcggccggactccgacgtgcacgaggggacggcagttgctagtcgccctagctccagcaagaggaaagacgactgaggatttagagaaggatttgcagccggaggaggagtcgcgtccgtcgccgccgccgccgccgccggcgaagggttcgttgtgtctgccggcggcgtgccacgaggacggcgtcatcccggcatttgtgatcccgggcagcaagcatcgcgacgggtccatctacaggacggatgcgcactactggcacggcctctaccacctcgacgacaccagcgaaactcgcctggaaccgatgacgccatcgtattcagagcaggactgcaagccatgcgtcgccgattgccagtggcacattggtggctccatgatgcagatcttctcccttaagctagctgaaatctctaatttcgccaccagagctcctggtgccggtgctattcagctgtatgggttcatggctgtccggaatctcttggacccattgcgaaactacgtcttcaaccgcaccagggacaatccgttcaccatcggcgacgtctcctatccgttcatacagatgactggccctaagaggggcatcgcgatgaacgctcgcgtgatgatcgagtacgacatgaggatcaagatgggggagagtgagcaagatgatctgttgcttgtcgacggggctgccaccttcagcgagataacgaatttcataccatacatttatcgcatcaatggtgattgcggcatggcggtggacataaggctagcacacttctcccgtgcaattgaggccacggcgcaagtttgggtatataaactaaaggatggctgtggcagcctaaacttgactataacttgtcacgttagttatatgcccccacaaattaagctctttcaaggtccaattgataagctaggtgaccaaaataggtttgtagttgctgcaaagctgaatactctgatgattacagagttcaagcttgttcatcagcacgactcaatcagtcagagatttgagtccatggttatgccacatggaagtaagttccactatgccaagttagcggatttagcaactataggcgtggagatcttttggtcaattttacccatttagctacaagaaagctttcgagccttctactttgttacattctatttattttctggcaaacaatcacctacctgtaaatagctagagcaatgcaagtttcttttttaggatttgtgccatgtatgtatcatttccatatgaaccaaccaaggcttcatgtgtctgtgtcaattgtcagggcaaatcttgtagacccaaccatagcagggtatttaattgatgaccatacaccttc

SEQ ID NO: 26351 - DNA, 1989 bp, Oryza sativa
  ref <308>: DATABASE ACCESSION NUMBER: AK101793
  ref <309>: DATABASE ENTRY DATE: 2002-08-28
ggccggcgaggggagggtttggagctagaagagatataaatctgagcggcgctgttctgattttgggttgatctcgacatagttgtgttgtttgaatcttcttgttgtttgccatatactgtggtattttctttttttcactttggggcctagatgcggacgccgaaaggcggcgatgagccgatgggctcaaatccgaggcggattttgatattgagttagaactaatcaaacattttttcccccttgtaggtatgagtgatgatctggcctcgcccctctttcgcgacgccttgctcagatcgacggcgacgcataagcctacctcgctggttacacccggccgaaacctcatctggatttggcacaacgatggggaacaatcttgttttcaaaagatcatcatcaggtgattcccatcccaaatcaatgaatgggaagagaaaattggatgatcgtattgaactaggggacaatatgataagcaatatcgcaccagactgctgttatcctgaatcaatctacaaaaggagaagatcaaatcaacaacttgaaaagcttccggaggtgtgctgaatttcgctcttctggaggttattaaatactaggcacaatttagcaaaattacctctgaaagttttgaaggtactgcaatgttaggcagcatgactgggaggcgacaacaatgcactcaaaagtccattgaaaacgttaatgcagtcttgctacagcaccgtgggatggtgatagagtaacttgcagtcaaattcgaatttgacaccatgttggttgatcatctcagtgattgggttagttttgcagtatcatcattgacaaattaagttccaagcttttgatttaactccagccagatttggcactttggacaatcgatacttatttcctttcgaacttttacatagtggatgcagtggcggacgcaggtttataatacagatggggcagcagagatagccctaattaggtgatggcacaacgcacacaaaccatagttgttggttcacggtattggcgcaacagtgcacagcacgaacatcgagaaagttaacaacgaagattggtagtcgaacaaacgtatataacttatatgtagagagataaaataaatgagaaatgctgtcagacaataaggggaaccactttcaatagtttgggggtataaaacaagatgaaaaattatttaggggtttgagtgcttcgccaaaatagttcaagtgagtaaaatggattttttttatatatatttaccaatttaactatttactgtagactgtattatacgctaaagaattagaaagaaaatcgaattttatgtatggccaaaatcagaaacggcccaaatggtaatacttatacacgatttttcataaatgtttttgttcctacttaaaatatttttttatctgattattcaatagtaaactgatgactaatgtgttagaaataggactagaaatgaggtttgggggtgcggggcgacacggaccgtagttgcgccgggcgacccaccctgcctaatgggtgtgtccgccactgagtggatgcatatgctatctacagcttattcaacttagctttttatatctcacactaaaagtgcattaatccccctagtgggttttggtgattaatgacaaatgtggttaagggactaatgagttcattgagtgactttcaggtgcattagtccaaggtgtggaagatggatgcttggagacccctccaaaagtacaaaatcatttcaggtgcattagtccaaggtgtggaagatggatgcttggagacccctccaaaagtacaaaatcaaagcggaccggaactcgagaagtgcataggatagtttatctattgaaatcgagtttttaggaaaaaccgtactattaagaggggttccaggtgatgctctgagatatgtcaagtgctcttagtgtgaaccaagtgtcaagtttctctaggagtcatttttgc

SEQ ID NO: 26352 - DNA, 1174 bp, Oryza sativa
  ref <308>: DATABASE ACCESSION NUMBER: AK101794
  ref <309>: DATABASE ENTRY DATE: 2002-08-28
attttggtgtagaaataggcctggtgatcttacccgcgataaatacaacagcggacagatgcaaggttacggtgaccaacatcctgcttttgctggccgtgctatgggtggattccagatgcctgaaccttcaacaacacctggaccatttaatactggattatcacgaaatgaaggcacaattcctggcattggggtcgcaatgcctcttgatggatctgatcatggagagcagaggccatcgatacctggccttccacctgggcaacctcccttgcctccaggtccccatccatctcttctagccggtgggcagcaacagcaatatcaacagatgcagcagcagcatcctcaatttcctcgaccaccacctccaaatatgcctcaattgcagcccccagcacacatgcttccacacgcgcaaggatctcgagcaccacttcctcagcttccatcaatgtcaggtccaccaccagtgaatccaccactaccacctatgcctcacccaatggcaatgcaagtacaaggttcatcaaaccagatgatgcctcaaatgccacagcacttgattggcatgaatcagacacaccagggccctcctagtaatatgcctccaatgggtggctttccaaatggaatgggaaatattcaaggtggatctagtgcttctggcatgcaaaactttcctatgggaggcatgtacaacaggcctcagggaaaaatgcctccacaagcacaagcacagatgacatccatccctggtctgagctcatatcagccgggtatgggcaatgtgggccttccgccgccacccccacagcatccaccgcctcgcggttcagcgccgcaatgatctcttgtaactgtgcaatgatgattggaagccttctattttccatgcggtaaaacatatgtagtatgatcgtattcgaggaagagaggactctccagcaaacggagacggatatcttggataatgatagttaggattgttcttatctcttgcaccgtcggctaggatacattttgctgcccttggactgaacgggctgtgctgtaacaaacctgtccacctaacagcttgtttctgctccctatttatgctgctcgtgttgtattagttcttatgctactgaggttttcaacatagacggaggctatcaagcagttttgt

SEQ ID NO: 26353 - DNA, 1692 bp, Oryza sativa
  ref <308>: DATABASE ACCESSION NUMBER: AK101795
  ref <309>: DATABASE ENTRY DATE: 2002-08-28
gacttccacttccaccctcctctgcatttgcaaccacgcgcagacaagaacaagacgcgcagcaaagcgcagcagcagcagcagtattaatcgaggccaaggacaaggagcagtggcaattgttgttgggagaagagcgagttgttgggagggagaaaggccaagaagaggaggaggaggaggaggaggaggaggggatcaatggagatggagagcccgcggagcccggaggcggagatcgggcacagggtggaggacctgtgggaggtggcggagccgcagctgtcgccgtccgagaagctcaactcctgcttcgaggacatcgccgtcgcctccttcccccgcccccttggctcgcaagtaatcgagataccttcaaatgctagtctggctgatactgttgaaatattatccaaaaacaaaattttgagtgcacccataagaaatgttgatgctccagaagatgctagttggattgacaaatacattggcattgtggaatttgctggtattgctatgtggttgctctatcagtctgaggctgcagctaatggcacggctggttctgccgtagggtcaccagtagccaatctagtatctaggctaggctctttcacattcagaaggacatcatctggcagggtagaaaccaccactgacccagaatcagatgaaaccgcatcggtcggtgggagctttttcgaaacactcacttcctctgaattctacaagaacacaaaggttggcgatatctcaggaagcttccgatgggcgccattcctggcactgcagacatctgacacattcctcaccatgttgctgctgctgtccaagtacaggatgaagagcctcccagtagtagacattgggggagataagattgagaacatcattacgcaatcttccgttgtgcacatgcttgcagagtgtgttggacttccttggtttgagagctggggaactaagaaactctccgagctggggcttcctctcatgaagccatgcaaactcgttaaggtaaatgaagaccaacctgtgttaaaagccttccaactgatgagggaaaaaggcgttggtggcctcccggttatggacacaagtggcacaaaagcaattggcaatatcagcatcagagatgtccaatatcttctaactgcccccaacatatacaaagattacaggacaatcacggccaaggatttccttaccgcggtccggcaacaccttcaggagcaacacgaggcctcgccgttgctcggctccgtcatcacatgcagaagggatgatgaagtcaaggacatcatactgaagctggactcggagaagatccacaggatctacgtgatcgatgacaaggggaacaccgagggggtcatcacgctgagggacataatctccaagctggtgcacgagccacgccattactttggggatttcttcgatggtgttgttcccctgcctccaaacagcactgtatgacacggcccttgagatttcatcacgctggtgtgctcttgtaaattgtacattatgtccctttacgacaatggttccaaatggatgggaatagtgtacagtttgccttgtgtagttctttggcagtggaacaactaatggactaatggatagcacgggtgtacattcaataacttgaaataatatctgagctcccttctgtatgtttttatgatg

SEQ ID NO: 26354 - DNA, 1122 bp, Oryza sativa
  ref <308>: DATABASE ACCESSION NUMBER: AK101796
  ref <309>: DATABASE ENTRY DATE: 2002-08-28
gggccacagccgccacacccaacctcccgccgccgtcgccagccagccagccatggggagccggctgggtcgccgcgtgatccacttcgccaacctccccctcaagctcatgctccctcccgcgccgctctcctccgtccaggagttcgccgtcaagaccgtcccctccgcctccaaggtcgacatccgccgctgcctcgagtccatgtacggcctctccgtcgccgaggtccgcaccctcaacatggagggcaagaagctgcgccggggccccttcctcgccgccaagcccgactacaagaaggcctacgtcaccctccgcgccccgctccccgtctcccccgacctcttccccattgggcttgtcctcggcgagagggagcgcaaggccagcgccgccgccgccaggaggaaggcggtggagggcgccgaggtggaaggggagggcaaggggaagcactggatggaggatgagaaggtgggcttctccagggccggccgcggcaaggtggtgtacggcaaccccgggaggctggggaagaagaggaatggaggtaccaaggtgaaagacagagccggagaggaagtggggaagttcccatggagcgggacgcgtcttgctaccgagaagaaacctgctaggaaacagcagtatgcccccaagaagaagggcatagtcctgaagcagaagtcatggaagggatccgtgcatcggcaaccaaagaagaaggtggaagcttagaaccttgagtcgctgcattgcgatcatgagtgcactgtgccacagagcaggacgcgagcggtagatccatgaatcacaatgccagatcagtcttgtttttcattcacagaataaagagcaatattttggcatatgtatggctttggttactttgatatctcaggcttggttttctgacacatgaggccaggaaggtgaatggtagtcaagtttgtgccaacctgttactgatgtccttagatttcttttgagatgtctatttgtcatcaatcacaactgagtatgtacaactgatgcctcctcatttttttttttgttcttgtcaattacatatacctgttattcccgtggattggtatcatatgctgtttctgaggccc

SEQ ID NO: 26355 - DNA, 3310 bp, Oryza sativa
  ref <308>: DATABASE ACCESSION NUMBER: AK101797
  ref <309>: DATABASE ENTRY DATE: 2002-08-28
ggcaatgccattgcacacatatcttctcgttcttaaatcaagctgctgcctctccctcctcctcttgacaagcaccattcctctcaactgaacctgtcaaacagagagagaagtagatgatagcgtgagagaatagaacagaagaaagaagataaaaaaaaagaaaaggaaaggaaagctctgtgtaaagcctgcatctacgtgctctctttggttggggtgttcttgctgctagaactagcttagcctggttctgccatggagtgaagaggcctctcgttcatctccgattcttgggggttgtcttcagctgttcagcaagagccgagagcttagcttggggcaaaggaaatgccgtcccggatgatgcaggcgttcgcgcaggaggcttccgacttcgaccggcagatgggctgcatggccggcatgttccagatcttcgaccgccgccgcctcctcaccgcgcgtcaacgcggcggagcccgaggcacggcgccaccaggccatgttttgccaaacagcaacagcaatgtctcgattcaaaacccagttgcttcaaacaacactctggacaaaaccttcagcaaaagtatgaccgagaacagtagcctctccatggaatcatcgcgggcatcttcttcttcctcatcgtgctcttcgttctcgtccacagacatcaacagaccaatacaacaagagctctcctacatcaacaaagagcgttttgctgggaagccaccaagaagctcacagacaaagagtgtgaaatgttccaagacagaggccaaaaccaaagacccacacactggctttagagacattgtcaaggagtccatcaaccgggaaacccatggtatgaccatcaagacgtcgacaaaggagtccagaaaaggattgcacaaagactcaccaaggccgttgctgatctccaaatcaaccgatggaacttacgtgattgggatcgacaggagcaccggcgttcctggatatgttcatgaatccagcaggccaccacgcttctcatgcgacgatcggcaactcctgaggtcggtcgaagcgcaagacagcaagaagccttcagcaaagctcaaggagcttcccaggctgtccttggacagcagaaaagaatccatgaatccatgttcacgtctgaagaactctggctacataagaactgatgacaacctcctggatgttctgaagcaccaagaatcgccgagccatcagcgggccagcagcgtcgttgccaagctcatggggttggaaggaactactcctgacatccatgagacggcaaggtcacctacacctgtccatggcacgcaaattgatcagccgtcacactgtcaaaggatcaagaaccaagatcatagtgtcccggtgcagaagaatcactctccagtactgaaaaccaatccttctccaagaattatccctgaagcagccccatggagacagaatgagagagctgtaacaggacgtgcagctgaagtgaagccaagaactgcatccatctatgctgacatacagagaagactcaggggtctagagttgtcggaatgcaacaaggaactgagggctctcaggatattgagcacactgcacaaaaaggatggcccaagccagagcgacaacaatcctgaattaacagccattcaaaagaaggcctctgaacaaatagttgattctgaaaatttccagtctccaattgtgatcatgaaaccagcaagatgcatcacaaaacctgatgcttcagatactttggttgctcccctttcaaggccaaaaggcataagaagactacggcatgaagagacatctttcaccaggaagaatgaaaacagtgatagcaagagaaatcattctccgaatgaaagtgctcattccagtggtgaggaacctgtaaattctgcaagatcaccaaggctttccagctcattgagccccaggctggcacagaagaaggcggactctgaaaggaggtctcgtccaccggttttgccaacgtcaccaggcaagaaatctaaagaaacagtgtccccaagaggcaggctaagatcaaggcactcgcaaacaaagagcaactctgacaacgataatgtgttacacatccctgaaactaaaatcaatttggcaaagcagatcgatgtgggtgtcgttgatcatccgaatcctctgaatgccaactcaccatatatccatcaaagcaaaatagcttcaacacccaatcgtgaggaaatgcctacaattctacctgcagacaagaagaagatccatccacaggagaacatcccaagtcctgtgtcagttcttgatgcaacattttatcatgaggggtcatcgccttctctgaagagaatctcagattccttcaaagacggcgagacgcatacttcagatgagagttggaacccaacaagcctccctgatacaccaccttcaaaggcaagcaacgatggcaaccagataaaggcagaaaacatgaaagccctcatccaaaagcttgagctcttgcaaatgttgagtgaggaagctctgaaaaccgatgacactttttcatcagttgctgccaataaagatcaccagtacctctacgagatactttcagcatcagggatcctacacaacaaactaaattttcaaatgatgcctcatcagctgcgaccatcaagctacccgattaatccagagcttttcctcatccttgaacaagcaaaaccagacgaagaaaagctgcaccgtaggctcatatttgatcttgcaaatgaactcctcgcccagcaaatggatgccaaccacactgtgaattcatcagtgcagttctttcagtcaaagaagttaagtgggtggcaacttttcaaggacttatgtgcagagattgacatgatccagtctcggtcctcaatgataaggtgctctgaagaggaagatagcaggctagcagaggatgcaatgcaaggcatgaaagagtggaagagctccgacagtgaacggcaaggaattgttttggccattgaaaaatccatctttaaggatcttattgatgagataattagtggagtagacaaagggaaggtgcacctgacgcaatggaagctaaggaggcagctgtctttcatcagcatataggccaaatttctgcttcttaggaagcttagctaatggtatatgtaaccgttttaaactggctatacaatccatgagttaactgacatatatatatctacatgagcaagcaaacagtaacactgagatcttgccaaccaaaaaaaaaaatatccaaagattccctcgaagatgttccctgggc

SEQ ID NO: 26356 - DNA, 1499 bp, Oryza sativa
  ref <308>: DATABASE ACCESSION NUMBER: AK101798
  ref <309>: DATABASE ENTRY DATE: 2002-08-28
gggtctccccaatctttttggcgggagagcaccacagcgccgcctccacttcccgcgcaattcgcaagagaagagccatggacggcgggtcctccacggcggcgaggtcgtcggcggcggagatggaggagcaccagaactggaagaagaacgcgccggtgctctacgacctcgtcatctcccagccgctcgagtggccgtcgctcaccgtccagtggctcccctcccactcccggtcgccgggctccgcccgctcccaccgcctcgtcctcggcacccacacctccgacgagacgcccaaccacctcctactcgccgacgccgccctcccgctcccgccccgcctggcggcggcggccgcggcggcgggcggtgccgtcccggccccgtccgtgtccatctcccgctcggtgccgcacaagggcgaggtcaaccgcgcccgctgcatgccgcagaggccgtacacggtggctaccaagacctgcgtggatgaggtgcacgtgtaccatcttggcgacggcggcgagaagggcggcgccgatgtggtgctcagggggcatgaagcggaggggtatgggctggcgtggagtccgatgaaggaggggttgctgctgagcggctcgtatgataagaagatttgcctttgggatctcgctgctgggagtggagcttcgtctctggatgcacatcatgtgttcgaggctcatgacgatgttgttgaagatgttgcatggcacctgaaagatgaaaacctatttggatctgctggggatgactgcaagctgatgatgtgggacttgcgtactaataaaccaggacaatctatagtagcacaccaaaaagaagtaaactctttgtccttcaatccgtttaatgagtggatcttggcttcagcatctggagatgcaactattaagctatttgacttgcgaaaactgtcaagaagcctgcatgtattcgacagccatgactcctgtaggggagaggtttttcaggttgagtggaatcctaatttggagactgtgttagcatcctcagctgcagacaaaagggtgatgatatgggatgttagcaggatcggagacgagcaggcagaggaggatgcaaacgatggtccaccggagctgctgttcgtgcatggaggccacacagccaagatatcagagttgtcgtggaaccccacccagaaatgggtcatggccagcgtggccgaggataacatcctgcagatctgggagatggcagaaagcatatactgtgatgacaattatctccatgacaatgatgatgactcgtgcccagccacataaggacctggccaacttccctattctgtttctgttgcgtctttggatagcttggttggattgatcatatattcagttagtaacctctagtaggctttgagatgctgttgtttaatcagctttcgttttcgtttgacacctccaatccaaggatggaacatcttgatgtagaatgtccaactatttactact

SEQ ID NO: 26357 - DNA, 1024 bp, Oryza sativa
  ref <308>: DATABASE ACCESSION NUMBER: AK101799
  ref <309>: DATABASE ENTRY DATE: 2002-08-28
gttcctctcgcctctcgctctctccgacgaaaccccaaaattttctgagggaagcaagcggcggcgcacggagtcccctccctccccaatctgcaacgaactcgaagggcggcggcggcggcgtacgccggtgaatcaggttcccgcggcggagccgtgctccacccccgcgctcccatgagcgatctccgcgaactcggcatgcggcgggagccgtcgagggctgaggtggtggggcgtgccaaggacgacggggacttcgacgcgctccgccgcgccatcatccgcaaggtcaaggacaacgaggtgctacgcagcaacataattgcagaggtgaagcagtcagtggtaataaatgaagatggctctgaaaagttaaagctgaaagatctttctgatgcgatttaccaagatatcgggagcaaaataatgggtcaaatctcagacgagatatggggtgtcatcctatcaaatgaaattgatatccgaggaacttctgaaactgtctacaatagaatgatgaaccctgagcagcagcaggaccctccttcaaagaaactgaagaggaatgccaaagaggagcaagtgtccccagcaaaagcatcaacttctgttgcagtccagctggaagatgatgatccagaggaaccaccaggatttggtttcagtgatcatcagcgcagcaacatcatggcaactcagcagcagcagtcgtcaaatactgagaatcataaccaagtgaaaccaaatgaaggtgagcccaacgccgttagctgccctggggatgatgatgaggaggatcctgatgtgcctcctgggtttggttaacatcctgcaatcttctattgtggtgtgatctgtgatgtttcttgtcaacactaagaaaaatgatttagtttacatttgctgctcgaggggttcatttgaatattgaatcatgaaaccgatatgattgggatgagttcatgttgctcctagcttcagcctcttatttatgagggaacaaatgggcatttaagcgatc

SEQ ID NO: 26358 - DNA, 1441 bp, Oryza sativa
  ref <308>: DATABASE ACCESSION NUMBER: AK101800
  ref <309>: DATABASE ENTRY DATE: 2002-08-28
gacctttcttcctcgcgcaacagcagcggggcgggggcggggcgcggcttggcgcgacgccgagtggtgcatcccgtgatttcgccgacgtcttcgccgcccgcggggcggggggcagcagcaggaggaggaggaggaggaggggggaggcatggggaacgcgagcgggcgggaggaggaccccgcggcggcggccggggagggggacgtcgaggactcgtcggtccggtcctcggagcgcggcttcccgccgtacggcggagggggcaaccacgtgcggcgcgcgtgctcggtgggcgtcgtcgggggcggcgggggcgccggatcgccgcccgggagccccggccgctccctctcgccgcggatgttcgtgccccagacacctgtgcctccactccaaagagcagctgatgtaactccagtgttcaaccggatcttaatgaatgaacaagaagaggaatttgatggcccccctcaaaaggaaattcctgtcttgatcgtgtggacgcttggaggaaaaaatgtatctgttgaaggatcctgggataactggaaatcaaggaaacccatgcagaaatctgggaaagatcattcgctcctgttgatacttccatcgggagtttatcgttacagatttgttgtagatggagaaaggaaatgtcttcctgatcttccttgtgaaactgatatcatgggcaacgctgttaaccttcttgatgttcatgattttgtccctgaaagtgttgagagtgtggcagaatttgagcctcccccatccccagattctagctacagtatccaggcacccgaggaaaaggatttctcaaaagagccaccggttcttccatcccaactccatctgggtgttctcaactcacagaactctgatgaaagttgtgcacggccccagcacatagtcctcaaccacctcttcatcgagaaaggctggggtgcccatccgctggtggcccttggtctaacccacaggtttgagtccaaatatgtaaccgtcgtcctgtataagcccattgaacgatagcatagtcgcccccatgaagtcgaagttagcttgacaactcactgcggaaccaacaagggcgaggcctcgcttcctgtaaaagcacttcaggttcaggagtatttccgataacttgcaggaactttggttggtgttgtacatgatgtaccatcatgatgtctggcgccctggtttgtttacctccgaggggccaaagcatcatgagtttttacatatcagcatttcgttgttatcgatgctcaaggtatgaaatgtgtagaaaataccacttagaaccgtggaaatccacagaaatcttaggtgccagagttagatcttgtgatccatagattcttaattattttgaacgatgctgttgtttgttcttaatgtaataaaaacagaggtgctcattttactact

SEQ ID NO: 26359 - DNA, 3062 bp, Oryza sativa
  ref <308>: DATABASE ACCESSION NUMBER: AK101801
  ref <309>: DATABASE ENTRY DATE: 2002-08-28
gacgactgtagcccagctccagaacgaagtcaatttggggcttttcagttcctctctccaaatcggtccaatgtctcttcccccagccgcaatcccctctcgctcaaccatggatatgatatctattgccctctcattaatggatgtcaataacataaggggatctcatcaagtactattaaacaataaggacagaacaggatgatatttactggctatgcaactttctccatctaaattcatggtggattcattcagctaactaagcatgacagcatcagtagtttcctcagttttgcagaggcttggtgaccttgtcatccaagaagctacctttttaagtgatgttcctcgacaagtatcatccatgaaagcagaactgagccagatgcaatgcttcttaaatgttgtggatgccaaatgtttggaaggaaacagcatgatgaaaaatctggccagtaatattcaagacgtggcataccgggtggaagaggttattgacaatgctcatttcatttttaggaggagaaagacttctgtatcaaaatatactcacatctttggtgattccattgacctccgtgaggttggcaaaaacatacaagttataagaaaggaaattagtgagatttttgagcggtacaacagatacaacgcagttaattctagcacttcaacggaagcacagcccatttttagggaggatgaggatttctatgcacaaaggcttgtgccgccgggtttggatcaaggaatggatatagttggattcgatcatgaaattgcacaaattaagagttacttgcttgaccaaaataacatgaatctaactgttatatcgattgttggtcaggcaggggctgggaagtccacacttgcaaaactagcttatagttcagtcataactgaaggttattttcacaaatatggttgggtatccatttctccaaaatattctgcccttgaagtattaagagatctcgtgcgacagataaggggcactgggaagataagcgagcgaaagagcatgcatttaaatttctatggtgagacagaggtttcaaaacttatttttgattttctgaaggaagagcgctaccttattgttttggatgacatctggacaacagatacctgggacaagatcaaatcagtatttcctgacaaaggaaatggaagtagaataattctgactacccgtgatatggaagttggacaacatcctaaaactaaagtgcaaattcatacccctgacctattagacgaagacaagagctgggaacttttccagaagaaggcatttccacatgatgtgcaattcacagaacttgaggtggtggggaaaaaactctccaagaaatgcaatggcttgccacttgctctagtggttttaggttgcttcctttcacgaaaccacaatattcatacatgggagaaaatggttgctagtgtagactgggaaatcatgaaaaaggagggcgatgttggacgtatattagctctaagttatcacaatatgtcaaataaccttaaagcttgcttcctttatactgcatcctttcccgaggactaccctatcacagttcatgttcttaaaaaggtgtggattgctgagggatttgtcccaaatataagaggatatacacaagaagaagttgcctacagatatgtagaagagctggcacagagatgtatgatccaaattgaagaaagaagtaaaaacattgggtggataaagaaaataaaagttcatgatgtgttgcgtgagtggggaattggacaagccaggaaggaaggtttcttgaaagtttgctcaagcggcacagatgtggagacttattatgcagatgaacagaggtgttaccgtgtagcatttcatggttactttgataatgaagtgggaaaatcagttctgaatctccgttctgtgctggccttcaaccctgatggcaaacgtctgttttctttcaatgggttgcatttgttgagggtgcttcatttttgcagttccttaaagacatgtaccttgcctgaagaaataaacaaattggtacatctgagatacctgggtttggaaggtagtactgttttcatgttcccttcttatatgaaaggtcttagaaacttgcaaattcttgaagcaagtacagctactgtcaaggcacttccaagttccctctggagcatcgcagcactaaagcatgttcatgtctaccaagtactgcattggaaagcccaggagattagaacgaaacgaagcttgcagactctttatgtattttccataatgcagtgtgatgctctgacgtggaaaagaacaatcaggtctctgcaaaaaatgagccaacatgtttcctggtgcttagggatagcctctactaaacgcgtgaaggaaaaagagacccaagaacatgaagaatacaatttagatataagggtagatgccttagaatccaaagttgatggtttagaattgtctggatgttttaaagagcgtcacgttctgaatgatgtgcttccacatcataatctattcccaaactttctattgcagctcaagatatcttgtcccaatatactaaatgatgatccaatgccaattctggagagacttccacgtcttgaagtgcttgaaattgttaactcatcatacacaggaaagagaataacatgttcttccgagggattccttgcattacgcagtttggtacttatggatattggtttggaggagtggaatttgcagcagggatccatggcgtttctcgctgttttgactctcaagtgtaccatgctgaggagcatctcaaatgtacttcaccagctggatgatttggtagagcttcgcttgatttgcatgcctcagctctctgttgatgatcatgagccagctagggggaggggatgccgtgtcatgatttcagttgacgaggaacaaacttctgatacttgaatttgtaagtgaccccatgcttgaactaacttcattgccatgcctctctagtttcagctacaagaaagcttatattctttccccattttggataaattgcaattttgtt

SEQ ID NO: 26360 - DNA, 1551 bp, Oryza sativa
  ref <308>: DATABASE ACCESSION NUMBER: AK101802
  ref <309>: DATABASE ENTRY DATE: 2002-08-28
gtgtttcgccgccaccccggcgatctccgtcgacccacccgcccgccgccaccgcggatctcgctcggtttcgccgaccctgacggggaaccaaccagagctataagacgcgcccctcccccctctcgctctcgatcgagtccgcgggcgtggttctgttctccgattccttcccaggatggctgcttccacgtcccagcatgcgctcgtatccgtcaagtcgttgtgcaccggtgccaactttggtttcgaaaagagaaccagcaaagtgcgttttgttttggttgggaggtgctgctcgggcacccggaaattgggtttggtatgcgcttcaaactcacattcttcggtgatggagccggctcagctaccattgagccccgagagcggaaacaccccaaagaaatcaagtgaaagtgcgctcatattgatccggcatggtgaatcgctatggaatgagaaaaatctatttactggctgcgtcgatgtgcccctgaccccaaagggtgttgacgaggcaattgaggcgggtaaaaggatatgcaatatcccagttgatgtaatatacacctcgtcactaattcgtgctcagatgaccgctatgcttgccatgatgcagcatcgtcgtaagaaggttccaattgttgtgcacagtgagagcgaacaagctcacaggtggagcaagatatacagtgaagagacaaagaagcaatcaattcctgtcataacagcttggcagctgaatgaacgaatgtatggggaactacaaggccttaacaagcaagaaactgctgatcgttttggcaaagaacaagttcatgaatggcgtcgcagttacgacattcctcccccaaatggcgagagcctagagatgtgtgcagagagagcagttgcttattttaaagatcaaattgtacctcagcttgtggcaggaaagcatgtgatgattgctgcccatggcaattcacttcgttcaattataatgcacttagacaagttgacttctcaagaggttatcagccttgaactgtctactggcattcctatgctgtatatatttaaggaaggaaaatttattagacgggggagtccggcaggcccttctgaggcaggtgtctatgcctacaccaggagcttggctcagtacagacagaagcttgacaacatgtttcagtaaccatctgctctgtttccaccagcatctgaggaattttcatccgtcgaacatacagtttatccccccatctgccacaaagaagtggctaagcatactattcagtatgggctgcagtttgtagcatccttctttttcgtttcgtttgaaaccatgcagcatgtaacatggatgtctagagactttagggacaaattaggtgatgacctagaagatacaaacggggatgaatttacatcaccattgtgttctcgttttgtggctcaccattcataagatgttgcgataacagaaatttgtaatggattcatatactggacaaattgtgtgtgagctattctgccttttatacttctcctggcgagcgaatgcctttc

SEQ ID NO: 26361 - DNA, 1159 bp, Oryza sativa
  ref <308>: DATABASE ACCESSION NUMBER: AK101803
  ref <309>: DATABASE ENTRY DATE: 2002-08-28
gctggtctctcgctctcttcgctcgcggcggcttctccgcctccgcctccgccgccctctcctcctctcgcctcgccgccggcgccgccagccaccgcgcgggtcgggcgggccgtatcttcctttctgttccgatggcttccgcgaaggtggagaaccgcggcggcggtgggttcggttcgaagaggtcacgcaacgacgtgtctgtaagggagggggactggacttgtcctcagtgtggtaatgtcaacttcagttttagaaatgtttgcaaccgcggagcctgtggtgcaccccgtccatcaccgagtctaagcccaagagtgccacctcctcctgctgctggatatgatcggccacatcttggatatgatcggccacatctgttttatggtagtgctggcaccccacctcctattcctcttggatctggtagctatggtgccccctatccacatcttggcttgcggtatggatatggtccaccagtaggacctcctgcttcatatggccttttttcttcttatggtcaacctggaccaatgggcagtccgatgggaggcatgggctatggccctggacctgagctaggccgatatggttatggttttagaggatctccaatgccggtttctagcccatggtctggtggagcattagtggaaaataatgacagctctgcttcacgcaagcgtcgtggaggcccagatggaatggctgagaatgactggatctgcccaaagtgtgagaatgtcaacttttccttcagaaacagttgcaatatgaagaaatgtggagctccaaggccaagccctggatctaatgctaccccatgtcgcaaagacaaggacgctccggaagggagctggacctgcccggagtgcaacaacctgaactaccctttccgcacggcgtgcaatcggaaaggctgcggaagcagcaggccggcagcggccacggcgaactaggaccctactaactttgcgccggcgattgggggcagatagagtattgttgtatcctagctatatacaagttaatttaaactgtaaacggctcaaatatattttcttgtggcctgagattcgttgtgcctgatttttaaattcgccttctgaatttcctttacgatttatagagcttttatatacattggact

SEQ ID NO: 26362 - DNA, 1708 bp, Oryza sativa
  ref <308>: DATABASE ACCESSION NUMBER: AK101804
  ref <309>: DATABASE ENTRY DATE: 2002-08-28
ggggatgcctcgccgccgcttctaggtcttcttctcggtgaccggcgaggcagccggcgcggctttgccggcgagggctataggttgccggcacgtgcgacctgctccgtagcgagcgcacggggggctgccgtgactgagcagccgcaccgcgcggcaattaatgcttcgtgcctcccagtgagctgccttgatcggctgacaccctctccgcagcttcacccgagatggaggatctccccatggggcggcggaacccggcggccagcctcaccgacgacctcgtcgtcgagatcctccgccgcctccccgtccgctccgtgtgccgcttcaagcgcgtctgccggtcctggcgcaacctcatcgccgaccgtgagcaccgcaagaagctgccgcagacgctgtccggcttcttctacaaaagcatcagcggcgagcgctgcccttgctcggcgcaccacttcaccaacgtctccgggaaaggggtgcctctcatctacccgtcattctccttcctgccccagtgcgacacggtcgtccccttggactgctgcaatggcctcctcctctgccgctgcttccagcccgggcctaacaacagcgatgatgagattgagccgttccattatgccgtgtgcaatcctgcgaccaaggaatgggtgatgttgccggatgccgactgggctaatggcgagacccgcattgcctgcctgtgtttcgacccagcaatctcctcgcatttccatgttcttgagtatgtggaggctgaatatgaagatgtcacgggggttgagatctactcttccgaaactgggttgtggactcttcatgtgagtggatggggcgatgatgtgtttctaaggcattgggccaatccgagaagtgttttccttaatggttttctgcattctgctacgtgtgctgctgagattgcggtggttgacatggaggggaagaaatggaggaccattgctatgccggagcctgaaggtgatactggcataattcatcaaactcagggtcgcctatgtgcttttaatgttgatccagatgacatcttcaaactgtcaatttggattcttgaagattatgatacagataattggatattaaagcacaccgttagctccttgaggctgtttggagggaagaaatatcagtttggatttgactaccaaataattgtggttcatccagaatgtaatttgatattctttgtttatggatgggacaaaacgttgatggcatatgaaatggatcgcaaggaagtgcgtgttatacgcaatcttggacatgactcctcggatccatatctaccgtatgttccactcttttatgagtcatttgcagatgggcgctaacatgcagagcgtcggctccacttttactactgcgaaaacatccttttgcactaggagaaccaagcttagagtgggcagaaagccattctctagtacaaggatttagcaaggtctgttttattgtacttgaattaagaagtcagatggtagtactagtactatgtagattgtcttttggaaggtttgtcctgttactctgaaggttgtcttgttttattctactggtgtttaccctattatagtgaagctttgatgtgatatgctaacactgaaaggtcttttgactgtatcagcacaatctgtttagggtactgtgacagtgtgactaatgttttgaatgttggagc

SEQ ID NO: 26363 - DNA, 3051 bp, Oryza sativa
  ref <308>: DATABASE ACCESSION NUMBER: AK101805
  ref <309>: DATABASE ENTRY DATE: 2002-08-28
cttgagctcctcgtctccacccgcccggccttcccaccgccccagccgctcctcttccacctcctccgccgcctcgccacctcttccccgtcccacctccctcgcctcctcaacctcctcccgcggctgcgccaccgcccgcgcttctccgagtccgcggcgctcgtcgtcctatccgccttctcccgcgccatcatgcccgacgccgcgctcgacgccttccgcgccctcccttccatcctcggctgcaaccccggcatccgctcccacaacgccctcctcgacgcgttcgtccgcgcccgtcgtttctccgacgcggacgcgttctttgcctccctctcccatggcgccttcggccgccgcatcgcccccaaccttcagacctacaacatcgtcctccgctctctctgcgcccgtggcgacctcgatcgagcggtcactctgttcgactccctgcgacgccgccaagttgctcccgaccgcatcacctattcgaccctcatgtgcgggctcgcgaaacaggaccgcttggatcacgccctcgacctgctcgacgaaatgccgaggagtagagttcagcctgatgtcgtttgttacaatgcactcctcggtgggtgttttaaggccggtgagttcgagaaagtcatgagggtgtgggacaaactggttaaggacccaggtgcaaggcccaacctcgctacttacaatgtgatgcttgatggattgtgtaagtttgggagattcaaggaggtgggtgaggtctgggaaaggatggtggcaaataatctccaaccagatgtaattacctatgggatcttgatccatggtttgtgccgatctggagatgtggatggtgcagcacgagtatactctgagattatcaagactgggcttgttattgatgctgccatgtataattcactcgtcaaggggttctgtcaagcagggagggtacaggaagcttggaagttctgggatagtgctgggtttgcagggcttcgtaatttaagaacttacaatataatgataaaggggctctttgacagtggtatggttgatgaggctatagagttatgggacctattggagaaagatgcggcttgcattcctgacacagtgacttttggcactctgatccatggattatgccagaatggctttgctaataaggcatttacaatatttgaggaagctcgagtcagtggcaaacaattagatgtgttctcatattcatccatgatcaatggattatgcaatgttgggaggttagttgatgcggttaaagtatatgagaagatggataaggatgggtgcaaaccgaattctcatatttacaatgcactaataagtgggttctgccaagtatacaggactagtgatgctgttagaatttacagcaagatggcagacaatggttgttctcctacagtcatcacatacaacactttaatagatggtctgtgtaaggctgaaaagtatcaagaagcttcaagtgttgcaagggaaatggtagagaatggctttacaccagatatcactacttatggatcgttgatccgtggcctttttagtgacaagaagattgatgatgctctttctatttggaaacaaattctttataagggtctcaaggttgatgtgatgatgcataacatcctaatccatgacctttgttctgctggcaaagttgatgaagctctccatgttttctcagatatgaaagagaagaagaattgtcccccaaatctagtgacttataacaccctgatggatggactttatgaaactggctatattgacaaagcagcaactctctggacctccataacagaagatgggttggaactagacataatttcatacaatacaagaatcaagggcctatgctcttgtgacagaatacatgaggggatccagttattggatgaggttctctcacgaggcattataccgactgtaattacatggaatatacttgtcagggctgtaatcaagtatggacctatccaagtataacaccttcaaagtccttatgcttctggtgatgagatatcctgctcgtagatgacctgagcaaccaaaccaatgaatattagacccagagctgcaaccttcctccactccacctcaggtgttgcgaagacggcatttgcaattgtaagcccgagtattgccatgagcccaaggtaaatgttcatcctagtttttgatcctgcactttcttttgcaatatctttgaccttttgtgcttctagcttgggtattggttttactgtgagtttcttcttgttgcgaggcttcaccttcccaaggcttttgaagaacataccttcatttttctccttctcaatccaatcttcgaagtcttcaagcaccctctcgttcatttctatctcctgcctttgaacttcagcagtctcctcaaaggcctgcatcttgctgtccagcctctccattatctaccacatcagatcgaactcggtgtccgcatccttcgcaaacttggtcaggtaagcagagcgctcgtccaagaagcttgtgatgcgcaccttctgcgcctgaagcattgcgatcttcgcaaggacctcctgctggcgtttgtctccgccaagcgacgacgaagcatcggatccatcatcttcagagctgcaggcacggatacaagatctcttcctctttagcagcgcacatcggtatggggaggatctgtgtagcgaaggaatggacatcctaatggtgtgaagattaagcatctcctcttaatctttgctatgctgctgctcttgctctgcgaagtactatcgtggaaggatttgtttctgcccaccactcgatgcttgagcagttgagcttgagtttgggaacgatatcctttggcttttagctttcatgacaagaccaatttgccccttgcatgttgggcattcgcaggtccatttcttggacgttccttgcgtgttgggaattatcaactaggtccattgtttggaccttatctgagacattgggcacaacttgtcgatactttagtaaaaaaatatcttcttaccg

SEQ ID NO: 26364 - DNA, 1883 bp, Oryza sativa
  ref <308>: DATABASE ACCESSION NUMBER: AK101806
  ref <309>: DATABASE ENTRY DATE: 2002-08-28
ttacggcttgtgatatctttgctcgtttttcttcttcttctccgacgatctgctgcttctttccggcaatgtggctccaaaatcttgatccaggcggcgcgtgcgggttcaagcacaccaaccagtacccgttcatgtcgatgacctcctgcggcaaccagccattgttcaaggacggcaagggatgcggctcttgctacaaggtgagtagagtactccaaactaatcaaaagattaaagaaagaaaaagaagcccatttacatggggggcctaactgtcaaagcagtgcatgccgttgcagtcttgaccatcggtccgcagggtgggacccaccgccgagagcatgtgcgcgtggccccctccaccccggttttcggtggcagtgattggcgcgccaaatgcattcaatgctaatgttttttcttctttttttttctttttaacattacagatcagatgcaccaaggaccagtcgtgctccggcaggtcggagacggtgatcatcaccgacatgaactactacccggtggctccgttccacttcgacctcagcggcacggcgttcggcaggctcgccaagcctggcctcaacgacaagctgcgccactccggcatcatcgacatcgagttcaccaggtcagtgaaagaaaccacattgtactgtactgatgtagtagtggtggtagtgtagccctccaaatctgccgttgaaatttgcttccagtactactactagtagagggtaaaagttgggtggagtggatgatgagatgagtggatccacccaactgcacacctttaactccatttccggacaccggcaatggattgcacatgcatgtgcagctcagatgcaatgcagcaacaactttattaggtttaggatgtttttttttaaaaaaaaatttcatcctctgccagactgcaacatgctcgtttttggctactagcagtaggcacgcctcccttctgcagccaaacgtatgatgcgtgccctgctattatacgccaccggccaccccatttccatcttgtagtaaaatgctttttatcaatcaatgggccccaatccgattaacaaaaaaagtaggacacgattattgtatttccacatgaccagtaaagcaggcagcatatgacaagattagcagcggagtaattctcacttgtgtttaattaacttaatggtggattcgtgtgatgtgatggtgcagggtgccatgcgagttcccggggctcaagatcgggttccacgtggaggagtactcgaaccctgtgtacttcgcggtgctggtggagtacgaggacggcgacggcgacgtggtgcaggtggacctgatggagtcgaagacggcgcacgggccgccgacggggaggtggacgccgatgagggagtcgtggggctccatctggaggctggacaccaaccacaggctccaggcccccttctccatccgcatccgcaacgagtccggcaagacgctcgtcgccaacaacgtcatcccggccaactggaggcccaacacattctaccgctccttcgtccagtacagctgaaccgccgctcgccggcggcgaccctcggcgccggcatcgccgccgctgctgctgctagtaatactactactgctatgatgtaattgtgttaccggttgggttctttgagtttgttggggttggggattgtgtggtcggtctgtgttgcgatttgcagaaaccgggcgagcgaaagaagaaaaaaaaagctgtgtgggaaatggaggaggtaggcgtacaaggttatgctctcccgcccactctcgcttttataatttatcattttcaaatggtgatgatatgatgattaatcaaaaggattatattgctacttaaattgtatggt

SEQ ID NO: 26365 - DNA, 1462 bp, Oryza sativa
  ref <308>: DATABASE ACCESSION NUMBER: AK101807
  ref <309>: DATABASE ENTRY DATE: 2002-08-28
ggcggcctacactgcgcagcgcagcaatggcggcctactgctctagggtttaccaccaccacccggtctcgccttccacaatgcagggatcgctcgcgaggccttcgatccacgcgggatccgcaagcctgaccttccgtgctcggcccaattccgtgtccatcgtgcgatgcgacgcggactcgccgccggagggaagtgctgtggcgggatgggcgcctccggggccgtacacggggagggacccggcggcgaggaagccggcgtggctgagacagcgtgcggcgcagggggagaagtacgcgaggctgagggagtcgctcggggagctcaagctcaacaccgtctgcgtcgaggcccaatgccccaacatcggtgagtgttgggatggcggcggcggtgcaggtggggacggggacggcattgcgacggcgacgatcatgctcctcggcgacacttgtacccgtggttgtcgattctgtgccgtgaaaaccagtaacaagcctccgccgcccgatgccctggagcctctcaggacagcagtggcagttgcaagttggggcgtagactatgttgtgctgacaagtgttgatagagatgaccttcctgatggtggaagtggccattttgcgcaaacagtgaaggctctaaaggaattgaaacctggtatactggtggagtgtctaacttcagactttcgaggtgacctggaggcagtttcatccttggcaagctctggtttggatgtgtttgcacacaacattgaaactgtgaggagtctgcagagaatagtcagagatccccgagcagcatacgatcagagtttagctgttctgaaacatgcgaaaaattgcaaagatggtatggtaacgaagtcctctatcatgcttggtctaggtgagacagatgaagaggtgaagcaaaccatgtgtgatttgagggccattgacgttgatattctgaccttgggacaatatttacagccaacagaaagacacttgcgggtcagagaatatgtgactcctgagaagtttgatttctggaaggagtatggggaatctctgggttttctttatgttgctagtggacctctggttcggtcttcgtatcgtgcgggagagctctttgtgcaaaatttggtcagacgtaaaaaagccgagcttgcacctactttgcagtaaccaaataggagtattactactatacatctgatggcctggtgcagttctttgatgaaagttttgcattgaagttgtgtgctgatgacaggagtaaggaggtggcacaatcgggaccaaaggcctagagtgacatgcctataggcgctcgttgttctagccatgctgtgatatctgctgtagcctgtaaaaaaaattgtttttcactttcttactcgggctgtcaaaaaagtgtatggaaaccagataaaataataccgaatgctaaaattcatgttactgcc

SEQ ID NO: 26366 - DNA, 3437 bp, Oryza sativa
  ref <308>: DATABASE ACCESSION NUMBER: AK101808
  ref <309>: DATABASE ENTRY DATE: 2002-08-28
ggaagcttccagaaagttctaatctcgcagcccgagccatggccctggccgaagccgagaacccgccgcgccgccgccgacctgcgccggaccccgtcgcggtgctccgaggccaccgcgccgccgtcaacgacgtctgcttccacccctccctcccgctcatcttctccggcgcggctgacggggaactcagggtttgggacacagcgagccaccgcactgtctcctcggtttgggctcatggtggatcggctggtgtatattcagtggctgctagcaccagacttggaaacaaaatcattagtcaaggtagggatggatcatgcaaatgctgggaaatcgaggaagctgggctttcacggtatgactcattgcacatgaagtgtaataggagttagaattggatctttctttggatggaacatgctaaggattgacatacaatttttaaaaagaaaaaatagaacatgctacctttaacataaattaggacttggttaatagtaggctttaccaatgtaaatgcaaggagaagaagacatgggcatacatatagacaaaagatattttgaatactagaagagatatacaacccatcaagagaagtctttgcaagacaacttttactcctacacatgtaggcctcattaggtttgatgccaccaaaccaagtgtatctatcctgaaactacctgctatatactccaccatttattgcatctgctccacaaagtccatctgctcaggtaattggatactccatcctgttgtcctcattctgctgcaagtgcatccaccagagcataagtgtaatgctattaatgttttgtcagtatatttaacctgattatagtctgtagggcaggtccccatatgcctcttgaagatcttatagctcttaaataataaaagaatatatataccaacttagtgctatcatattcttgtgtcaatggactttacatgatctgtagtggtaaattgatgaagaaacttaaacaaactagtcagagcctcctcggtatttgttgactagcaccttgtcctaattaagatgataagtgtaaggtccagaaggaatatggtaaaacacatacttgtcaaccttctttgtttgagctgtgtttcatttgtgtttcttatttgagtttccgtggcatgcaaatccaatttcttgggttctttcaggagggccctatatacaatcagaacaagtacataccatttctgcaaaatgtcactcgttaagtcaacatgttctacatgctgcacacaatctggcttgatctccgcaactggtgatattgagtcacaaagcacagttactgaagaacgtgaactaggtagtgcatgatttcagcatctcaaataaaagagagcaactagaaacttgatcactcttgacaagaaattggtgtcagagaactccttagtgactctcttcatgattgacttaatggtgtatttcctaggcacttgctgtaaaggaccaaatataatggcaatcgctggtcaagaatcatcgcaggttagtttttaatcttgactttgagcaaaacatagcgtgatgcaatagaacataactaattcatcgttttttttgtgcctacatattttcttgccctgttttcaattttttcatgttgtcactaaataacaaagtgaatacaggttgaactttgggatattgataacgcaataaaggtaatgtgcttgcctgaaacaggcagcgctaatctggctgatcacccgaccaagcaaagaggttcatctccacaacttctgctgtaattgttttgtcttatgaaccataccaaatgtaggttgagctagcataaggtggtacgtctggtgccgatctgatctcttgcttggtagaaccttcaagcatttatactcctaggttctggttagccctcaccatgtctttggtgccatattttttaaagcataatgttagttttcaagaaatagtcggaagaagcaggaacttgatgataaattaggagctgcattggtgattatagactggctgttggcattgtactaggacaaggatacctttgtcattgccttgaaggataaatacttgctgagcatagctgtatctttgtgtatttggcttaacagaattatttacgagccgtgtcactattttacttccttatgcacaataccgagtgtattcatgctagcgtagcatcccatgatgctgtcccatccagcaggaaattgtcaaatcctgccgtcagccagaaatatgtgctttacaagtcactgaagcaaatgtttcatagatgtggtttaggatgaatacatcttctatgatatgagactgcacgtatgttcttcagttcttcactgtagtagcttgctaagttcacgaaattgcgcttcacatcaatttatctattatagctagtgtgctgttatgccgctctgcatttgcacactgcaggacatttataacaattcatttgaattgcccaatgacattcgtttttcccttgcattcatgctttaagtaatccttgaaaacttcatgctgttgattgtaggactatgcatggctgtgcaagctttcttcccttgtggtgcagcttatgtaaatattttgtcaagttacgaagatggaagcacacttttgtgggatgtacgaaatcctggtctacctgtatcctcagtgaaatatcactcagaatcagctttatccattgctattgatgggctatgcaatggggggatctcaggaggtgctgatgataaaattgtcatgtttggccttgatcatcaaaagggtgcatttattctcaggaaagaaataaaacttgagcgaccgggtatagcaggcactgcaattcggccagacaacaagattgcagcgaccgctggttgggatcacaggattcgtgtgtatagctacagtaaaggaaacgctctagcagtgttaaagtatcacagtgcttcgtgtaatgcagtgacattctcatcggactccaagctgttggcttcctgctcggcggatactacggttgcattatgggagctctatcctcccaaaacagatagccaagttggtctcaaaacgagagatgaaatatcccaataatatggccgggccttcctttgaggcgatgcctctgcctcttgactggaggagcacacggcggatgaattagagttagtttatgacatgttttgagtgtttttgacacggcggaagatcacgtggctagctcatactgattcatgggggtcggagttttaatctccgaccctccttgcatcacttttccttcattggatgtctttctcgctttagcgaaatcggtgtgggaacgagagatgaaatatcccaattaatatggccgggtcttccattgaggcaatgcctctgcttcttgactagaggagcataagacggatgaattagagct

SEQ ID NO: 26367 - DNA, 1696 bp, Oryza sativa
  ref <308>: DATABASE ACCESSION NUMBER: AK101809
  ref <309>: DATABASE ENTRY DATE: 2002-08-28
ggtccgtccgttcgattcgacgacaccttcatttttattttcttccttgtgtaataagaagacgactagtggtaacaaaaagattcgctccctacgcgacgccccgaccccgattcccttcgcttcctactccttcctcttccttgttccttccttccttcctcaccccacgaacgcgcacaccaacctttcccatccctagctgctgcccttccatcggatccacggatcgagacctggcacggcggcggaggacgggccggcggagatggaggtggaccacgcggaccgcgacggcgcgcggcgccggtgccgcgagtacctgctcgcgctcgaggaggagcgccgcaagatccaggtgttccagcgggagctccctctctgcttcgacctcgtcacccagactatcgaggggatgaggagccagatggacgccgccggcagcgaggagacggtcagcgaccagggcccgccgccggtgctcgaggagttcatcccgctcaagcccagcctctcgctgtcctcctccgaggaggagagcacccacgccgacgccgccaagtcaggcaagaaggaggaggccgagacgtcggagaggcattcgtcgccgccgccgccgccgccggaggccaagaaggtgacgccggattggctccagtccgtgcagctctggagccaagaagaaccccagcagccatcgtctcctagcccaactcctaccaaggatttaccgtgcaagccggtggcgctgaacgccaggaaggccggcggagcgttccagccgttcgagaaggagaagcgcgccgagctgccggcgtcgtcgaccacggccgcggcgagctcgaccgtggtcggagacagcggcgacaagcccaccgatgatgacacggagaaacacatggagacggacaaggacaaccgacaaggacgccaaggagcaaggacaaggaaggccagtcgcagcctcaccggaagcctcgccggtgctgggcgccggagctccaccgccgcttcctgcaagcgctgcagcagctgggcgggtcccatgtagcgacgcccaagcagatccgggagctgatgaaggtggatggcctcaccaacgacgaggtcaagagccatttgcagaagtatcgtctacacacgaggaggccgagctcgacggggcagagcagcgccgcagccggcgtccccgccccgcctgcgccgcagttcgtcgtcgtcgggagcatctgggtacccccgccggaatacgctgccgcggccgccgcacagcagcacgtgcagcttgccgccgccggcaataatgcgtccgggagcgccaaccccgtgtacgctccggtggcgatgctgccggcaggcttgcagccgcattcgcatcggaagcagcaccagcagcagcagcaaggacagagacattccgggtcggaaggccggcggagcggggacgccggcgatggcagctcgtcctccccggccgtctcgtcgtcgtcgcagaccacctccgcttgattagtgtagattcgtcgattacatcattatatgtacgtagtacgagagtgcatcacatcaaagtgcagcttgattttggagctagctagcttaaattaagggttaattactgattgcttcgtgatcgcacacaccacatttgctgttttgtttgtaaaaaagataataaaatacataaatattaagg

SEQ ID NO: 26368 - DNA, 1680 bp, Oryza sativa
  ref <308>: DATABASE ACCESSION NUMBER: AK101810
  ref <309>: DATABASE ENTRY DATE: 2002-08-28
aagagccctcgcagaaccctcactctctcatgccgcaatcaccatgagcgccgccacccccgactccgccgccgccgccaagcgccccatcgacccctcccacgccgacccgtcgccggcggcgaagctccagaggtcgtccccgccggatccctcgccgccggctgaggcgcagggcgacgccactgacggcggcggcgaagtggctggggtgagaagcggggagatggccggcgcgcggaaccctcaggcgcagcggtacctggtcgccgtggagtacgtcggcacccggttctccggctcccagcagcagctcaaccagcgcaccgtcgtcggcgtcctcgaggaggcatttcacaaattcattggtcagccagtctcaatcttctgttctagtcgaacggacacaggtgttcatgctttatcaaatgtttgtcatgttgacgtggagcggataagtaaaagaaagcctggtgaaatgttgccacctcatgagcctggagttgtaaaacgtgcagtgaaccattttctacagaagaatgaaggtgacataatggtgactgatgtccgttgtgttgcaccagacttccatgctagatacaaagccctagagcgcacgtaccactatcgtttgctttctggatctgagccactatcagtttttgagaaaacctctgcttggcacatacccgaggatttaaatgtacaggcaatgaagaaagcgtgcagcatacttgttgggcatcatgatttcagttcatttcgagcaactggatgtcaggcaaactctcccatgagaactttggatgagcttagtgttacagaagtatttccttccatgttttttccttcaagcatggagcgatcagagatggagtcattagatgggcatcttgtttattcaagaacgtcagttgtggaatcttctggaaaaggatctgatgcttctagtacaagtgagcaatcaagatttgagaatggagaagaatttggaaagaggctaaggcatcgttgcttcgttgttactgcacgggcacgttcatttctttaccaccaggtaaggttaatggttggtcttctaaaatctgttggtactggagatctaacaactgaagatgttgagagaattctgaatttaaaggcagtgactgcggcacctcctatggcacctgcttgtggtctctaccttgccaacgtgaaatatgacctgagcgtttgaaggcagatttctgaaatgaccacaagttatgtcatgttttgtctttcagaggcccatgtgtttgaattattgaaatactgagtagagaggtccagacgcaccttggaaaggaaaatgctttctcatggtccgaattttgtgcaaatctggaaaattttccccgatatttataagatacttttgtgcacatggtggaaggacatgtatttccatgttctcattagtttcgactcctatgtattcagattatcagatgtcaagtcgcataacattctctattgaatgtatgcacaaagttctagatcctaggacaaattaaactgtatatgtaaactagagtggcagctgacccttccttgattatgccttatattgtttcatcttcatttcacacagcacatacattatgcaaactgcattgcatggaatacatttcaccttcaattcatacatttgatctg

SEQ ID NO: 26369 - DNA, 1788 bp, Oryza sativa
  ref <308>: DATABASE ACCESSION NUMBER: AK101811
  ref <309>: DATABASE ENTRY DATE: 2002-08-28
gagataggcccccgccaccgagccctctgttacctccccccttctcctccgcttcacccgacgcctcctcctgcccgcccggatctacctcggcgccgcgtcggcgggcggaacccaccggcggccgcgcggggaggaggcgatcgaaaaaacccgaggggggaaacgcgccgggataatcctagggcagaatgttcaagttcctcaaggaggtggtcgcgggatccggatcgggcctcaaggacttcccctacaccatcggcgagccctacgcctccgcgtggggctcgtggacgcaccaccgcggcacctccaaggatgatgggtcgcccgtgtcaatcttttctctgtcagggagcaatcctcaggacaggcacttggttgctggtcggaatggtgttaagagattacgaacagtgcgtcatccaaacattttatcctttcttcacagtactgaagcagaagttcctgatggacctgccatgaagcatacaatttatattgtaacagagcctgttacgccactttcagaaaagcttaaggaactgaacctgggaggcacacagagagatgagtactttgcttggggtcttcaccagatatcaaaagctgtgagctttctcaacaacgactgcaagcttgttcacgggaatgtatgcgtgacgagcgtagttgttactcaaactctagattggaagcttcatgcttttgatgttctttctgaatttgatgctaacaacgaagcctctaatagccccatgttgcaatttgaatggttagttggaacacaatataagccaatggagctaacaaagtcagattgggtgtcagttaggaaatcacctccatgggcaattgattcctggggactggggtgtttaatttatgagctcttttctggtgcaaagctaaccaggacagaggaccttcggaacactgcttcaatcccaaagtctttacttccagattaccagaggctcttgagttctgccccttctcgtagaatgaacccttctaaacttattgacaacagtgagtttttccagaacaagttagtagagaccatacagttcatggaagttcttaacttaaaggacagtgttgagaaagatagctttttccgtaaactaccgaacatagctgagcagcttcctcgtgagatagtcctgaaaaagttgctccctgtgctggcatctgctcttgagtttggttcagctgctgcaccagccttggttgtattgttgaagatgggttcctggcttccagctgaccaatttagtgcaaaggttttgcctacaattgtgaagctttttgcctctaatgaccgagctatccgagttagccttttgcagcacatagatcagtttggggagtcattgacagctcaaactgttgatgagcaagttttcccccatgttgccactgggttctctgatacttctgcttttcttcgtgaactgaccttgaagtctatgcttgtattggcacccaaagtaagaccctcccaaccctctgcatgatcaacatttgcaccccgaacaaaatccttgtggatgtctttcatttttactgattgtgctgtgttaacagttttctttttaaaaagtgttctaaatttatctatcgctctctctggttgtgtgcacagcgggcttttaaagaaaaaaaaatcctgggattgcaaatttctgtggtattattttttcaggaagattattgcttctttatgactaattcaccaatctgttactgtagttatctcagcgtacgatttcaggatctctcttg

SEQ ID NO: 26370 - DNA, 1942 bp, Oryza sativa
  ref <308>: DATABASE ACCESSION NUMBER: AK101812
  ref <309>: DATABASE ENTRY DATE: 2002-08-28
gacaaacgcgccgacggagagacgggagggcaacgggagggcttagcgcgtcgctcccaacggtgattcgagccaagacctagccgccgccatggagatcgtgagatcccaccggcagatcgcggcggaggcggcggccggcgtaggatgtggcggcggggcgggaggcctgccaacctaccgggtggcgccgcagctggaggtgcggttggaagagtttgagctcttcgccatcgaccgcctccgagtattgaaggggatcgccgacgggctctcgcgagggaagagaccggaggaaatggagaaattggtcaaggaattgtggaaagcccatatgaggcaccaggatcctacagagactttgaacaaggacataatatctcactttgttctccgtcttgtctactgcagaacggaggagctgcggaagtggtttctctccatggagactacgctttttcgctatcgctttcggctcgagagtcctgaatcacagaggatgcttatgagtgagtttcgacttccatacaaagcattgccacactcggaatttgaggctgtcaaagacaagttgagccaagttgcacgcaccattggtcaatctgcagctgttgaatctgtgttcttcaaggtgccttttgaagaagttccagatcttgttgccagccgccgagtatttctttcaaaaggatatgcttatgttgcgatgagtcaggttgtttcgcttgtggttacccaattccgctgcaatatctcgaaggcacttgttttaacaaatagaaaatggacggccaccattaaggaacaagaaaaggataggttgactcctattgtcgaagcattgagtaatgcatattttggacctgattactctcagccaaaggatgctgttgagatttctctgaaggatattgaccaactggctaaaacttctttccctctttgtatgcgccacatgctagagaagttgagagaaaaccatcatctgaagcatgggggcagaatgcagtttggtcttttccttaagggagctggactaaagttggaagatgctctagcattttggagggcagagttttctcagaaggttggctctgagcgatttgacaaggaatatgcctacagtatcaggcataattatggaaaggaaggaaaacgaacagattacactccgtattcatgtcaaaagattatctctgcaacacctggtgttggtgatcaccatggttgcccttatcgacattttggtgaagacaacttgagagcagctctcaataaaatgggaatcagtggtcatccattagaagagataatggataaagtgaagaacaggcactaccagctagcttgcacgatgacttttgaggcagaacatggtgtctcatgtgatactggaatcaatcatcctaatcagtatttcagtgaaagccagaaagtcttgaaagcaaagaatcaagcagtgcagagccaaggaacaacctaaactgtaatgctgctggcaaaagtcagtccatccaaatgcggaatttcagttcgtatcaagatttcatccttgctgctaatgatatggagaacaacaattactaatctttattctgatgcctagatggaattctattgctttgcacggtttcagaattccaacggctgaatatgtcatcccccaaaagtgatggatgtccctgtaaacatgacttgagcacagaaagtagatagaaccgtacaagtacgtacttgtcaaaaccaaaggaaaccatgattatggatatcaaattattgtttgtgttggtaagtggtaactatgtaaccatggtaactatgaccagggggagttgtgaacacctcatcagttaagttgcgctgtaatgtttctgtaatcgaaaacttgttcgacaaaacaattgcgcttccagatatgcaatttcattaatctgcttgaact

SEQ ID NO: 26371 - DNA, 1754 bp, Oryza sativa
  ref <308>: DATABASE ACCESSION NUMBER: AK101813
  ref <309>: DATABASE ENTRY DATE: 2002-08-28
ggccatcaaatttccgccgctctcctcctcctctcctcttctccctcctgcgccgccgccacctcctcctccctcttccgcgcgcatattcgcatcgcataaatcgcaccaaccgcgcggcaagaggagagggaggaggaagccgacctagcgggctagcaggcagggcgtcgagcgggttggagggtttcttgagcgggttcgccagctcgagctgtttgcttgtggggttcttgtttttcttttccgggatctttgggtgatggctgctgctgcggcggcggagacgtcggaggcgtccacggccgggctcgcgctcgcggagtccaacatcaactggcagaggttggacaagaccaggttccatgtcattggagctatcctatttactgctcagcaaggtgttctgcaccctacggccgttgtgaagaccagaatgcaggttgcagaaggagggctttcacacatgtctggcttttctgttttcagaaggatattgagaagtgatggcatccctggtgctttcagaggctttggcacctcagcagttggagcactgcctggccgggtctttgctctgacttcattagaggtgtccaaagaaatggcattcaaatactctgaacattttgatatgtcagaggcatcaaggattgctgtagctaatggtatagcaggtctagtgtcaagtatattctcaagcgcatattttgtgccattagatgtgatttgccaaaggctcatggctcaaggactaccagggatggccacatacagaggcccatttgatgtgataagcaaggttgtcaggactgaggggctccggggcctttaccgcggttttggaatcaccatgttgactcaatctccagcctctgccctttggtggagttcatatggtggtgctcaacatgccatatggaggagcttgggttatggaattgattcacaaaagaaaccatctcaatcagaactagttgtcgttcaagcaactgctggaacaatagctggtgcttgctcatcaataatcacgacaccaatcgataccattaagacacgacttcaggtgatggataactatggtaggggcaggccatctgtcatgaaaaccaccagggtgctgctagaggaagatggctggagaggtttctacagggggtttggaccgcggtttctcaacatgtccctgtggggtacatccatgattgtaacttacgagctaataaagaggctctccgtcaagccggagtgatgagccttttggcttctgttccaaatagatggtgtaatcttgaagacccacaatccttatctgtgatgggctgacggctatctagtgagttcttctcaagaaagggatttggaaagtaacaaaatccaatcaagaagttttagtgatggaaactgttttataactacaggggaagtattagcaagttagtagcttaacaagttcctcctatacactgtaaatatttactagggttctgtatgaagttcttctgaaggtgcttcatccaggatgtaatagcctgaggcttgccctggctactgggggcaacatgtacgcggctcataaaaccctaaaaattttggcaatgagcttttgtatctctttccatgaggcaacaaattcccacggtatctcgcttggtttaatttgttatcatttttagcagattctagctagccacggtcttgagatggatgatgtagccaaaccaatttaatggaaaatgtactcgcttaatatg

SEQ ID NO: 26372 - DNA, 1137 bp, Oryza sativa
  ref <308>: DATABASE ACCESSION NUMBER: AK101814
  ref <309>: DATABASE ENTRY DATE: 2002-08-28
gacagtcccacacgactcctccggtcctcccatcctgacccaaccgctgctgctccagcatgcgcatcctccggggaatcctcgccgtctccggccacctcgccggccgccgcgcgccggcgaacaacgcccacctggcactcttctcccgcgccctccaaatcctcgcccagcaggagcccgtccgcctccagaagctctcggcgcccgactccgggatcgtggagatgaggctggagcggccggaggccaggaacgccatcgggagggagatgctccaggggttgcggagcgcgatcgagaaggtgaaggctgacgcgacggcgaaagtcgtgctgctggcgagctccgtcccgaaggttttctgcgctggcgctgatctcaaggaaaggaggttaatgagcccttgcgaagttcgcgaatttgtcaattccctaagatctacattcctgtcctttgaggcattgtcaattcctacaattgccattgttgagggagctgcttttggcggtgggttagaattggctctttcttgtgatctccgtatatgtggggaaaatgcaacatttagcttgccagaaactggccttgctattattcctggagctgggggaacgcagcgtcttcctaggattgttggaaagtccagagcaaaggaattaatattcactggtcgtagattcgatgcagtagaagctgtaaccatgggagtagtaaactactgtgttcccgctggggaggcttataaaagggctcttgaacttgcccaggagataaatcagaaaggtccgttagcgataagaatggctaagaaggccatcaatcaaggcatggaggtagatctgtccgccggattggctgtcgaagaagaatgctacgagcaagttctgcacactcaagatcgtcttgaaggtctagctgcatttgctgagaaaaggaaacctgtatacacagggaaataaggttgtaaatggtgttaaaattgcaagttgctttcaattgagcttctcacatccagaagggttgagcaggttatttttagactttctactgtgttcatatctttctccatacatgtaagaagaacaagatacatctgccaattcatgctacattttatcaagttaataaggttac

SEQ ID NO: 26373 - DNA, 3575 bp, Oryza sativa
  ref <308>: DATABASE ACCESSION NUMBER: AK101815
  ref <309>: DATABASE ENTRY DATE: 2002-08-28
gggttacttcgccggcggagtggtggttggcggcggtggggggcggtgagccggcgacggtcggcaccgcacgtcgaagcgcccggcgtccgcggtctgccgctcccggtggagctcggcgaggtggcggaggcgttgcagcctaggagaggaagcgctcggttgaggcggtggacggcggagtagcggcggccgtgggggcaggtgccggcgccaccgccaccgcagccggcttaggcggaagagacggcgggcctaacctgctactgtcccgtccccttacgcggtcacaagccattgacgccaagctggttccccttggcccttgccacttccacgccggcagcaacatccctgctacttgaggccagaaatgtacacctcagatgttagtgttatggcatggagcataacttggaaagttaagtgttcatataactacatttttttataggaactctcatataatatcatgagcattgccactatctgaaaacgaggcgacagtgtgaaattttgcttaccaggaggctcagcaaggcggaggtacaggttctcaccaaggctggccttcttctctgagtcgacaagctcccctgtccaaaccaagcatcttgacgggtcagccatggtgccgccactgctcaagttggcgtaagcatatgccttgcaagagcagttgctgctgcactcggccgcgcactggtcgaagctcctgttccggatctgcaagaacttgtcggggaccttcatgtcaggcaatgacacgaagcggtgaccgccctctccgcatctcagctcttcctttctccggcatcctgattgcgagatgctgggatctacaggctcgaacccatcgaggcaccggcacgccgggacggcccccgtgaagtcgcaaccggagaacgaagttccccgtgtcgagcagcacggcggaggctccggtgacgctgatcttggttgtccaaagaatgtggccttgggagtccgacagcaccatgcctgagctgttggtgatggcaagggtcgctgacgaaggggtggtgattgggttgtcgcggttggcaacccacacaacggtgcgctgggggatgttgtggaaccagactccaacatagaggctattgctgaagttggccggggggaagaagccgagggcaaagatgccgcccttggagatgagcatctcgctgggaaagattggctttcccagtgtcagctggtcatcggttttgcatagaggaatcgagagcagcaggaggaacatgagaaaatagaccatattgcctgttagactttctgcttcgtttgcttgtcatgggtcaagttatatctttcattcataatgcagatatggactggtgtagttggagttcaattcccttgctgtcacctcatctgaagatcaggagaaatgtgagatggctaagtcctgattcagactcatggacagagacagtaaaggaccctgtctgaattctgatgaccaggtcacctggtcatgatactccaagtcgtgtgacaatgctgcacgaaaacgaaagaatgctgctgccatggactttggagtgataggctagtgcaggcaaaagcgaaacctcacgtgcgttccatggctccacgtggtgtcacaggcccttgatgctgccactctccatttgaagaagtacaataggggaagaaatggtgagcataccaggagagtcggctaaccggaggtataggttgtcaccaaggcttgccctcgccatgtcagcaagatccccagtccagagcaagcaccttgactgatcggacatggtgtcggctttggtcaagttgccataagcataatcgtaggccatgcatgagcagttgtggctgcacttggccatgcactcctcgaagcttctgttctggacttgcaagaacttgtcagggagcttcattccagacatggtcacgaaatggttcctacctccgcatcccaactgttgctttcttcgacatcctctcgaagagttgaaatcacttggctcgaatccatcaaggcactggcatctggggatggccaatgtgaagtcgcagtagccgaatgggccacatgaggcgtagagattgcagtcaccagcggccgctggctgttgagagatgactgtccaggacgatgagctcccgttccaactcaggaacctcatgttgcccatgtagtcaagcttgattcgtgtgtatggggagccatcagaggttgtgtacataatgtacaactcatccctagtgttcacaagtgatttgtacatcaaagtggcaatgttgctcccgtatgcttcaccggacactaacactctattaagtgaaagtgcaatgaaacggtaatatggcttggtcccgtgccagatgaaggcctgaaggtttgatctggggtcgctgtggtaggagaagtccccggtggatgggtcattcggtcccttccaagcgacaagtcgcatggcgacttgtgccttgtatctcaggaaaaacttcttgttggggagaagggtatcagttgggtgatcaaagctttgccatgcggttgtattgtccggcagccgaagaaccaagtttcctgagtctagcagcactgcataagctcggtcacctctggtgttgatgttggccatcgtcgttcaaaaggtgtggccttctaaatctgacaatacaaagttagaactattgctgatggcgagcatcgcagatgaaggggcagtgatcggcttgtcacggttggcaatccaaacgtatgtgcgctctgggatgttgttgtaccatatgccgaggaataagctctggttggaagttgctggggagaagaagccgagtgcgaaaaccccgttctgggagacgagcacgtcgccagggtagagtttctttgcttgtgtcagctgatcatcgcacttgcagaatgagaagatgaaaagagggaagcaagccataccattcatttggtcttgttcttagctttgcctagttgcctgcaaagcgtagagaaatagcacacacacatatgggtgtttaattatctgatgcatacatgattctcctgagtcttgactcttgactcttgaggagcacgcggttggaccaaaggaagcagcgtaataacgaatggccgagactattctgtccgtcgagataaagttttgctacgaattcaaactgaactgtggggagactacggtgaagtggcctgacgagagcataggcgtagctggtattagtactcagtgttgtgatgctaacttgtgcagtttgtggctggctggctggctcggtggcaccgggacaacctcgcaactagaaatatcgacgcttgaacgcttgtgcacaacagaaaacttactacaactatttctgtagacgacaacatgaaggttggaggatcaacgatttatgctcaagaacaattgatggagactactgaaggatcaaggaagttgtttgcgttacgcaaggagacgacagggattaccccaagagactttccttcttttttttttttgtaaaccattgaaaatgaaccatacacccacaaagcaatcatattcctaggttcttgc

SEQ ID NO: 26374 - DNA, 1449 bp, Oryza sativa
  ref <308>: DATABASE ACCESSION NUMBER: AK101816
  ref <309>: DATABASE ENTRY DATE: 2002-08-28
gacggagagagagcaacgaggggatgggcggctacgagaacggcgactcgccggcggccgccgccggagacggcggcgtcatcctgggcgtcgacggcggcaccactaacaccgtctgcgtctgcctgccggtcgcaatgccgccgccggaatcgcccggcgccgtccccgtcttgtcccgcgccgtcgccggctgctccaaccgcaactccgtcggagaaagtgctgcactggaaactctagaacaggtcatggcacaggccctcacattggtcaacacggatcgttcagctgtccgtgcagtttgtttagctgtatctggagttaaccatccttctgatcagcagaggatgctagactggattcgagatctcttccctggccatgtcaagttttatgtggaaaatgatgcggtggcagctctggccagtggtacaatgggaaagctacatggctgtgtattgatagcgggcactggaagcatagcttatggggtcactgaagatggaaaggtagcaagagcagctggtgctggacctgttttgggcgactggggtagtggatatggcattgctgcacaggccctgacagcagtcgtaaaagcatacgatggccgtggacctcatactaatcttacaagagagatccttaggaagcttgagctttcttcaccagatgaattgattgggtggacgtatgcagatccatcttgggcccgtattgcagcacttgttcctgttgtggtatcttctgctgaagatggtgatgaagtagcaaacaaaatattgcatgattcagtgcaggagttagctgatagtgttgttgctgttgttcggcgccttaaattgtgtggtgaagatggaatggaccaatttccgcttgttttggttggaggtgttctcgaaggcaacaaaaaatggaacattagtggtgaggttgtaagatgtatttccaaagtcttcccaggcgtccatcctattcgacctgaggtggaaccagccattggtgcagcattactagcttggaaccatcatcgcaaaggactgaaactggaaaacggaagttgatctctagcatatggaatttatttcaactgtaaattacagaactgaacagccagaggattaataagattgggatggtcacacaggcacattcatcagcatcaaggttgttgctgcgtgaagagcgttatggatggatgtgctttctgtgagttgtgtaagcggggaacagatgcatttcttatgtaattagttaccgtgttcaaagaattgttcacgacatttggttctaactcttggtgacttgtacgtgtgctattagagagttccaaggaacatgtctgaaatgaacaggtcatgttaaaatgtgtatttttacctgttcggttaccttgtatctgtatttggtcgaaatgctgaattgattcaatcgtcacctgcattt

SEQ ID NO: 26375 - DNA, 1355 bp, Oryza sativa
  ref <308>: DATABASE ACCESSION NUMBER: AK101817
  ref <309>: DATABASE ENTRY DATE: 2002-08-28
ggtagcctctctccatctctcgctctctttctcctcggtttaaagcttcctcgagtcgcctcctccgaatccccacagcccaggccaaaggcagcctgagccagggtggggagcttcctctcctcgtcttcctcctcatcctcctgatcccggaaggaccccaggattacaagtacttcatgtcaatgaccaatctaaggaggcgactccatcatggagatgtcgatggaaggaagaatgagcatgttgacatatccagcgtagattcccttaatgaacctttactagggaaatctagctctgatactggtggatcagaggtatatgatcccagaaggcaagacttatgggatgatgatagaaagaaggaacagctacactggtcatttcttttctcaaatttgattgcgcaatgggcacaatggttagcaaatattattgttggctctggatcactatttggtagattgtttcccttttcgttggacaaccagaacagcagtccagtgtatcttagtcctttgcaggaagatagactgaatactttaaggtctagattgcaaatccctttcgatggctcccgtgttgaacaccaagatgctttgagacaactttggaggttagcataccccaaccgtgacattcctccactgaaatcagaactatggaaggagatgggttggcaaggcactgatccatcaactgacttcaggggtggaggattcatatcattggagaacctcatatttttcgctaggaactatcctggttcctttcaggcgcttctgaacaaagtacaagggcagagagcagactgggagtacccttttgcggttgctgggatcaacatttcatttatgctgatccaaatgctggatctacagtcaagtgttccatcttcaaagtcaggagttcgttttgttgaactgcttggacgagatgagaatgcatttgatcacctctactgcatagcctttcggcttctcgatgctcagtggcttgtgaaacgtgcttcttacatggagttcaatgaggtattgaaatctacaagaactcagttggagcgtgaactagtactagaggatgtattggaggtgaaggacctgccgtcttacacaatgctggacaaataatccaaataagtaagggactgtatgtggcattcaagtgaaaaaagttatccggatctgcaactgatttatgttggcggggccttttgttgtctgaccatctgagtgcatatttatcttttccttgttcaagagaaaaattcaggcctgtgtacatagtgttcattttctgtaacttatgactcgccatttcaaggcaataataagcatcaagttgatcacact

SEQ ID NO: 26376 - DNA, 1861 bp, Oryza sativa
  ref <308>: DATABASE ACCESSION NUMBER: AK101818
  ref <309>: DATABASE ENTRY DATE: 2002-08-28
ggtacacttcacactgccatccgctccatcgaccagcggtggccggcgacgccgccacggtgctcgtcccctaccagaagcggcggcggccggagcgacggagagcgtgtgttccggcgactgagttgaggaggggcgctcgccacctgttcgacggaatggctacgaggcgcgacggcagcagcagacgcgagggactcacggccgaggaggacggcggcgaggactggcttagcaccctcccggacgagatcctccacaatgtcctctccttcctgccagcgcacgaggccgtgtggacgtgcgtgctctcccgccgctggcgcaacctctggaggtccgcccccgtcctgcgcatcagaaacgcaaagagatggggtggtatggctaagttcgacaagtttttcaacaatctactgctcttgcgcgacccggtgcctcttgatgagctcgagttccaaaccgtattgggcatttgcaagttgcatccactacaaccttctttccgcttgcttaagtacgctaacacatggatcaggcatgcgctaatgtgcaatgttcgggttctcagagtcctcgttcaatatcaatatgatctacccctgctgaaagtcaacatgcctctcatctctgaacacttaaagaccttagagcttaggcgtgtactgctggacaagcgtgctctggatttctcaagctgtccttcactggaggaacttgagatgaatttttgtgggaattccaccaccaacaagattttctcacagtcactgaagcgtctttgcatcaccgatggtcggtttactgacgatctgtcaagcttacctgcattgcaagaccttgagatggaatcatgtggaatttgcaccgagaagttggtgtgccagtcactaaagcatctctgcttcactcgatgccacttcgaggagcccacacatatttctgccccaggtcttatttcgctacagctgaatgatatatggggctggactccttcacttgaaaccttgccattgctagtaacagcatctgtcaagcttgggaaagagtcaatgggttgctgttcggaatgcacatttcatcctggtacatgtgctgattgtgatggtgatcctgatagcagtttcaagtgtgagtttctcagagatctgtccaatgctgtgaatttggagttagcagctgaagatggaatgtgtatgttcaaacaagacttgacatggtgccccagattcagcaaggtaaagactttgcttcttgatgggtgggttgttgggcatgatttctatgctgttgtttgctttctccaacacacaccaattctggagaagctcacccttcagctttgtgagggacatgaacgtatggtggaaattgaagaaagtagcagatcagtgggacgtatggttcagtttgagcaccttcaaacagtcgaagtcagatgtttaaggaatgatgaatgggttcacaagattttgaaaatcttgaatacctatgggattactccagacaaaatcaccatccagatccaggattcagtctgagaagttcagagatctagcagatgattgatcgagctgacgacgtccatgctgaagtccttatctgaattctgaaagtgtgtgctttgggtctgcaagaattaatactaacactgttgcttgctgaagctcatagaaatacagctttgatcgaattggttacagaaaactagcacacggtacttctcaattggttatcatactggttgttaaaacttatctcgactagctagtttgtttgtttacgatacggttttcgttgccgactcggacagagactcatgtgtccctttgtagtttgtatatccatgtgagatttctgc

SEQ ID NO: 26377 - DNA, 1653 bp, Oryza sativa
  ref <308>: DATABASE ACCESSION NUMBER: AK101819
  ref <309>: DATABASE ENTRY DATE: 2002-08-28
gatactcctagtgaggaggaagaggatttgcttcgccgcgtcaccgggggaggtgtcacgttgagattcctgctggggctggggttgggttgagattccccaggcgcccgcggcggcctcgatctgggcggcgcagatcagaggacggcgcggatcggcgagcttcgcactgggcacgtgtgcctgtgtgtgggagtcaggcctcgcagccgccgctgctgctgctgctgctgctgcacctgtcagctagggcgggcatggcgcgccgcgccgcttcccgcgctgttggctcggagggctcgatccaagggcgagggggccgcgcggggggcaatggcgccgaggacgcacgccacgtgttcgacgaattgcttcggcgtggcaagggcgccacgatctacggcttgaaccgcgccctcgacgacgtcgcgcgtcacagccccgcggacgccgtgtcccgctacaaccgcatggcccgagccggcgccgacgaggtaactcccaacttgtacacctacagcgttctcatcggttgctgctgccgggcgggccgcttggacctcggtttcgcggccttgggcaatgtcattaagaagggatttagagtggaagccatcaccttcactcctctgctcaagggcctctgtgccgacaagaggacgagcgacgcaatggacatagtgctctgcagaatgacccagctcggctgcataccaaatgtcttctcctgcaccattcttctcaagggtctgtgtgatgagaacagaagccaagaagctctcgagctgctccaaatgatgcctgatgatggaggtgactgcccacctgatgtggtgttgtacaacaccgtcatcaatggcttcttcaaagagggggatccggacaaagcttacgctacataccatgaaatgtttgaccaggggattttgccagatgttgtgacttacagctctattatcgctgccttatgcaaggctcaagctatggacaaggccatggaggtacttaacaccatggttaagaatggtgtcatgcctaattgcaggacatataatagtattgtgcacggatattgctcttcagggcagttgacagaggctattggatttctcaaaatgatgtgcagtgatggtgtcgaaccagatgttgttacttgtaacttgctgatggattatctttgcaagaacagaagatgcacggaagctagaaagattttcaattctatgaccaagtgtggcctaaagcctgatattactacctattgtaccctgcttcaggggtatgctaccaaaggagcccttgttgagatgcatgatctcctggatttgatggtatggaacggtatccaacctaatcatcatgtattcaacattctaatatgtgcatacgctaaacaagaaaaagtagatgaggcgatgcttgtattcagcaaaatgaggcagcaaggattgagtccgaatgcagtgaactacagaacagtcatagatgtactctgcaagctaggcagagtatacgatgcagtgcttaccttaaagcagatgatcaatgaaggactaacccctgacatcattgtatatacccccctaattcatggtttttgtacctgtgacaaatgggagaaggctgaggagttaattttttaaatgttggatc

SEQ ID NO: 26378 - DNA, 1908 bp, Oryza sativa
  ref <308>: DATABASE ACCESSION NUMBER: AK101820
  ref <309>: DATABASE ENTRY DATE: 2002-08-28
ggaaatccttttcgcatccctctcctctccgcgattccccactcccggctgcagggcggtgcggcgatggccgacgctccgtcgccggtgctgacgctgcaggtgaagaagggccgccgcggcggggagacccggcagtggcgggcgggcgccgtgctccgcgtcggccgcgtcgccaccggcaacgacatcgccgtgcgcgacgccggggcgtcgcagcgccacctctccatcgagttcctcccgccgccggcctcgcggtgggccgtctccgacgtgggatcctccaacggcaccctcctcaacggctcccccctcgtgcccaccgtcccctccccgctctccgacggcgatgtcatcaagatcggggagtccagcatgctcgtggtctccatcgggcccgattcggatcccaaccctggccctaggcgctcctcgcgccaatccgccgcagtggtgggggagcaggagaaaccccctgcggtcacccgccgtggcggacggaagaacgctgcagcggcggcggtggcggttgagccgcccattgcggagaaggaagagccagagccggaagaggctccagtggtgactcgccgcggtgctcggaagaaggccgcgcaaccccccaaagcggaggagcacgaggagggcgaggaggaggtggtcgcggcggtggtgacgcgccgctgtgggcggaagaaggccgcagagccccctaaaccggatgaggaggaggagcaagagaaggggaaggatgaggaacaagaggagaaggaggaggaggaggtcccggtggtgacgcgccgcggcaggtcgaggaaggcggcgccggaggcagccgttgcgccaccgccgccgagggcaaggtcgacgagagctgctgctaggagaggcaaggcagtggacacaagcctggatgagagggagagcgagatggccggaaagggacggggaagggctacaaggtctaatgcaaggaagtgtaggatggccgttcctgaggacgatgacgatgatggggaacagcaagagggggctactgctgtggcagaagagcagataaaggatcaaccgagggcaatggcggtgactgacggtgaggaggaagatgataaggtggaagccatggatggagaagttgaacagaatgacaaggcatcagaggaggaggaggtgccagtggcgcggagaggacgggcacgaagagctccaaaggggaaggctactgcaagtagtaatgctcatgctgcttcggacaacgcggttgaggaggaagacggcggtagaggagagggagcggctgtggaagtggagggggagagttctgggagcagcagcttggaaaccatgacactgagggagtggtttcagaggatgaatgtgtacctccctaggatgatcaatgaggctgctgaagaggcgctttcagccctgcgggagaggcatcggcgtatagatgagtacatttcaacgcttgaggattagcgtgattcatggataattaggagctatttggtcaatctgacgtaggggtgatgcctggagataacattaattggaggcaatgctttgctgaagcgccacaaagatttgctgaagcgccacaaagagccattaggtgatatttcactgggatcatctcattatcgattccagttccaccaaatgccgcaaaaatcattgatgcaatacactgtagcactcttcatgtttactctagttatgtagtaccagtactctagtactcatgaagtaggacctgggttcgtaggcctctatgcaaaggcattcaacatgcatcgcagatttcattctgtaaattgcctctctaaggtgatgtttattcatgcctaacctctatctggaatacaacgcgacaatgttttgaatgtatatgtcgtttctacc

SEQ ID NO: 26379 - DNA, 2879 bp, Oryza sativa
  ref <308>: DATABASE ACCESSION NUMBER: AK101821
  ref <309>: DATABASE ENTRY DATE: 2002-08-28
gatccgtgacgcgaggcagtgcggtgcggattccattctcctcttggcatcacgaggcggcgccgcttggtctagctagtagccacagggagaggtggtagccgcagccgccgccgacgagacctcgccgccggggggagggcaccatgtgtggcatcctcgccgtgctcggcgtcgcagacgtctccctcgccaagcgctcccgcatcatcgagctatcccgccggttacgtcatagaggccctgattggagtggtatacactgctatcaggattgctatcttgcacaccagcggttggctattgttgatcccacatccggagaccagccgttgtacaatgaggacaaatctgttgttgtgacggtgaatggagagatctataaccatgaagaattgaaagctaacctgaaatctcataaattccaaactgctagcgattgtgaagttattgctcatctgtatgaggaatatggggaggaatttgtggatatgttggatgggatgttcgcttttgttcttcttgacacacgtgataaaagcttcattgcagcccgtgatgctattggcatttgtcctttatacatgggctggggtcttgatggttcggtttggttttcgtcagagatgaaggcattaagtgatgattgcgagcgattcatatccttccccctagctagcacgtactccagtagactgcgatgggcgcgccgccgaccagggaatccgaagcccgcgacgaggaggcggaggtgtcccgatcgggtgagcaaggcggcggtgaggcctctacgacgcagcagcagcagcagccggtgcctctgcgccaccagctgctcggcgcctgccgcgccgacgaacgcctcaggcccctcctcactctcaacctctcatgcggcgccgccgaggaccgcttcatctcccacctctcgcagcacttcgaggcgtccgaggtcggcttgctctacaggtgtctctgcgttcccctcgtcgctcttcgcgtcggcaaggtcgaccgccatggtcctctcctctgcccaacgcccatcaggtaatttgggcgtgtgtcataatctctgatatatgaggaaagagaagaggaaagctgagccttggtcttcttccttcatcgagcatgtgcattatctttgctggtgatgatggtcattcggagcaactagctctcctgaacaatgaccatgaagtttcagaagtttgtgttgaagaaatttcagctgataatacaggacgatctttcctcatcaggatttcagaatctaaagttttttactattggtgtgctgagaagtcaaagaaacacgggatggaccttcttgcaaagatgaaaaatctactgcagggaaggccaacactctctgatctcacaggcatctcagattcacgactggatgctttgccactcatctacacgcttatcttgttgcatcaagtattggagatgttaaatcgctgggatcacttaatgacttcctgggcgcttcaagcccacaagatcaatatttacagccctcatcagttgtttccaagtcttcacgcttctgcacctctgcagctaatgcagcaaaagcaagttctgtctaccaaactagtctgagtcccagatgtggtgcttttaaagatggagtgccaaggatgtcgtgtgcaaagattgctggaagagacaagctgaagcgacgtggggactggctgagctcatcaactggtcctgatgacgcaaatcttttgacaccgaagattgttagctctgattctgccagtgagaagtgtggtggggactgttctgaaaacagtgctaattcacctcctctagacttgcctctttcatttcccttgttgccatctctgtttcctcttgcgactcaatatccacttcctaaggattctacagagcaaccatttaagccttactattgctggtgcccaccatgcccatcttctctgcagtacagtgtaacccctctgcatatgccagttacatctgtagaaccactgcccttgccgcctttgagttctctgctatcaaatgatcagccgccgacttcaacagtttctgcaaagatggatacaactgatctcccgtcacttaatcttccatcgatactgcgtgatcctttacttcacctgccgcttcctacttcaccacttgtatccttgcatggttcacaagttccaactttcacaccattgatgtctgaccccattgtgcatgtcccggtcattgatgtgtgttcctctggccaggcttacctggtgagttgcgggccttctatgtctgcgactgttaccctgctccctagcttgaagcccctgattccagaaacagaatctttggttgagagaagcgctagggaaacactaatgaggcttatagcctcaacaccatctgcaagtaatccccagctggtgaacattctccctgcagtccttactgacgtgcctgaaatgaatgtgaggaaacatcttggtgtccatccaggcgacaggctaagctcatcttgtagcgtcgatgtgattggacctgggtttgccgtcacagaggatgatgcatctgttggagatggggctcacgcaacttttgcggaatatgatgatatcggcgatcagcagcattttcagagcatgtaggtggtaggttgtcgacaaggtactcgttggttgtccagaatattttgaaaggcagttgtatctatatggtaatagcttagcgttgggtttacttttgtgacgctctgcgtactgcctatttgctgtgatgatttagctgctcagtcaaaaacctcattaggttggtcaatgtaattagctgtttgtagtgtattcattcataaaactaaaagcaaactacccagttaatttgcg

SEQ ID NO: 26380 - DNA, 1641 bp, Oryza sativa
  ref <308>: DATABASE ACCESSION NUMBER: AK101822
  ref <309>: DATABASE ENTRY DATE: 2002-08-28
ggtttcttatcccccaagcaataacgaggcgtcatctctctcgtcatcttctactctccctcctctagtcctcttcttcttctactttgtacgcgccactcactctccgagcttgacggcggcggcggcggcggaggtcgtcgagtggtggtcggggagatgggtcaagatgaggtggaggtaggtgcggagaagaaggatcaagaactaccggaggtggaggtggtcgaggaggaggaggaggagggatccaagaaggcggcggcgggctgcgactactgcggcgacgcggcggcggtggtgtattgcagggccgacgcggcgaggctctgcctgccatgcgaccgccacgtgcacggcgccaacggggtgtgctcccgccacgcgcgcgcgccgctctgcgccgcgtgcgccgccgcgggggccgtcttccgccggggcgcgggcggcttcctctgctccaactgcgacttctccaggcaccgccacggcggggagcgcgacccggcggcgccgctccacgaccgctccacggtgcacccgtacaccgggtgcccctccgcgctcgacctcgccgcgctcctcgggatctcctactccgacaaggcggcggcggcgaccgcggcggcggggggcgacgacggtgggtggtgggccatctgggaggagccccaggtgctcagcctcgaggatctcatcgtcccgaccacctcctgccatggattcgagcctctcctcacgccatcttcccccaagattcagaactcgccggatgggaaggtgaatgaggaggtcatacgacagctaaccgagctcgccaattcagacggcggcggcgcgcagatttgggctcatcgcgaggcggcgcaggccggcgatcatcagttaccttcatggggaacaacaacacaacacaacactggacatggcaatttcggtactgcaaacagcaatgaggttgcaaccatgccgacgcctggttatgagaatggtggatgggataacagcgattaccctgcgctaaatgatccgtgcaaggtcgagttcacatatgagcaacctccagccagctcagctgaagcatgtatttcatcatttgttcagatgtctgaactttgccccagcatgagcaatggtagcagcatggaggaaacccaccagacaaaccctggaaatggcacgccaatgcaagttctacccaaaatgccagaattcgttccttgccccgacaggaacttggtcatttctcgctataaagagaagaggaagacaagaagattcgacaggcaggtccggtatgagtcccgcaaagctcgtgctgatagcaggctgaggattaagggccgttttgctaaagtcaatcagatttgagccttcatttctgtaatatattttgcatcttggacatgagtaatactaattaggaccaagcagatatagtacaagaaaaaatatcagcattttgtatgtaactatgtacccacccagtggctacgccacgctgaggagaatttagtttcatcgaatctctgtatatagtgttgcatcgaactcagtgatactatttacatgcaaaggatattgtcattatggctgtttccccatggttttactgcaaactgtctgctgtgttactactgc

SEQ ID NO: 26381 - DNA, 4949 bp, Oryza sativa
  ref <308>: DATABASE ACCESSION NUMBER: AK101823
  ref <309>: DATABASE ENTRY DATE: 2002-08-28
tggggaacggagactgcagtttccatcctaccccaagaggcggcggacgggggtgccgcggttgggcgaaccagccggcgagggcacgcgagatgatcggtcaagggcggcgagactcggcgactccttcgctcggagcggagggcggcgagtccttcacttcgccggcggcaacccgcctctgcggtgtgaggttcaagtgttcgatgaaatgcctcaccgagtctgggcatggagatagctttgccggtgaggtcactgatatgacgacatgccgatgcagagggagatgcttgctctcattagtttaatcttcgaggagaagatcaaatggtacgctgctgtgatttggttgtgttggttgtttgatgatagtcttagtccttatccaaaatgttcctcccccccctctgattcatgttcatatccaaaccaaatccaataatcacacaaccaccacttgttattaaatttggaacgtgcgctcggtgaatgctaagcaagcgtatggaacctctccatgtagcctgcattgcgtcactcttttagagtgtcttggcttctcttgacatatttaatctttgcgtcatgttatgtcaaagtatcaaacaagctataacgactgccattttgtggttcattgatttgttagcatattaccaaccaaacctcatatcttatgtagcagtttaggtgctttgtggttgccacgtctgacaggaaataaatcatctttgtctgatggagattggtgttagttctttcttagttgtaggacttcttgactgatggcgatttgtttgtccgttgtacagttggcgcgatctgacggttttccctttctgtcccagtaatgtttaattctttatataggatcttacctggggttcacttcttgtagagggagattcacttagttaatatgggccgcatcagtaaactaattgggatgggcatacgtgtgaaacatttcattcaggcagttaggtggctttctaaattgtatggagttctttttttctaccaactttagttaccaggttatccacgataaaactatgttatcctttctatatgtccttgtcctttctgtcattgaattgtgatattgccaaacttactagttgttgccattccttttctttttggaggtcgcttgcaaggtgattttatctgtacttctttagtttgagtcacccttccatgtcatcttgaatatttaacacaaagggttatcacattgttagtttttctaactggtaaatgtctcagcaccttcttagattatgattcctttatcaatcagtaaggtggcttgtatatagtggcagtggaaatgtgaattggatcgtctggattatcataaattgctatggagaatagaataaacaaatagaagtcatgatgccatgtcaatatgtttgttcatcattcgggtcatcaccttatgaacctgaagtctccttttcattgccttgtcatcagctaacactgcaatcaacatatttccctttgtacaatttattatgctggagtccaaatgtagcctattgagaactggaaatgactaggaaactattgcctgcaacgctcttatcctgctatcactttcaaatttagtctattggataccttatatatatgtgcgtgtgtggcctagggaacacaactgcattagcagcagcatctgcatttccatgctcatagttagacatggagggtgctatttttagtgtggctgagggcactgttaggagcctcctgtccaagcttagctcccttctctcccaggagagttggttcgtgcggggtgtccatggtgacatacaatacataaaagatgagctcgagagcatgaatgcattcctccggtacctcactgtgttggaggaccatgacacccaagtgagaatctggatgaagcaggtgagggagattgcctatgatgccgaggactgcattgaccagttcactcatcatcttggtgagtcatcaggaattggtttcctttatcggctaatctatattcttggcaaactatgctgtcgccatcgaatcgccatgcagctacaagagctaaaggcccgtgcacaggatgtcagtgagcggcgttcacgctatgaggtgatgctgccaaagaccacacttcaaggagcaggcccacggcttaccaggcatgcatctcgtcatcttgatccgcagttgcatgctctcttcactgaggaggcacagctggtgggccttgatgaaccaagggataaacttgtccgctgggtaatggaagcggatccttgccggcgtgtgcttgccatagttggttttggcggccttgggaagaccacactggcaaggatggtgtgtgagaacccaatggtgaagggtgctgattttcactgctgtccattgttcattgtgtcacagacattcaatatcaggactctgttccagtacatgataagggaactgatccagcgtccgaacaaggcaatggctgtagcaggaggtaagcacggtcatacaatggacggcaacatggatggaatggaaagatgggaagttgcagtgctggctgaaaaagttaggcagtatttgctagacaaaaggtatattgtcatctttgacgacatatggaccatatcagcttgggagagtatcagatgtgcattgcctgacaataagaagggcagcagagtaattataaccacacggaatgaagatgtggctaacacatgttgttcaggtccccaagatcaggtttacaaaatgcagcgtctatcagatgctgcatcacgagaactattcttcaagaggatatttggttctgcagatatatcatcaaatgaagagttggatgaagtctcgaattccattttgaagaaatgtggaggcttgcctttagcaatagtgagtatcggcagccttgttgcgagcaagacaaataggaccaaggaagagtggcagaagatttgtgacaacttgggctctgaacttgaaactaatcctaccctggaagttgcaaagcaagtgttaaccctgagctataatgatctaccttaccatctgaaggcctgcttcttgtatctaagtatttttcctgaaaattatgtgatcaggagggggcctttggtgaggaggtggatagccgaaggttttgtcaaccaaaggcatggactaagcatggaagaggttgccgaaagttactttgatgaatttgtggccaggagtattgtacaacctgtgaaaattgattggagtggcaaggtgaggacttgcagagttcatgacatgatgctagaagtcatcatctccaagtcgctcgaggagaactttgcatccttcttgtgtgataatggacatccattggtttgccatgataaaatccgtcgtctctccatccataacagtcacaattcggtgcaaagaacaagagtcagcgtatctcatgttcgctcctttacaatgtcagcttccgttgaggaagttccaatgttctttccacagatgcggctgctaagagtactagacttgcaaggttccagctgtctgaacaacagtactctgaactatatctgtaaattttaccagctgaagtatctgacactcagaaagaccaatattggcaaattaccacgactaattggaaatctgaaatacctggagacactggacattagggcaacgcgtatcaagagattaccagccagtgcaagcaacctcagttgtctcaagcatttgttagttgggcacaaggtacaacttacaaggacaaccagcgtgaagtgcttccgaccggactcaggcttggagatgacggctggggtggttaagaacatgatggctctgcaatcacttgcccatatagtggtcaaggagcggccagcggtgctgagtgaaattggccagctccaaaagttacagaaacttaatgtcttgtttcgcggtgtggaagagaactggaacgcattccttcagtctctggtaaaattgactggatctcttcgctcgctctccattcacattctggatgagaaagagcacagctcatcactggaatatctagctcttatcgcagagtcgcctcctctattcatcagaaattttagcctgaaaggcaagttgcagaggcttcctccttggataccatcacttcgaaatgtgtccaggattacttttcgtgacactggactccacgctgaggccattggagttcttggagacctgcccaatctgctctgtctcaagctctaccaaaggtcctacgctgatgaccatatattttttgctcatggtaattttttgaagctcagaatgttggttattgataatatggagaacattcgcaatgtgcacttcgagaagggctcagtccctaaccttgagtggctgacaatagcattcctgcaagaacccaaggatgggattacaggtctggagaatctgctgaagctgaaggagatagagttctttggcgacatcatattatccatggtgactaaagtggcatcctgcatgaaggcacatccaaatcgcccgagagtgataggtgacaaatggaacaatgtgacggagtacgcttaaggagcaagctctaaacaacattgcttctagaggcctgtttggttttggtgttcaggttcagctagctagttgggcaatgcttgtaccttcatctcgaaatataagtatttctagctttgaatctagtcaagcttgtctaggcttaaagccagaaatgcttgcattttgggaagtagtttgcattgcttatttcaagcaatgcagaaagtgtagtgtaaccagctggacagtatgtattgatagtttttcagggtgtgttcctaagaagacaagctgagttggtttgtcaagagtagttgaaagtacaactctgtattgtatttaccttgcttgtaagagcggggaatcctctcgattccattcgtttcttg

SEQ ID NO: 26382 - DNA, 1955 bp, Oryza sativa
  ref <308>: DATABASE ACCESSION NUMBER: AK101824
  ref <309>: DATABASE ENTRY DATE: 2002-08-28
gagtagcattcaccttctccgccctcccccctccgccgcctccgccgctcccccaccttccagaaccttcctttcccgaaatagccacccctaccctaccctaccctacccacccccgccaagatccccgccgccggcgagctcgagcccttggtggtgctccggcgggcgttgtcgcggtcggatcagctgctgctggtgctggtgatgccgctctctctttcttgcgtgtacttccgggtgggaggttgatggcgatggtgaggtgttctttggcgcggttgccctcgcccccactcttatctcctctcctcgcccatgctacctaccttcctcccccgccggagctgctctgctgctcgtactagcgtgggagctgcctcttcttgttgagccatttcttgcctacaaggacagggtgcctcgccgtcgccattgccggcgtcggagccggacaaggaggttcagtgtactgtaccgtggttttgggccttctgagctatggatgatccaatgctgaatgcggtgaaggaggaggagagccacggggacggaggagggttggaggtggtggcgggagaggatggggcggcggcggtggcggcgggggtggcgccgaggccgatggaggggctgcacgacgccgggccgccgccgttcctgaccaagacgtacgacatggtggacgacgccggcaccgacgccgccgtgtcgtggagcgcgacgagcaacagcttcgtggtgtgggatccccacgccttcgccaccgtcttgctccccaggttcttcaagcacaacaacttctccagcttcgtcaggcagctcaacacctatggtttcagaaaggtggatcctgatcggtgggaatttgcaaatgagaattttctgcggggacagagacatcttctcaagaacatcaagcgtagaaaaccaccttcccatactgcttcaaaccagcaatcccttgggccataccttgaggtgggccactttggatatgatgctgagatagaccggctgaagagagacaagcaattattgatggctgaggtggtgaagctaaggcaggagcagcagaatacaaaggcaaatctgaaagccatggaggataggctgcaaggaaccgagcagaggcaacagcagatgatggcattcttggcgcgtgtcatgaaaaatcctgagttcttaaaacaacttatgtcccagaatgagatgagaaaggagctccaagatgccatttcaaagaaaagaaggcgtcgcatagatcagggacctgaagttgacgacgtcggcactagcagtagcatagagcaagagtcaccggccttgtttgatccccaggagtcggtggaattcctcatcgatgggattccctccgatcttgaaaactcagctatggatgctggaggtctggtggagccacaggatttcggtgtcggcgcctccgaacagcagcagatcgggccccagggggagttgaacgacaatttctgggaggagctgctgaacgaagggcttgttggtgaggagaacgacaacccggtcgtcgaggacgacatgaatgtgttgtcggagaagatgggttacctcaactcaaatggcccaacggctggggaatagctaatttcattcaaattataccacattgctgtcagctttcgccatgtgaatttaactgaattttagttgaatttctgcttgctactggcatgcctccctccctgtgttactgaccgtagtgatttgttcgttgttaggccatatagcctgccagtcatgtaaaatgagtaaaggtgttgatgatccacaaatgttctgttccgtgttgtcagatggtctgcctgtatttgtagtcgtgcttagtgtgtgcaatgttgtaatgatatctaatattaatctgtacttctcgtaatgacatctgatcttaatctgattgcagaagtgctttgaattgc

SEQ ID NO: 26383 - DNA, 2184 bp, Oryza sativa
  ref <308>: DATABASE ACCESSION NUMBER: AK101825
  ref <309>: DATABASE ENTRY DATE: 2002-08-28
ggcttcacctcacctgctcattttttatttcccaaattataaaaccttttcttttttgttccccaaagattacgtgctagtaggggcgttaagaaaaaggaaaagaaagagaaggaaaaaaaaaacggagagagaaaaattggagaggcgggcgagttaggggaatttacgtaggagacaagcgaaatccctaaattttctctcctctcctcgcgagttgttttgagtgagtttctgcgagtgctcttgagcttccatctttccgcataaggctttgcaagctttgctctagccttttttttttgttcagattattttcttgcggtttgttcttaagtactcgctagtgtccctaatttcctggtaatttcttggtaatttttggctgcttactttgctcgagctgggatctgtgtttcagtgctcacttgctaaatccgaaccaaattaaaccttggattttaaaactccttccagctatttttccgtttttatttgggaaattgtgggtttaccatttcttcctccgattttcttttccattttctcccctcatttgagcttccttctcacccattccaagaaatcaccatccttccgctgtaaaatcgttgaaaaaaaaattgttccacagctttgagcagcgcggggtttatggtggtttttgcagctctcgtcttcttcctcagctcgccttgaaatttcggtccaagaaatcactgagctgagtgagctgctgagctgagcttctgcgagagaaggtgtgggaatgatggaggtgactcaggtgagggcgtcgtcggagatggcgggaggaagggagccgttcgtgctgcccaagagcccgccggcggcggcgcctgcgccgccgccgccgtcgtccggcggcatgcagagcgtgcgcatggcgtacacggcggacggcacgcccatcttcgctccggtgaactccgccccggccccggccccggcggcgacgtacccgcccgcaggaggcaatggcgcggcggctctcgacgccggcgagccggtggtcaagaagaagcgtggccggccaaggaagtacggccccgacggctccatgtcgctggcattggtgcccgtgtccaccgcggcggtggcggcctccgggcctttctcgccggcggctgccgcgaagtcgccggacgccgtgtcgtcggcgccgccgccgggggcgaagaagagggggcggccaaagggctccacgaacaagaagcacgtgccctctttcggaattggagatatcgggtcagcaggagctggattcacacctcatgttatttttgttaaagctggagaggatgtatctgcaaagatcatgtcattctcccagcatggaactcgtggagtatgcgttctgtcagcaaacggcgccatatcaaatgtgacacttcggcaagctgctacttccggtggaacagtaacatacgagggacgatttgagatactgtcgctgtccggttcattccttctatcagagaatggaggccatcgtagtcgaactggtgggctcagtgtttctctagcaggccctgatggtcgcgtcttgggtggtggagttgctggacttctgacagctgcttcaccagtgcagattgtggtgggaagcttcaacaccgaagggaaaaaggggccaaagctgcaagctccttcagacccaatgtctgcaccgctaaagatggtgccgatgagcgggacggggccaagcagcccgccatcaaggggcacattgagtgaatcatcgggcggcccggggagcccgctgaaccaaggtgtcacggccagcaaccatggccagccagggctacccagcttatcctggaagtgagctcctcctcctcatcatcatcagtgaccagaccttggtcccgtctgaccgccgtagaacttgcgaaaggaaatgtcgtggcggtggtactcgaggtactccggtgcgacgccatggatcctaactagcccccctatctagtgtaatgtctgaacctgaatcagggaagaaaactgtagccgttgcatctctagctagctcttctggtgtaggtgctgttactattggagactagactcaatgtgttatttaggtggttaaattgtttttttatcttccagacaccgatgaaaaagctcattgcttctatgtaactatgttggcatgttgcggtt

SEQ ID NO: 26384 - DNA, 1481 bp, Oryza sativa
  ref <308>: DATABASE ACCESSION NUMBER: AK101826
  ref <309>: DATABASE ENTRY DATE: 2002-08-28
gtttttgacatgcaagcgctgattaacaagatcacgaaatcaatagtctcaccattacccactaaatattctggtgcctttaggggacttattaagagcatgctgcggaaaagtccagagcacagacctagtgctgcacagctactcaagcatccacaacttcagccttatgtgctgcaagtccaattgaaatctagtcctactcgcaacatacttccaatccatcaatctttgactgacaaagttaagaagatgacatttcctagtgacgtggttgattctgcacgcagaagaatggccaggaggaactctctgggaaatgagaggactgtgacatttagcaagccatctccggaacggaattcagttagctctacacggagcatcaaagaatacacaaccacccagagtgtcaaagggctctctgttgacagtagtgaggctggggatgaggttaccagtaaagccatcataacaaagacatcaagcatcctaaggacgcccaagagcttgccagccaagacttatacagctagaaatcagcttgaacctcccaaaacatcgtataacagaacataccgctctgagctgccctcaaaaacaactccaaacaaaattgcccgaccagcaagaagagcatcactcccgctgtcaacatatgaaacacccaccaagcgcagcatcagcattctggaacaactagactcccctgacgtctctgtgaatgcccctcgaatcgacagaattgcggaattcccactggcatcgtctgaggaccccttgctccccatccacaacaagctctctcctggccatggctcatgttccactcctccctttatcaaccggtcaatcaccaaggacaaatgcacgatccaggtgttacgcaccgatggggacaacgggagcgactcctcaggccgcaacgccactgctgcctcgagccgcggatccaatgactccaggcagcagcggttcgacacctcgtcgttccagcagcgtgccgaggcattggaagggctgctggagttcagcgcgcagctgctgcagcaggagaggtatgaggagctgggcattctgctgaagccattcggaccggagaaagcgtctcccagggagacggccatctggctcacaaagagcttcaaggagacggcatcatagcgccaccttgtatcaggcgcgtctaaaatcgccagttttgtcatgtgcaatattagctcaggtagtggtaaacaatatttaggatttgagacttttagctgttgggaggcagcaccatctcagttttctgttaactcaaaatctacttctagctctagctagtttccagttttttactttctattaggaatcagcaatcagcagcaggagttgtagtagtagaactgtaagttaagctgaagatcttgcaagatcttagaacctttgtaatcatgtggcacctgcaatcatgtagtgatataaatgtggggttaagg

SEQ ID NO: 26385 - DNA, 1681 bp, Oryza sativa
  ref <308>: DATABASE ACCESSION NUMBER: AK101827
  ref <309>: DATABASE ENTRY DATE: 2002-08-28
gtgggtcctgcttccgccgtcacttcccaaaacctctcgttccagatttattatcttcacctcgtcgacccgatgcctacgcagccatttccctggtccggcgacaagccttcctcgtagatcgagatccccaaacctacctgtgcggagaggagggcgatttctgtcgtcatcgctggattccactcgccgtctccgtcgccctgattccactcactcgccaccgcactttttctggagccacttcgtccatttgagcgaggcttgtaggttttctgccattattgagcttttccatggccactgcaaacaatccaggtccccttgacttggttccaggtttttcacctgaagacatggacaaccccattcataatgctgccttatcctacgtgtcatatgatagatatgtgttagatacctctgaagtgtattttgatgattgcatcccattggagtcttatctgaatattagaccaatggtgacttctgattcgtatcagtttcgttcatttggggaaactaatccaagtgtgacttatctggttgcaacagagtcatgtaagaaagtaatcagaactatgctgaaaggactaaggacaaatgagttgagaaatttgtgttttttggatttaaacatttcaaacatctttgtgagtcccacgggaaaagttaagttcaagaacatttcacgtgtatagttagagatggaccttctaagaaacaactatttgtgtgctcatcagattatcaggaatctctttctatctgaagacggaagtgtgcctgaagatatacagcacctgctaaacttgatccttcatgagtttgacaagagagagatatttcattttcatgggtcattggtatccctagctaatgtgtcactgtttttcaagtcaatgtatgaccatatcagatttgtgatgccaccagatgatcttagggctatcctaacaaaccttccatatgccgatgtttgggagagtaaagtcaagaccaaccgtatcctcaaaaagccttatgatttcaaccctgacggccgtattgtaccagctgacaaaccatctcagacatgcctcaacaaacgtcagagggaattcttacatgcactgggtctaactcctattcgaggacagaaatcgcttacccctgatcagatcgccttaattgaaactctgttcttctttgattttctgagaaataggacatctcacaggatggatccatggaggagcctgattttgggctataatgctgtggactcagagtatgcatgtcatgtccggttcccattggttgtcccgtatctgcagttggagctgtataacaggggtcaactgcaggcacttcagttgggacatttattctaacttctaagctatccaagttcctcaatttatgagcggaagtccttatcaagccattgctggacatgatgcaacttcaatgcaagaagattggctggctagggcctaacttttggttaattttgcttctgttctagtttccttcctgaacccctagaggttgatgatgtcccagggtgtatgtatcccctgtgtttttgtcgctgtaaaactacacatgcttgaatttctgtcagcagaaaaaagctacatctgactgcagttgacagttttatttcatgtttatgggacgcaactccattattgctgtt

SEQ ID NO: 26386 - DNA, 2862 bp, Oryza sativa
  ref <308>: DATABASE ACCESSION NUMBER: AK101828
  ref <309>: DATABASE ENTRY DATE: 2002-08-28
ggctcccctcgcctacccacagctgttcacatcactcccgctcctcgagaacaccactccctcctactagtagcttctctctctctctcttcttcttcctcgctttgcttgggttgggttggagcggtgagacgagagattgaggggaggagaggagaggacagcagctgcccctcgattcgattcttgagtgatcatcttgggcttgggcgttggcgccaatgctcgcgcggtggctgctcgtgctgctcctcttgctgcctgtttcttggtgtcatcaagatcggcatggccgccgccattacccgcggcggtggaggagcagcggcagtaggagggagctgcacgagccgctgttccctctcgagaacgcgcccgcgctgccaccgccgccgccgccgccaccggcgccgttctttccgttcttgcctgactccgccccgccgcagctgccaccgccggtgaccacgcccgctcccgccggtggcgccggagatggtggtacggacgcaggcgccgccgctaccggggacgcgtcttcgtcttcgtcctcgtcggcgtcgccgcaccccacggcgccggcgaacatctcgtacatggccatgcccatctaccactccgcgccgctccgctccttcctgtcgtcgcaccgcctcctcaccgtcctcctcccggtcgccgccgtcctcgccgccgtgctagccgcggcgctcgtctacctcctcacgcgacgccgccgctgctccaagggggagccgcacgcggcgcatacgaaggccgtgctgctttccccggggaactccacggcgctctacgacggcgaccacgaccagcatggccgggggtccaccgccaccgcagcctccagcgccagctcgccggaactccggccgatgccgcctctaccccggcagttccagcagacgaggacgagcatgccgtcaacttcgcaaaccatccatgaagccggagcagaggacaagcgagcgccgccaccgcagagtgttcgaccgccgccgccaccaccaccacctcctcctccgccgccaatgccgccgagaacggacaacgcgagcacgcaagcagcgcccgcgcctcccccgccattgccgcgagccggcaacggcagcggctggctgccacggcggtacacggagcgcgccgcgccgacggtgatcagggcctcggcgggggcagtccacccggaggagtcgccggcgcgcgcctcgccggaggagaaggccgccgacgcggccgctcggccgaagctgaagccgctgcactgggacaaggtgcggccggcgagctccggccggccgacggtgtgggaccagctgaaggcgagctcattccgagtgaacgaagagatgatcgagacgctcttcgtctccaactcgacgaggagagcatccaagaatggagtcaaggaggcaaatgcagcttgctgcaaccaggagaacaaggtgctggacccgaagaaatcgcagaacatcgcgatcatgctgagggcgctcgacgcgacgaaggaggaagtctgcaaggctctcctggatggccaggcagagagccttggaactgagctgctggagacacttctaaagatggctcctagcagagaagaggaaatcaagctgaaggaattcagggaggatgccgtatctaagctcggccctgccgaaagcttcctcaaggcggtgcttgcgataccatttgcgttcaagagggtcgaagcaatgctctacatcgccaacttcgattcggaggttgactacctcaagacctccttcaaaactcttgaggcagcatgtgaagagctgaggggcagcaggttgttccacaagatcttagatgcagtgctgaagaccggtaaccgcatgaacactggcaccaaccgcggaaatgcaagcgccttcaagcttgatgccctcctcaagttagtcgacgtaaagggtgcagatggcaagacaacccttctgcattttgttatcgaagagattgtcaagtccgaaggtgccagcatcttggccactggccaaacatccaaccaggggagtgccattgcagatgatttccagtgcaagaaggttggcctcagaattgttgctagccttggtggtgagctcggcaatgtcaagaaggcagctggaatggactcagacacactggccagctgcgttgccaagctttctgctggtgttagcaagatcagtgaggccctgcagctgaaccagcagctcggttccgatgatcattgcaagagattccgcgcctcaatcggtgagttcctgcagaaggccgaagctgagatcaccgcagtgcaggctcaggagagcctcgccctctccctcgtcagggagacgaccgagttcttccacggtgactcggtgaaggaggaagggcaccctctgagaatcttcatggtggtgcgcgacttcctcaccgttcttgatcatgtctgcaaggatgtcggcaggatgaacgaaagaacagcgattggatcttcgctccggctggagaatgcacctgttcttgcgaggttcaacgcagtccaacccagtagctccgaggaggagagctcatcgtcctagccgttggagcctgcatgttattgtctgaagaaaagcaatgcaggctaggactttagaatcacataagtattttgtaactgtagcagataagtgtagatcaaagtctatatgtactagtacatgattcagcatgctaagcatcatcccagccaatggcctaccaaaggtgaaagtggcattgtacatgattcagcatgctaagaatcactagacaggagcttttgtgatcatgctgaatgcttgaatctcgtgataaaagtaaagtactcctagc

SEQ ID NO: 26387 - DNA, 1095 bp, Oryza sativa
  ref <308>: DATABASE ACCESSION NUMBER: AK101829
  ref <309>: DATABASE ENTRY DATE: 2002-08-28
gaattttctcccctcgcgccgccgccgcgttcacctcggtcgtgccggccgcctccttctcgctccgccgccgccgcgctcgctgctctctctccctcccatctcgcccttagtccgccgcgtccgcctccttctctctcctcgctgctctctctctctctctctctctctctctctcccatcttgcccttgcttgctgctggagctcgaagcccacgccattttcgcggccgcgggggaaccctagccctagccgcgccagtgcgtgcgtgcgagcgagcgccgccgatccgatccgatccgcttcgccgccctatgtgccgaggccgttcgaggtaggtgtccctccaacttctacctcagcgcccctctccgtcgcatccagggactccgccgccgccgcctccgatcccagcatcctcgaatccgatggtaaatgcaagaagccaaagggtaagcacaaggttgtactattgggcttttcgcgcatcaagagatttcactctgtggcataccttcagcaaatatggtgctttgaagtggttggagagatcgatttcagcttccgtgtgttaacctacagcttatacttcaggattcatctcgggaggttctacaagcgatttggacgccgagcttgcagcactgagcatgtccatggttgggaccagaagcctgttcgcttccagctctccacctctgatgggcagcactcattatctcagtgctccctgggtgagcccgggagctgggtactttaccatgctggcaattttgtggtctcaaagcctgaccaaacaatcaagctgaagttctcgatggcttagattgattgcacacacacaaaaggtgggtctttgtgtcgactcggcgttcatatacccaaagggctttcagcaggagaggatggtgaggtctcagaaatgtagatgctgacaaggaacttacattagattgtagacaaatgcagcttgcagcctaattctatttttaatctgggctcatgtagacaaaggtgtatataattgtaggcttcaattttgtgtgatcggtaacatggatgttctcatataattagtgtctccttgattgtgc

SEQ ID NO: 26388 - DNA, 2539 bp, Oryza sativa
  ref <308>: DATABASE ACCESSION NUMBER: AK101830
  ref <309>: DATABASE ENTRY DATE: 2002-08-28
gaccgttactcgcactctcccccactttgatctgacaaaaatcccaatcccctaggccggactcgccggaaccctagcccgccgccgccgccgccatgccgccccgccggtacaaggggagggggagggggagggggagggggagagggagggggaaggggaggggcagagccgccgacgcgacgcccgtagaggaggtcgacgtggagggcgccaagtctgaagaggaggaggaggaggaggcggccgcggggagcgggggtgatacggaggcggaggacgctaaggaggagggggcgtcggagagtgagggcgaggctatggatgtggaggccaaggagagcgccgacgagaaggaggaggaggaggcagaggcggaggcggacggggatgagggtgaggataagagcgatgagatggacgccgaagcgggtgcagcggaggaggaggcgaaggaggaggaggagttgaaggatgctgaggtcgaaggggaaggcgcggggagtgactccgagcgcggcgaagcagaggaggcggacggggagaacgaggaggaagccgccgcgacggacggcgagaaggaagaggaagccgccgagaccgacggcgaggaggaggcggaggaggaagccgctgagaccgccggcgaaaatgaagacgaaggcgcggaatccgatcccgaaggtgaggcctccgacgccgaggagaatgcttcggaggaatcccctccgtcccctccgacccgcggacgccgccgcaagcgcgcggctacctccgaccctcctcctgaggatgacgaagaggaggggacccctgcgcagccgcgccgccgcaagcgcgcggctacttccgaccctcctcctgaggatgacgaagaggaggggacccctgcaccacctcgccgccggcgccggcggaaggcgggggaccgcggcgactctccccctcctctgcccgaccacctccggtgccgccgcagtgatgggaagaagtggcgctgccaaaaccgagcgctccccaccgttagcttctgtgagtatcactactcgagggccaacaagggcaaaaagccaccggcggacggagaggtccttgctgttgctctccagcggcagaagaagaacaagaggaagggtagaaggaatgtgaatgcatcaccagcatcacctccggcagccactagcgacgtgactagggatctcccgaatggactgatgaggatctctccagggagcagcgagcctgccgcatcgctgccatcgccagtgacaacaaaagttggagtggatattcctgttccgacgcagcgctgctaccgctcgaagaatgctgagccgatgcctgttggccctgttaaggttgttcctcgtgcaatgggtatgtcaaaggcagggcaaaagacgtgtcaccgctgcgggatgaagaaggccgctcgtattgtccagtgcaaaaactgtgacaataggtacttctgcaacagctgcatcaacaaatggtattctgggttgtccaagaaggatattaagacgcgctgcccagtttgccgtggttcatgtggttgtaaacaatgcacccttggtcagactaagggtgccattagtaaggaatcatcaggtgatcaagacaagctgataagtataaagatttgcaatcatcaattgtacaagcttttacctgtagaactgaaccaggagcagcttgatgaattagaaatagaagctaaaatacaagaaacaaaaatatcagatgtccgagtccaggtagctgatgagcaaagcggatcactcgactgcaataactgtaagctctccgtgcaccgattcctgagaagctgcccaagatgtccttttaagctgtgcttaagttgctgtcagaagatacgtgacgggaatatctcagccgccacccctgaagacaaatttaaccaacggttgcttcagcaagagtcagcccatgaggatggcagcattagttgcccttccatcgagttaggtggttgtggcgactccttgctaaacctggtgtatgtgcccccatctgaccaatctgaagaagtcagttcaggagacgagctagatggtccgggcaatcattctggagttaaagatgctgttgctgagagtaatggaggccctgacagattatccgttggccagcaggagaccgtttcctcataactacaactgccgatgttgctgatgtccctttcatctttgaggtgagtgtgagagtgtcataactgtggagacgctgagagtaatgagcatggaatgttcattctaagggctggaaaggtgaggggtgtgctccggattcgttagacggtagattgcctgatttagcgtgattatcggcccatatcggccattgattttaggtctgtgacctgtggatattctccgagtaattttttccgtacctgttaaatccttggtttggacatggtgtacataggcctaggtctttgtttacccctccttagttaaaatctggttggagcttgcattggctgtactgctgtcattttggttgttggatg

SEQ ID NO: 26389 - DNA, 1717 bp, Oryza sativa
  ref <308>: DATABASE ACCESSION NUMBER: AK101831
  ref <309>: DATABASE ENTRY DATE: 2002-08-28
ggaagctgcagccaccggagaagccatggcgccgccgacggcgaggtctctgctcgcctcccacgccgccgtccgagccgcggcctccgctcgcaggggccgcctcgccggcgaccaccacccgccgcaggtcgcggccctccggcgcggggactgggtcaagctcatctgcggcgccagcttcgaggatgctgccgatgtcaggaatctctcccttgtatacacgcttgccggagtggattgcattgattgtgcagcagacgcatctgtggtgggtgcagtgaatgaaggtattgatgtagcagcctcaattgtgccagcagttcaaaggccatgggtgatggttagtgttaatgacgattgcagagatcttcatttccgtaaagctgaatttgatcctgaggattgcccaccagattgctcaaagccatgtgagaaagtctgtcctgctgatgcaatattgttagagagggttatgattgaggaagagcactctcagtctgatccttcatgtggaaaacttgagggtggtgtaattacggagcggtgctacggctgtggacgatgcttgtcggtttgcccttatgacagaataaaagctacaagccttgcttgaaaacatttcaggagctatgtcgtatgttcgagatcctgctatgactgctgaactgttgaaaaggaatgatgttgatgcaatagagatacataccactggaaagggaactgatatgttcaataccctctggagcaacttgggtgagtcaatcaataatgtgaagctgattgcagtcagcctgcctgatgttggcgattcaacagttaatttaatgaatgcaatatacacaacaatgcagtcccatcttcaaggctataatctttggcagttagatggccggccgatgagtggcgacataggccgaggtgcaacgagggaaacagtatcctttgctgttcatttgtcttcaatgtcaaataggcctcctggcttctatcagttggctggtggcaccaactcatacaccatagaatccctaaagaaagctggtcttttccaatctacaacttttcctggggcagcaacctctggagtgactgattgtcagcaagcctttattggagggatagcttatggcggctatgctcgcaagattgttggaagagttctacgcaaaataccggcacaatttggccatgcacgcattgaggaccacccagattatctcctggaagcattacaagaagctctatcactagtcgggcctgtgaaaggttacccaaccttgccaagtctctgaaactagtaaatggcatctccaagttctcatccagatataggataactttgatccagttagttagtatggaagttgcattgtgaaggtaagccaaggtgagaaggtattctgccaactgattgcccaatgaacagtttgggagttgggaccaaccatttctggctaagtggcaaaaatcagtaatccaacagtcagcagatcaatcactaacttactcttaagcttggtaagtaggagatattccatctgagattggatgtcacaacatgctttccataaagtccatgtaaaactccataagaaaggtgtaaaaatccatttgttgtttgcatgtacaccttgaatattctatatagttcagtggacaacgaaggttttgacgtggacatgtactatagaataaaataattcaactttgttgc

SEQ ID NO: 26390 - DNA, 3478 bp, Oryza sativa
  ref <308>: DATABASE ACCESSION NUMBER: AK101832
  ref <309>: DATABASE ENTRY DATE: 2002-08-28
gtgggaggaaaaaccctagtactcaaaattccattccacaaactccctcccttctctgccgccaagaacgccgcctccgcctcatccgccgccgccgcctcccctccaccagcgccagccaccgcctccattcccccactaccgccgccgccgccgccgcttcccatccctgcaaattacatcgcccctctcgaccgttgtacggcgcgctgtccagatccgccgcccagcctccagatctgccgccacgtgcccctgcccctgccccgctacaagatccggcggcacgcactctctccctgcaagatccggcaaggacatcgagggactcttcatcttagttttgcggtcagcacttttgagaggaaccagatgggactctagttttgttgtagagaggaatcctttactttttgatagagaaggttatatgaaactttttgacatttacaattgccaagttgatttcgatacaagtttgaatctgtagtctgctacttgaaagtgacaatgcctggtgctgcttgcaaaaagactaacctgatttctcctaggcgatctcctaggctcaagaatatccatgttatatatggtgaacattctgaaacgaactatcctaccttggggcctgtcaaaactgaggtcatcgatcttgaagaaattgcatctccttccaacccagaatttaatgatgattctgttggtgacgaagactttcagaatgtgtctctgaaggatttaagagctcagtgtaaagctaagaacaggagggccttgaaagttgattctgaaagacctgactttaagaatcagagacaatgtggaaagagaaaccttgaagatgaagtaccaaaagaggaagttgatcttgatgagcccattattgcattcagacagaagcggcagaagacatcccctaccaaatcaaacagaacaatgggcaaaccaatatctctaaatgctgtaaaactgcaagatacaacattgaggagagaggagactgagcctataaaattacccccacttgaggtaacatcacatgactctatgtcaactgcagagaagatggaaaggagtgctgcagatgtaaaacactccacaattgctgctggtaatactgaagaaatagttggggagaacattttatatgctgaaatggaaaacacaccattatcaactggtgctgtaataagtggtagaagcccagacatattttgcgaaatcaagactgaggatgaggatatttactctgatgagcaagttggagtatctagtccaggaaaggactcctttcaggactcatttgctgagttgcatagggagccaatagagtatgatggatgtcaacaacacagtggtgtcatccctcaaccgattgaactagaggatgtttctgatgattcctgtgagctagctaacagtatcaaagcatactgtttggatgacattatactgcaaaacaagacaaatgacagtctttcttcattggatatcactgatgaaatgagcaactgccataaaacatcaggcaatataacaaatttagatgaagacaagtcttcagttgtcaatgattatttggtatgttctgttaatatgtcttgtgaagatcatatagacattgatgaatactggtatccacgagatctacatggcagtacactggaaagcacaaagactatagaaagttctactgatcagtgtaacgcagaggtggggtctccatccgtggtcatccaatctgatttatgtggaagtgcagaaagcaacttcacgtcgcttgcagaggttgtgcagatgaaggcagatggtcaatttgattcactagttcagcacagtgttggaacaaaggatgtattacctattgatgttggacatgcaactatcgattgcacttttgcttttaacaagactcttgactcagtgaaagctgccaattttaccacacaagatggacggctagaaagtatagtatatgatgctctgaataatcatgcacagaggaagagtactgaaactgaaactcctgttggtgtctcaggtgctgccatcatttcaagcccattcgtaagtgagggcactgacagagaacccactggatccaaagctccacatggtggtcagctcttacttccttgtgttacagagtggttatcaaaggatacagatcagttaaaggttacagtggatgatgacatctgtaaaactaacagtgatcaaggatcaagagaacaatttggccttcagccgcagttattacaatcttgttctgacttggacaaagtttgtgtaacatcagagagctcgagtcctgaagaaccacaggaaatgcctgctgggtctttggattcaactgcagcctctctcgatactgatggacaaagtgaaaagttacaacctttcattgatgaaggagctcttgaagagcatgctccaaaaaaactgctgtccaagagaaagattatgtccccgacttctcaggagaagctttgcagtgctttgactggtattgatttgtgcggggtccaaaggctcaagagaaagatccttcttgaagattgtggcaagacgaggagacccaatggcaggagttccctctcccctacaagcaaaggaattctgaagggaacagaatccccatccccccaaaagactacttgtacttgcatgaaagctgcttcagttatattggacgccgagaaggctgttgagttttcacaaaggcaaatgcatgatatagaaaacattgcatccaaacttatgagaagcttgaatcacatgagaagtatagtagacggaaatttgttatcagaatcacattctttgctacctactttcaacactgctgagatcagagcagcctctgaggatgcattagaggtggagagaactacaaggaaatggttgacaataatgaacaaagattgcaatcgcttttgtaaaatactgagattagcagggaagaaggctgtttctcattctgaagttccaagaaaacgaaagaagataacatttgccgatgaaactggaggaaagctctgtcatgttaagatgtttactgatggacaaaactctcttctttctgaatgccatagcgagtaacatcatttctactagttgctatcacggacattgatgataacaatgtaagctttctgataaacaagagatcaaacaagctgctcgcaatcggattgtagtggaaggagaatgcttccgttcattgtaagatgtagatgcaacaaaaaactagtgtttgttagctgtaaagccttggaatttactgggattaggctgacaacattgccagcgcgatattgttttcctgtcctatttgtttggatgcaaaaggtcatgtaattcatgtaaagcagcttgggaattgtttgatttgaaggtcacattgtaatctgtaaacaagaattgacctgctgtaatgattattgttgtcctcttattccatgacatattttcaggg

SEQ ID NO: 26391 - DNA, 1754 bp, Oryza sativa
  ref <308>: DATABASE ACCESSION NUMBER: AK101833
  ref <309>: DATABASE ENTRY DATE: 2002-08-28
gagacggaggcctgttttgtccactgcacacttcaccattccattccatggcgccgccgctcctcgatctcccctcgcactgcctcctccctcgccttcgccgccccacctccggccgtctcctccttcacctccgcctcaaacctctctcctcctcctcctacaccaccaccaccaccaccaccaccagtagctccacctcctcctcgcgagcgcctcaagttccacctagtctccatggcccctcgctccgccgcggccgccgcctgcccggcgaaactgacggcctgctctccttcgcccgcatcttcgatctcgccgccctccgcgtcccggccgccgcctgtgcgcccctcgagcgtcgcctccgtggccacctcctcaactggcctcgcgtgcgcaacgtcgtccgccaacccggcgacgacggcggcctcctcttccccgttccccatccaagcctcgccactccctcctccctgccaactgcggtggctcgccgagagaagctggcccgcgagttcaacgcccgaggcttcgtgcaattccccaaccttgccaagatgtcgcggccccccgcgaggaaacggaaggggaagaaggatgaaggaggcggcgaggctgcggctacggcaagggatactaaagacaaagtatatgtggtggaggtgatcggagagagaaaagaggagcacggcgacgagtggatggggttggtcggggaggaggggttcgggaggatcacgtggagaggaggtcccacccggttgctgctcctggacgagaactatgccaacaagagggttgatgacctcccggaggctgtcaaggttgtgttggaccatgaaactaacaaggatggatcttcatcctacgagcttgtgcaatgccaattgaccttgttctacaattactggccaatgaatgaggtaacactgcctttgcaaataccggatacagaccaaaagttcagtctgtacagattttagaggaaatactcccagaaggaataatcgttcctacagggtttgagacagtagggcatattgcacacttgaacttgagggatgaccatttaccttacaagaagcttattgctcaggtggtactggacaaaaacaagccaaagatccaaactgttgtcaataagattgatgctattcaaaatgactacagaacaatgcagcttgaagtcttagctggtattgattcccttgtaactacggttattgaaagtggtcttcggttccaagttgatctttcaacagtgtatgttctatcctctcttggctcatatttgtcacacaacatttctgatttattgtgattgcaaaataacaaaacaaaatgatttcattatttgcaggataaaatccttacctacatatttgtagtttgtggttgtgctatgtctataaagaattctattgtttgcacttgaaccatagtttaattgctatcattaacctcttttccagtaacaaatcttcaccaaaagatttccctagtgtttcttattctatacatgtaataaagatatagtcaaatctcaattcaacattcacattcttaagatggctttgtaatagaaaattttgaaaatttttagttgaatgttttgaaaagttcataataggactattgctttttatgaataggtgtatgggaataaatggtccctcgtgtaatccataagattagctactgtgctatatgatctctttttctcaatctagggttgcttttttttgacg

SEQ ID NO: 26392 - DNA, 1400 bp, Oryza sativa
  ref <308>: DATABASE ACCESSION NUMBER: AK101834
  ref <309>: DATABASE ENTRY DATE: 2002-08-28
gaccgtccctatcgcgtcggatcgccacccacctcgccgccgctgcttgcttcactcgcctcagatccgcgccgccgccccccgcgaatcccctctcctccccgaaccctagccccgctctcgggggttccccctcctcctccgccgccagccgcgtccgccacttccatcggaggtgatcgatcgagcgggggtggggggagaggttgggcggcttggattggagagggctcggagtggatgtcgaggaggtcggtgaatccgagccggcgggtggcggatgggggattgccgtctgtcggtggcctgcttcaccccaagtcacgctcgccgcccgtgctcaccatcgccctcgtggtcctgggtgtcattattctgatcgcctacttcaatagcggctcaggtgtaacagttactagcagagaagctgtgagcaggtctgaaggttcttgtacaccagaagtcatgcaagcacttccttatcttaaaaaggcatatggcaatgagttgcataaggttctccatgttggccctgatagttgtacagtagtttctaacttgttgaaggaagggaaggttgaagcatggggagtggagccttatgatttggaggatactgatagtagctgcaaaagccttgtgcgcaagggctttgttcgtatggctgatatcaagttccctcttccataccgccaagattcctttaaccttgttatcgtatcagatgctttggattatttgaccccaagatatctgaacaaaacacttccagatttagcaaggatttctacagatggtcttgttatctttgccggcaatccaggtcaacagaaggctaaggtttctgaactaccaaaattcggaagaccggcaaagttgcggagttcttcgtggtggtcgcgatactttatccagactggcttgagagagaatgaagggccattgaagaagtttgagcaggctgcttccaagaacaaatacaaaccagactgtcaaatcttccatcttagctcgtaggcgtgttctgatctaggtgatgtgtatccatgaaacctggatcgttgcctcgccggttttgtaagcaatatcctgtttacccccgttgacttgcgcttcttttacacggaggaattgtcacattaagagccagccagccttgagcataggtagcttatgtagagagatttgccacatgctgctagaaaattcttcctggaaagttaaattatgtgttaccaagaggtgcaaattgaagccctgaggatatatatgtaagaacttcacactgttgtaccctgttattcttcttggtgttacagttattcctggtgaaccagctgcagttccgtgagcagtttgtaatgtactcagttcaagagagagagaaaaaatatatatct

SEQ ID NO: 26393 - DNA, 974 bp, Oryza sativa
  ref <308>: DATABASE ACCESSION NUMBER: AK101835
  ref <309>: DATABASE ENTRY DATE: 2002-08-28
ttgctcctccggtgagggatttcgttggggtgttgaaggcgtcttttgatcggactggtctgcctgctctgattgcagaggtcaagaaggcttcaccgagccgcggtgtcctgagggaggacttcgagccggttcagatcgcccaaacatatgagaaaaatggagcagcatgcttaagtgttctcacagatgcaaaatactttcagggaagttttgactatttggatgctatacgcaatgctggagtacagtgtcctctgctgtgcaaagagttcattgttgatgcctggcaactttactatgcgcgtttgaagggagcagatgctgttcttctgattgctgctgtcttacctgatcttgatatcaagtatatgttgaaaatatgcaaaatacttggcatggctgctttagttgaggtgcatgatgaaagggaaatggaccgtgtgttagggatagatggtgtccagctcatcggcatcaataaccgtaacctcgagacttttcaagttgatatttcaaacactaaaaatcttcttgagggtgaaagaggacaaactatagctcagaaaggcataattgttgtaggggaatcagggctgttcacaccagaccatatttcattcgttcagaatgctggggttaaagctgttctcgttggggagtctctcatcaagcaggaggatcctggcaaagcaatcgctgggcttttcggcaaagacatctcacctgtgagtgctgcgtaaagtctaaagacaaacagagtggcagagaggctgagaaatgatggagcacatcatcatattgtacagggagagatggagcaattagcttttctggagagtttttggtcagccattttttgtttactaaactcgatcagttcttcccatatactcttgtgaccaaaccttttcgaccaatacaaatggttcactgcaaagaaatatatgatcgaataagttggatttaattgc

SEQ ID NO: 26394 - DNA, 1688 bp, Oryza sativa
  ref <308>: DATABASE ACCESSION NUMBER: AK101836
  ref <309>: DATABASE ENTRY DATE: 2002-08-28
gtgagagacagagaaacgcaagcctctagtctgctaaggtgggcgtcgccatcgggagaactcaggccacaagaattcctcctctccgaaaactctcccctctctctgctgctgtggccgcatcatctcctcctcatcttcttctccacagcctccagctaggccatggcgtccaccgtctccttctccccggccaacgtgcagatgctccagggcaggagctgccacggccacgcggcgttcgggggctgctccgccgtgccaagaaccgggccaaggatgcgttccgtggccgtgagggtcagcagcgagcaggaggcggcgccggcggtcagggcgccgtcggggaggaccatcgaggagtgcgaggccgacgccgtggccgtgagattcccggctcccccgccgttggtcagacccaaggctcccgaaggaacacctcagatcaggcctcttgacttgacaaagcgccctcgtcgcaaccgcaggtcgcctgctcttagggccgcattccaggagaccaccatctcacctgccaatttggtgctcccgctgttcatccatgaaggggaagatgatgctcctattggagctatgcctgggtgctataggcttggttggaggcatgggcttcttgatgaggtctacaagtctcgtgatgttggtgttaacagttttgtgctgtttccaaaagttcctgatgcattgaagtctcaatctggagatgaggcatacaatgataatggtttggttccacggactattcgcctgctcaaggataaattccctgacattgttgtctacacggatgttgctctggacccttattcatctgatggtcatgatggcattgtcagggaagatggagtaattatgaatgatgaaacagtttatcaactgtgcaagcaggctgtttcacaggcacgtgctggtgctgatgtagttagccctagtgacatgatggatggccgtgttggagcaatacgtgctgctttggatgctgagggtttccatgatgtctccattatgtcctatactgcaaagtacgccagttcgttttatggcccattccgagaagctttggattcaaatccaagatttggggacaagaagacttaccagatgaacccagctaactacagagaagcgcttctagaaactgctgcagatgaggcagaaggagctgatattcttctggtaaaacctggattgccatacttggatgtcatccgtcttcttagggacaattcagcattgccaatcgctgcatatcaggtctctggagagtactccatgatcaaagctggaggagcactgaacatgatcgacgaagagaaggtgatgatggagtcgctcatgtgcctgaggcgagccggcgctgacatcatcctgacgtatttcgcgcgtcaggccgccaacgtgctgtgcggcatgcgatccaactagcaggtcaactctgaatctgaaaaaagctgagcagctaaaacccagccatctctgaaacttttgcatgtccccaggtcatcatcatgtgaggctcgttttgcactctatagagagcatttgtgtagtcagtaattagtgctagctttgcaaatatcattctggaataatgttttttgtatgacagtgcctctaattggtgtgtaatttgcggtgaggaaataatataatctgcaattctgtgc

SEQ ID NO: 26395 - DNA, 1581 bp, Oryza sativa
  ref <308>: DATABASE ACCESSION NUMBER: AK101837
  ref <309>: DATABASE ENTRY DATE: 2002-08-28
gctcctggcggcctagtattttgcaagagcagagtgagagtaggagagcttgagttgaggccttgtgggtttgcacacagaacagcttgggaaaatgtcacagtgcccaactcatgtcgctctccggttgcttgctctgctcttcctgcttccagctgcgtggtccgcgacgttcacgatgaccaacaattgcggctacacggtgtggcctgggctgctgtcgggtgccggcacggcgccgctgtcgacgacagggttcgcgctggcgcacggcgcgtcggcgacggtggacgcgccggcgagctggtcggggcgcatgtgggcgcgcacgctctgcgccgaggacgcgacaggcaagttcacctgcgccacgggggactgtggctcgggtggcatccagtgcaacggcggtggcgcggcgccgcccgccacgctcatggagttcacgctcgacggctccggcggcatggacttcttcgacgtgagcctcgtcgacgggtataacctgcccatgatcatcgtgccgcagggcgggggcgccgcagcgccggccggaagtggcggcggcagcggcggcaagtgcatggccacgggctgcctcgtcgacctaaacggcgcgtgcccggccgacctgagggtcatggcggcgagcaccggcaccggcgccgccgctcccggcggggggcccgtggcttgccgcagcgcgtgcgaggcgttcgggtcgccgcagtactgctgcagcggcgcgtacgggaacccgaacacctgccggccgtcgacctactcccagttcttcaagaacgcgtgccctcgcgcctacagctacgcgtacgacgactccacctccacattcacctgcaccgccggcaccaactacgtcatcaccttctgcccaagcaccaccagcgggaagtactccggcggtgagaacccgcaggcggccggcgtgccgtccaccaacgacacgatggtcgtcctcggcgccgagcagctctccaccgcctcgtccgccgccgcccatgctgcgccgcagctcacgctaccactactaccactcgtcgtcgtcgccgccctcgttgccgccatgatctaggccggccggtacaccgtacacgtacaaaggtggcaatcaccaccatgcctactcctctcgccgctgtacgtgccgcggggcccaccagcggctaatcctgctccggaggtgtcctaatccggcccgtctcttgtggcgtgaccgaggcagagataagattctccgaacagagcacgaggaaaggttggacagtgctacgacgactgaaaaccgatcgagaagggagaaaacaagagttgtatccacaccgatcgcagctttcttctcgattagtttatgtcataggcttagagattacagagtggtagttagtgatgtactgttggttttagtcttctcttttcctacgcttccttgagttgttgagcggaaacgaatagatgatgtatttactcgatcaccgtttgttcgtcgcgatcacggatgattgcggcggcgactttgatcagctgggaaaagaaagggcacggccatatttcgttcgttgc

SEQ ID NO: 26396 - DNA, 2558 bp, Oryza sativa
  ref <308>: DATABASE ACCESSION NUMBER: AK101838
  ref <309>: DATABASE ENTRY DATE: 2002-08-28
gattaatctctcctcttccaaatcccctctcctcccccccaaatctgcaccaccgccgcgccgcaatggcgtctcctccccacctccccctcctcctcctcctcctcgtcgtcgtctgcaatgccgccggcggcgacggtgccagggtgaacccgttcacggcgaaggcggcgttcatccggtactggaaccggcgggtgcccaacaaccgcccccacccggccttcttcgtcgccaagctctccccgctccaggccgccgacgccgcctccttcgcagccgcgctcccgcggcttctcccgccgctctgcgccagggccgccctgctctgcccctccgcctccgacaccgagacggccgcctccctcgccgtcggcggcggcggaggtggtgggccgtttaaggggtatagtaatgccaacttcaccaactacggcagcggcggcgtgggcggcgccgacgggttcagcgcctactcccccgacctcaacgtcgtcggcgactcgttccggcggtacggccgcgactcgacgcggagggtggacacgttcgccagctacgaggcggaggggaacgtggtcaccgccaacttcacctcctacgccggcgccgccacgggcgggtcgggctcattctccgcctacgccgccgacaccaacgtgccggactccaccttcaccaactacgacgccgaggccaacggccgccgccgcgagttcacctcctactcccaggaggccaaccacgggtcgaacaccttcgccggctacggcaagaacggcaacggcctcagggagaccttcaccacctacggcaacgactccaacgtcatcgcctccggcttcaccaactacggcgagtccggcaacggcgccaccgacaccttcaccgcctacggcaaagaggggaacgtccccgacaacaccttccggagctacggcgccggcggcaatgccggcgtcgacaccttcaagggctaccgctccgagtccaatgtcggcgacgacagcttcgcctcctacgccaagggcgccaacggcaacgccgccgagttccagaactatggcggctcattcaaccccggcaccgtcaccttcaaaggctacggcgaagggagcaaccccaatcaccacattggcttcaaggagtatgccgggagcaacaattcattcaaggggtatgccaagtccggcgtcgatttcaaggagtaccacaacacgtcgtcggcagacgcggcgacgacgatgtcattggaggcggtgtcgtccggccaccagcatttgaagtggtcgccggagccagggaagttctttagggagacggagctggtgtccgggaacacaatgccgatgcctgacatcaaggacaagatgccacccagggcattcctaccaagggacattgccaagaagataccattcaagccgaatgcggtgtcggaggtgttcggggtgccgttggacactgcaatggggaaggcggtcacgtccacggtggctgagtgcgagcgagcgccgagccggggtgagaccaagcggtgtgcaacctcagctgaggacattgtggactttgccgtggagatgctaggcaatgacattgttgtgcgcagcacggcctccacggctggaagtggcgggcaaatcaggctcggcaatgttaccggtgttgatggtggcaaggtgacccggtccgtatcgtgtcaccagagcttgttcccgtatctggtgtactactgccactcggtgccgaaggtgcgggtgtatgaggccgatatcatggctgccgactccgatcagaagatcaatcatggggtggcaatttgtcacctcgatacttctgattggagcccaacccatggagcgttcatcgcgcttggtggaaaacccggtgaggttgaggtttgtcactggatcttcgagggtgacatgacatggacagtcgcggattaatgcgatcaaaaccatcttattaaccggtcaatcttcctcttgccaaactaagaagagttctttttcctatgcttgatttttcttcttttgcaaccataagggtttaagaattgtgcaatgtgtgtaggagaaaagtgctggttcatcaccaaatgtaaacagtatatcccggaaatttgggggagttgtgcgtaatttgattgtcttgatcaaattgcattcgttgtggtaaaacaagagtggttcaaaagtttggtcaaatttcctacttaaagtgctgtgctggcagtaggttgtgtcattgtccaagctatgtagcacatcagatgcaaatagtttacatcatggtctcaaaaaagagtaactataaagtgtcaacttgtaactgaagctacatggtttggatttgggtggcttttgcatggaccatcctccaatgttccaatgatcaaaaggaacagaaagtgaaaaaataaaaataaaaacagtgatagcaccagttcttttttttttcttcctcccctgtgaagctgaaaaaaaaggagtggtactggattcttagtcagattgacatatctaaaggaatgtaatcccctagtgatccaatcc

SEQ ID NO: 26397 - DNA, 1239 bp, Oryza sativa
  ref <308>: DATABASE ACCESSION NUMBER: AK101839
  ref <309>: DATABASE ENTRY DATE: 2002-08-28
gagggtcccaaacgcaaaagatcccaaacccctaaatcacccgctccccagtccccacctcctcctcctcctcctctcgctggtgtctcgggtggcggcgcggcgcaccacctcgcggcgagatggcgagctcggcgctgaggcgatccctccgacgcctcctcccttcgagcccccctcccccgtcccccgcctccgccgccgccgccgcgaccttccgccgctccttcctgtccggtggcggtgacggggtgggagagagcgtggaagaatttgagaagaggatgctgagtggcttggatgatgggcttgagaatcgccgtggaggatctgactggggttggaggggtgggttccgtaacaggggtaactctagcagcatcttggctgaattgtgcacgggcttcgattccttagaagatggtttggatgagaagttggatgaggcgtcccgcacctttcatgtgacggaggagtatgaggacgatgactatgattacaggccagatgtgactttcaggcgaggctgaacttataatgtcaaggatcttgaccttacaagacctgcagccgcaaagaaccctcctaggccacagtttcaaacaactacagaggaggttttaaagaaagccgattttaggaatgttagatttctggccaactttcttacagaagctggcattataatcaagaggagtcagactcgtataagtgcgaaagctcagcgtaaggttgcaagagagattaaaaccgcccgtgcattggggctattgcctttcacaacaatgggccaaagaccattcatttatggcagatctgtggaggtgaatctttcagaggaggaatatggttacgactttgtagatcggagggcaggtgagcctgatgagaatgcagacgacgctgtgcctgatgaggacgttgcgcctggtgtggagaatgcataagcatttttcaagggcttgccattctgcaatgctctgcatttcttctgttactcattcgacacggttccacatgccttcctgcctgatagtcatctactcttgcccggatcatagcccaggttcaataaattgtagtatttcgcatgttatgtacactataatctcggtttctggttttgcttgttgtgacatgatcagcaaaatttttggcttgctagtctccaggttggagatcatgtgccccacctaacattaacatgaaaatgatccagacgagatccagtccttaatt

SEQ ID NO: 26398 - DNA, 643 bp, Oryza sativa
  ref <308>: DATABASE ACCESSION NUMBER: AK101840
  ref <309>: DATABASE ENTRY DATE: 2002-08-28
ctgctggttctgtttggataatcttgcagcttgttggacggctttccgaggaggaattgatgaatcagttgcccacatttttgccagcactgtttgatgcttttagtaaccaaagccctgatgttcgaaagactgttgtattctgcttggtggatatctacatcatgcttgggaaggcattcgtcccgtatttggaagggcttaacagcacgcagctgcgccttgtaactatctacgcaaaccggatttcacaagcaaggtctggcgctccgattgatgctaaccaatgacctgaggtgcaacacaacgccctgttattatttgtgttctgtatgaatacctgtttggcaggggtgcatttttgggtttcatttgtttgtgcatgtgtatagtataaacaaagccccttgtgtatcgagctcctgcccttctttttctctttgtgtgattatgtattccttttttttttcaacctcttctttttgtcagcatggtgagtgttaatgagtgttttccttttgtaccacttagtgcttacactgtacaaagaaaaaggatagtgtaggttcatggagagacctagtgtctgccccattttcatttgctgtatgatttccgttggaattgctaggtgtgaattctc

SEQ ID NO: 26399 - DNA, 1910 bp, Oryza sativa
  ref <308>: DATABASE ACCESSION NUMBER: AK101841
  ref <309>: DATABASE ENTRY DATE: 2002-08-28
ggtttgctggctctggctcggtctggatggtggcgccgccggcggcactgcatctgctactgtcccgcccttggctgaccgccgcgcagctccggcaggcccacgcccacctggtcgtctcctcgctcctagccgaccgcttcttccccaactcgctcctccgctccctcctcccgccctcccactcccactccccgctgcgcgccctccgcctcttcccgcgcctccgccgcatcatcgctaccaatcccttcttccccaacgcctacaccttctccttcctcctcaccgcctccgcctccctcgctcctcttccccacgccgcctcgccgcgcgtcctcgtagaatcgctccacgccctcgccatcctcgtcgcctgcgacgcccacgcctacgtctccaacggcctcatccacgcctacgcctcctgcgccctcctctgctccgcccgccgcgtcttcgatgtcaacgtctcctgcagggacgtctgctcctggacctcgctcctcaccgcctacggcagggccgcccgcctccaccacgcgcgcgccctgttcgacgcaatgcccacaaaaccaccatcgcctgggccgccatcctcagcgcctacgtcggcgccgggagcttcgcggaggccgtcgacgtgttccaggagatgctcagggcccgcgtgcgccccaacagggcggtcatcctcagcgtgctggccgcgtgcggggcgctcggggcgctggagcaagggcggtgggtgcacgcccacctggttgccgcccacggcgcgatggccaaggacgggatggtggccacggcgctggtggacatgtacgccaagtgcgggagcctcgagacggcgaggcaggtgttctcgggcatggcggagagggacgtgttcgcgtacacggccatggtctcgggcctgtcggaccacggccgctgcgtggaggccatcgagctgttcgggcggatgcaggaggaaggggtgcggcccaacgaggtgaccttcatctgcgtgctgagcgcgtgcgggagggcggggctggtcgggcgcgcgagggagatcctggggagcatgtcggcggtgcacggcatggaggccggcgtggagcactacggcagcatggtggacgtgctggggcgggcggggatggtggaggaggccctggaggtggtgcggaggatgccgatgaggcccgactcgtacgtgctgggggcgctgctgaacgcgtgcgtggcgcgcggggacacggagggcggggaggaggtggcggcgatgatggcggagctggggctggacgaccgcagcggggtgcaggtgcagctgtcgaacctgtacgcggggcgggggaagtgggaggaggtggtgggcgtgcggagggggatggaggagaggaaggtggtcaaggtgccagggtgcagcatggtggaggtggacggcgtcgccagagagttcgtcgccggcgaccggtcgcacgaggcgtggatcatagacgtcgccgagcagctggagcggatgctcgcccaccactgactcccgtccgtctctcagcttcctccgtcaatttttagattcgactgagacgctgagctcatccgtccatccatgagagttgtacgtataactcttttttcactatgaccaaggagaacactaactcctccgatccatttattcatcgaggcacaaacaaaataagttcaactcttgtggaaaaactaagaaacattatacaaacattatacgtacagctcttgtggatggagggagtacgattcagtgactcttccggtgggatatgtgcctcataaatcaagaaacgtattagttcattgttgtaaatctgtatcgtgtaagaccacaatgttaaagagagaaacaacggagtgaacggcaagaagcagcgatgatcatt

SEQ ID NO: 26400 - DNA, 1211 bp, Oryza sativa
  ref <308>: DATABASE ACCESSION NUMBER: AK101842
  ref <309>: DATABASE ENTRY DATE: 2002-08-28
atgatcagtactataccaatgttcttctgaaaatcaatgctaagcttggtggaatgaactccaagctttcattggagcatcgacatatgattcccattgtcaatcaaacacccacattaattttgggaatggatgtttcacatggttcgccaggtcgagctgatgtaccatcaattgctgcggttgttgggtccagatgttggccgctgatatcacgctacagagcatctgtccggacccagtctccaaaggtagagatgattgattctctttttaagccactggacgatggaaaagatgatggcataataagggaacttctactggacttctacaagaccagtcaacaaagaaagccgaagcagataatcattttcagggatggtgtgagcgagtctcaatttagccaagtactgaatgttgagcttaatcaaattataaaggcatatcaatatatggatcaggggccaattcctaagttcacagtgatcattgctcaaaagaatcaccacacaaaacttttccaagaaaatactccagacaacgttcctccagggactgttgtagattctggtattgttcatccaagacagtatgatttctacatgtatgctcatgctggacctataggtacctcaaggcccacccattaccatgtcttgctcgatgagattggtttcttgcccgatgacgtgcagaaactagttttgtcgctttcttatgtgtatcagaggagcaccactgcaatatctgttgtggcacctatctgttatgctcatctcgcagcagcgcagatgggccagttcatgaaattcgaggaattcgctgagacttcgtctggaagtggtggtgtcccttcgtcatcaggagcagtggtcccagagttgccgcgcctgcatgctgatgtctgcagttcgatgttcttttgttgaggtggtgttagtcagctagtgtgcagcagggctgatccttctttttttttttgaaggaaccaaatacggagtacttgttaggcacttttgtagtactctagattgatactatgagatacatctaggttgggtagggagcatttttttttagatgatatagtgctcctaatgatatagttctgttagtgctcagctattaggaagtaaaggcttacccttgatggtaggtttatgaattcaagacgctaactttgcgccatatctaattgtcaaccagtt

SEQ ID NO: 26401 - DNA, 2163 bp, Oryza sativa
  ref <308>: DATABASE ACCESSION NUMBER: AK101843
  ref <309>: DATABASE ENTRY DATE: 2002-08-28
ggagttcggccattctccaacccgcacaccgcagcctctgccgccgccggcgctcgggctccttcctcgccgccgccgcgcgccgccgactccaccggccgtccgccgtgccggacaggtgatttgatttcatctgctgaaggtgggattgggaaatgccgcttcatgttcgcataagggagaagacgagcatagcgagtttgttgagttcccggaggaactggagtggtggtggggttgatggtggaaagaagagtggcaaaagagaaggtgctaaaacgaaaggaaccaggacaactggtaggaacaagagtgagaagagagaagagcacaaggaggcacggggaaatgccggacagaggaggaggtggagcgacacaaatggtcaatcagatgcgaagaagaacgcatcacaggctgtgaggaggaaaaggaagggtgatcatgactcatggaatggtgatcacagtgacacgccgtattctaaatcaaagctgaccagaaatggcccttccaccatgacccgtggaaaggcttctgctagaaaaggtgatagatttaggtctgagactttggatgaggatgatttgcattcaaggaaaaggggtaacagtatggtttccagtgtaagtagagggggaaggagtaacagcatggtttctggtataactagagagggaaagagtcaatcagtgttcagtaggaatgcagaagcatcatccaaagggaagaagtttgatacacctaccagagtcagtcgccaaaaagaggctgctacagatgccaacttggatgatcatggcgccgaaagcaagaagtcggatgattctggccagattgctgatgagaagccccgccctcgtcgtactcgggttctggacaagactgggaaaaaaattagggttgcaaacaaggatccagtttctgacattgaggaaacccttcctcccaagaagaggaagcggatgaaactggatccctatgacacatcaaacaaaagacttgaggattctactgccaaacaggatgtttgtagtccagagaagattcctgaaaaaagtccgcctgaagagactgagacgtctataaatgctaaattccgtgctatacagccaagttcctcaatcatttcatatgtggaagacaatctcctaggtcgtaggcgcctaaatgagataaaaaatgctagctacaatgttaagctctctgcccctttggataatgttcccttctcaaccagccctgaacgtgagcgcatagaagaaaatgtgttcagaaataagttggagttctttgctgcagcaaaaatttcgtcatcatttcctcctcctacgctcccagagatagcatttgcaggggtatcaaatgttgggaaatcatcactactgaatgcacttacaaggcaatggggtgttgtgcgaacatcggataagccaggacttactcagacaataaatttcttccggcttgcatcaaagctatgccttgtcgatctgcctggatatggttttgcttatgcaaaggatgaagttaaagactcatggcaagaacttgtgaaggagtatgtttcaaccagggtcggcctagaaagagtgtgccttcttgtgcacactaaacgtggaatgaaaccattggactacgagcttgtagacctaatgaaaaggtccaagacgccatatcagattgtattgaccaagactgatttggttttccctattgacgttgctcgccgtgctgtggagatccaagagagcctgaaaaagaacaagtcagtggtcagaccggtgatgatggtgagctctaaaacgggagctggtgtgcgcaacctgagaggggtgcttgggaagattgctcgcttcatcaaaccataacaagaaggttcaaattagtttggggagtttggagagttttagctcttaagcaattttcaagctagcttagaacttgaggccatatcgtagcatgagcaaaagttttctgggattttggaggcgtcttccatctaagacgtttgtgtcgcgcagacagaaaaacatcctgattctacataatttatggcatgttaggcctacgtatcgatgttttggatggatgtaatatgacaaacatgatcactggctcactgcaacctggaagtacatttgaatttagaacgcaatacac

SEQ ID NO: 26402 - DNA, 1299 bp, Oryza sativa
  ref <308>: DATABASE ACCESSION NUMBER: AK101844
  ref <309>: DATABASE ENTRY DATE: 2002-08-28
gggggaagagaaccgaagcacaaaccctagcggcggcgcagctcagccggggtttgcggaggaaggggaggggcaccgcccgcgatgctcgcggcgtcggctcggcgggtggcggccgccgccgccgcgtcgtcctcccattccaggctcgccaaccagctcgcccacgcgctgaatccgcagaggtggatccatgaccggaacaagaaggcgatggagttggtggccaaggggtggagcgccctgcaggaggttgatcgcgtcatcgactacgccgaccgcaacgacaagcgcctgatcccacttctcaggggtgcaaaggaaaattttgagctggctctggagatcgacaatatgaacactcatgcgagattatggcttgccaagatgcatttcaagtatcatgttcctggagcttgtaaggccattggtgctgctctgttggttgaagctgcaaacatgggtgatccagatgcacagtatgaacttggatgccatttgagaattgagaatgactacgttcactctgaccaacaggctttttattacattgagaaagctgttgaccagttgcaccctggtgctttgtatcttctaggtgctgtatatttaactggagactgtgttaagagggatatagcttcagcaatgtggtgtttccacagagcatcagaaaagggacactctggagctgcaattgcatatggatcacttctattaaaaggtgctgaagtgcctgaggttattaccaggttcaactcaggtaagagtccatcaactggaaagatgcgaaaaaggcccatacagcaggatccagtgaagctagcaaaggagcagtttcaaattgcagctgaagctggatgtgatctcggtttgcgatggctgaagaggcttggggattatgaaaagcagcaagaacaaccaaagcaaatccagcaatgaccaccttcgaaatgatttgcttcacttcggcattgctctatgttgacatgcgtttgtcatacacactatacaggtagaacgtcagattctcaactgtaatcatgtaattgaatccaagcactatgtaaattttgatatctggcccaactccttgaaaaggtagacttgagttgatcccctttctctacaaaggatttttatcgtaccagtccttatagagttcgttactttgttttttcactttttctccccaactgtctactggtataacctgttacatgtcccttaattattccccggtgtgtcagaaaagtgtttaaattcaagcatacatgaaaaaactggactttttccgtt

SEQ ID NO: 26403 - DNA, 1496 bp, Oryza sativa
  ref <308>: DATABASE ACCESSION NUMBER: AK101845
  ref <309>: DATABASE ENTRY DATE: 2002-08-28
gcggcgcttctccatggcggcggcggcggaggaaccggagccgaagcccgaaatcgaaaccccaccgccggcccgcgagcctccaactgagccaccagccgccgcccccgcccccgccgccgcagccagcgaccgaccgctgcagccatgggagcagcacgcggcggtgataaacctcccgcgctacgactaccgcgcgtcgggctccctcctcctccgctcccactccggcttcctcatcacctgccccatcaaacgtgagaaaagcgcaacaaaggaagccatttccattcttgaaaattccattggtcatgcaaacagctatagttctgaaaagtcagaaccaagtgatacggaagtttcagcaaagaaaaggaaaatatgttccgagacaccagatattgaaaattcaggagatgcagtaacatatgagaagggtgatgcttcagaaacaactggcagtgtagaaaaagactcagtttcacctcactccaaaacaagtaaaaatgttgacgacacttcaaatctctcactggttaaactgtcaagaagtggcttgcttttcttttcgtttcctagcggaggccttcgtgttgttcaaatgcttacacaaatgtttcattcactgcattctggcaagcttaaatctccacaatggtgtcatcgcatatttcctattcaggaaacatgtgttctgtcagaagcagaactacatactactgtgtcaaagttatttcttgactttgtaaagagtaaggaagaccaagatgagcctatcaagttcgcagttgggtataatagaagaggcattgatgaaacagagatgaaagggcagaagaatggcaatgaaggttcaaaacaacaaactttaatggacagggaccaatgcttcaaggtcgttgctggtgccgtcaaatcagttgctgagaactcaattgtggatctcagatctcctgaggtggcagtactagtggagatgctccctatttctggggtatccctgggatcttcagtggctggggtgtccgttctcccgtctgaactcatctcgactaagcctcgtctctgtgtcaaggctttggtgcctgatgcaaaagcggcaaagaagaagtgatgcctccttggttgatatcaatcagatggcaccgtgatgggcataatacagatgatacaatttgatcagtctgctcatttcaagtttacaactctgcggcagcttgaatcttctatggtcgagatggtttaacaaacatcaaacccttccatggttgcgtgctgttctacgcatcatatcatctgtagtccccaccaactgctgtttggctggttttgggtaggtcagtgtataagttgcagccctgcagagttcgttcatgcagctcttggagggtacttcttgtcgttatttttgcatgttgcgatgtcaaaaccatgaggtcgctggctattatggtgttctactgttttctgaactttatctattatggccagttcag

SEQ ID NO: 26404 - DNA, 3061 bp, Oryza sativa
  ref <308>: DATABASE ACCESSION NUMBER: AK101846
  ref <309>: DATABASE ENTRY DATE: 2002-08-28
ggcaggcagcaggccatcccaccgagcgtaccatacactactgatacgcacacctagagcaagttgagcgagccatggcgctggtggctgaggcgatggggagccttgtccccaaactgaccgagctgctcaaagaggagtacaagctgcaaacgggcgttagggagaaaatcaattttctcaagagtgagctcgaggacatgcatgctgcccttcgcaaggttggcagcatgcatcccgacctgcttgatgagcaggtcaggatttgggcaagcaaagtccgggagctgtcgtatgacatggaggacgtcatcgacgcctttctggtgcgtgtagatggcagtgtgcctgccaaccccggttgcctcgaacggcttgtgcacatgatgtgcggcttgttcaccaagatcaaggttcgccatcagatatctggcgtcgtccaagacatcaacaccaaactagaggaggtgtccaaggcgcgtgaaagatacatagcctctgatcttcaggctaacctagctgccacacaattgtccacccatgatcctcgcatcctgttatcgaatacagatgcggcaaagcttgttggtattgatggcacaaggaatgacatcataaagatcctttccctggagggtgacaacttgcccttggggaagatgataaaagtttccattgttggatccgggggaatgggcaaaaccactctctccagagcagtgtacgacagtgttaaggggaaattccaatgctcggcatttgtgccagttggccagaatcaagacttgaagagggtcttcatggacgttctaaatgatcttgacaaggaaaagttcgacaatatccatagcacaaaaaaggatgtaaggttactcatgaacgaggtctacgacttccttgaaaacaagaggtacatcattgttattgatgacatttggaaattcgatgcttgggacatgattgcaaaagtcctgggagacagtagttgtggaagtagagtgatcataactactcgtatttctgaaattgctgaggaagtcggtcatgtttatgaaataaaacacctttctgatgttgactcgagaaggttattgcatagaagaatattaagtggtgaagaccaatgccccgttgatgattatgatttggaagaggtttgtgatgaaattttgaggaaatgtgaaggggtaccattggccattgttacaacgtctagtttgttggagagtaaaccaagggaggactggtctgagttgtatcggtcaattgctcttggcgcaaaagacaaccggcatgtggataatactatgaagatatggtctcttagtttctatcatttgccttatcatctaagaacatgcttattgtacttgagcgcatttccagaggattatttaattggtaaacaaacattgatatggaggtggataggtgaaggttttgtctgtaaggaagaaggaagagacttatatgaggtgtgagagggttacttcaacgagcttgtaaaacgacgtatgatcatgccaatagaggcagagaatgaagactacatactaggctgtcgtgttcatgacatggtgctcggtctgatccggtcattgtcaagcagtgaaaactttgtcaccgtattgggtatagaacaatacaacacatctcaccagggctatggtcgaaggatagccatcctaagcagcaagaatggattacccccagtggtgaacctgggaacggcacagtcacaagtgacaatccggtcatttagtgccaatggtttgtcatacatagatgttctgccaacaccggcgaaatttgaagctgtgcgtgtactggcactgcaaaattgtgaatcattgcaggaccttcacggcctggagcatattggcagtttacttcacctacgataccttgcactgacgtacacacctctttctgagctcccaaatggaatagcgggacgtctgaggttcctagagacgctggatctgtgggggactggcatagagcaagtgccgtcgagcgtgggcaagttgacacagttgctgtgcctacaagccgatattaaaacaagggtgccggattggatcgggaacctgacgtccctgcaagagttgtggatgtggcctgatgctgcagctgcagggcagtttgtgaaggagctgggcaagctcgaggatctgagggtgctctgtactcagttagagggtgcccccgcaacggacattatcgagtctctaggaagtctgcccaagatacagaaaatgcacgcctttgaccgttgggcagcggtggggcagtgtgtgccgtgggagcaaggattcgtcactcctcaatgcctccagttcctgtgcctgaggtgtttgacattcaccagcctgccgccgtggattaatccgtcacttctgccaaacctcagcaacctgtccctgtcgttgcaggttttgcgacaggcggacatggaaatccttggcaggctgcgaatgccccgcagactcgatctatttgcgatggggaatgcaattataagaattgggattcatgacaccctgttgttccgcaagttgagattctgcacgatggccacgacctccatccggtttgtaccacctcctgctgctagtgctgccgtcacaacacctgtctcagtcatgccatacctggaattacttcacttcagcttggacgtgcacttcttcaaggacaggaaaattgcttttgacattggcttggagcacctcccgagttctcttcgcacagtaaaggtttttgtgctctgccacttagccaaagaagaagacgtcaaggaggcggaggcggcattgttgcactccgtcagcatccatcccagccgtcccgcccttcaactcgaaagattggccgaagataaaatgctcccttctcacctcaaagatgatcagtgaacatcgtagccatcacatatctccccagtcactctatctgttggaaatcattcatgtgatgtactaagataatgtaccctgtattgcatgcatagtttcttggttcgttgtgtaatatcaatgaataagtctattttgcttcc

SEQ ID NO: 26405 - DNA, 3652 bp, Oryza sativa
  ref <308>: DATABASE ACCESSION NUMBER: AK101847
  ref <309>: DATABASE ENTRY DATE: 2002-08-28
gatggaaagttggttcctcctccagccaccagctcgatcctttcttcctcgttctcgcgatctgacctccccatctctcctcactcgatttcccggcggctagcgacgcgggaggaggcgcccggccggccggcgagcacgtgctgatagcggccgaggaggcgttgcggctggacgaagagcgccgcgtgcagcgaagcggcagtccggcgagcaggaggtggatctggacggcgtcgtcttcgcctgagccagcctcaccacgcgtcggcctcccgaggcggggagttcatccgcgcgaacggccccggtagcggggcgaggcgttccgaatctggcggcatcctcggaggcacacggcaacatctcggtctgcttgttcttcacgctgcgccacaagctcaactgcaatggccgccgccgcggcgtcaagctcgtcgccggagttctcgtagtagccgagatactgattttcacggggatgcattaagctacggtctaacttgtgggagctggatactgctgaaaaggggaccaaatggagcttcagcaggaaagctcggatgcggggactttgttctcggcgccatcaaggaacctatcatcctcttcatcagcatttgtttctgctaaccaatcccctttcttcacgccacgatgtctatctgcccgtgtctcagatcacgcacatcctgagaacaatagttccttgagtggtactgtgctgaaaatcagtgatattctttccagcgacactctgttaaagcgggagcaattaccatcagccactgtggggttattgccatcggatgcttctcctcctcctagtatttgcacttcaagcaattttgacactccagcaattgtctataacaatcctagcttcatttccaccttcagtgacccatgtcaaggcagttcatcagcaactagcactggtgtccgttcaactcagaaggagaagcataagagacagtggggattatatcggaaatcttcatcctctcaacctacgacatcagctacctctgtcaacagacttcggagctttgatgtgtacataggatttcatggccgtaaggcttcactactgaggttcactaattggcttcgtgcagagcttgagatccatggaatcagctgctttgcttctgacaggtctagatgccggatttctcacagccatgatactattgagaggattatgaatgcttccacatatggagttgtcatccttacaagaaaatcatttggcaatccttataccatcgaggagctgaggaacttctttggcaagaaaaatctgatccctatattctttgacttgggtgctgctgattgccttgccagagatattattgagaagagaggagaactgtgggagagacatggcggcgagctttggatgttatatggtggaatggaacaggaatggagggaatcagttgatgctctttctcgggtgtcagatgtgcaattagaagcaaatgatggcaattggagacattgcatacttcaaactatcattgttttggccacaaaattgggcaggagaagtgtggttgatcgggtgaataggtggagaggaagggtggagaaggaggaattcccttcccctcctaatgctgattttgttggtaggaaaaaagagctctcagagttggaactcattttatttggagatgtcagcggagatggggcaaagagagtattttgagatcaagacgaagcagagaagaaagggcctcgtaattggacggtctgttaacaattatgagcaagtaaatactgatgatggtaaaggaaaggagccggttttgtggaaggaaaccaaggaaaacattgagatgcagagactggggagtccaccacgacatggaaggccatcgagaacaaagaatgatggcaggtatgggaggaaaagaagatgtaggaagatactctacggaaagggtattgcttgcatttcaggggaatctggaattggcaagacagacttggttttggagtatgcatacaggttctcccagagatataagatggtcttatgggtcagaggggaaagcaggtacattcgacaaaactacttagctttgcggacttttctggaagtagatttaagtgttgatagtcacttgcatgagaaaggaagtgaccgatgctttgaagagcaggaagaggaagccattgccaaaatacggcaagagctgatgcgggacataccgtttttagtaatcattgataatcttgagagtgagaaagactggtgggataagagagtcataacagaccttcttccacattttggtggagagacccacttcatcataacaacacgccttccacgtgtgatgaacttggagccaatgaagctttcttatttgtctggtgccgaggcaatgtctttgatgaagggaggcgtcaaggattatccactggtggaaattgatgcactaaaggccattgaagaaaagcttggaagactcactcttggccttggtattgtgggatctatactctcagagcttccaatcactccgagcaggcttcttgatacgttgagtcggacactgcccataagagattgttcttggaatgagagagatgctatcagtttgaaaaatcatgaaatccttgtccggctcctggatgtctgcctatcaatatttgaccatgccgatggtcctaggagtctggcaacccggatggttcaagtgtgtggttggtttgcaccttctgcggtcccaatacatatgttggcgttggctgcacataaagtcccaaagaagcatcggaggggtccaaggtggaggaagtggtggcgaacgctgacttgtggcttggctacatctaggatgaagagatctgaagctgaagcagctgcaatgctgatgaggtttggaattgccagatgcagcacaaagcctgaatatgtacagttccatgatctgatcaggctatatgctcgaaagcgaggaggcacacgaatggcacaagctgtggtccaatcgatctacctccgaggctcaattaaacattcttctgaacatctgtgggctgcctgcttcatgtttttcggatttggttctgatcctttcctggtagaaccgaggccatcagagttgattttctttgtgaagcagatcgtcgtgccacttgcaatcaacacattcatcacatattcccgatgtaatgcagcactggagctgctgcgtctatgcactgaggcattggagcgggcagctgactcaatgctttctcatgctggcaaatggagagaaacaccattgtcctgtttcaggccaactcagtcagaagcccaatacacctacctttggcaggagctggctcttctgaaagcatctgtattggaaacacgggccaagctgatgcttcgaggtggacagtatgacactggagatgacctaataaggaaggccatattcatcctgacttccatttgtggcgagcaccatcctaacacggtttctgctcgagaaaccctcagtaaactcacaaggcttcttacaaatgttcagcttagttgactcatatagcttaggacttcaccaatatattcttttcaatgtggcttttcataaacactgtacaaaatgccccagatcatcaaataacaaaagaaaatttgtct

SEQ ID NO: 26406 - DNA, 3514 bp, Oryza sativa
  ref <308>: DATABASE ACCESSION NUMBER: AK101848
  ref <309>: DATABASE ENTRY DATE: 2002-08-28
ggtgttcctcatccaccgctgtagctgtacccctcctcctcctcctcctctcctcgatccgcacgcaccgccatctccgatccgcagcagcagcagcagcagcagccgcgaggccccggagccacgcgcatctcgctcgccgccggcgagaaggccccggtaaccggtgggccgcagagggggaaaaggttttggagggagcgacgccgcgtgcgtccccgtctcggctgggaccgaaccggaggtgtgccatttttggaggctatcgatgggtctggacaacaatttcggggagctatctggcatgttctgtggcttgtcctatgatggctacacggatcacggcagccagagcgattacttcaggttcgccgacccgcagccggcgatcgtgccccagatggacgccggacccagctccgccgcttcctccacggcgtcgagggccgccgtcagctcggggaccgacaacccagaggactgggagttcatctcggacgagtcgctcaactatatcagccgcatgctcatggaggaggacattgatgagaaggtcagcatgtaccaggaggagtccgcggcgctccgcgctgctgcgaagccattctatgacattcttgggcacaagttcccgccctcccctgaccgccagctggtagcttggcccctcgacagcccgagtgagagtagcactagcagctatccacactccttggctagttctgttactagcagcaacattagtggtgcggtcgatagcagccaacgccgttatgttggacacagtgagtatcggagcttgtctggtcattcttctcaaccgccggttggcccatcaagtgatgttcgcaacgctatggagacactagaagatcctttgattagtaatggcaggatccctgagtatttgtttgagagctttccaacatgggatttcaggagaggtgttgacgaggcacagaagtttctcccgggtagcgataaggtagtgattgatttagaggctggtggtgttgcaaaacgtcaagaagcagggaaagctatttctctgaatgtcagcaaggcagaggttttgaaggtaaagaaaaacagacagagtgaagaccttgacgtgatggaaggacggaatagtaaacagtctgcattttgttctgatgaacctgattggattgagatgtttgatgttctgcttcgtcaaactgagaagaaggcaactgatcttcgaaaaatgatgcgttttgaggcttccaagaattctcaagttgctcagccaaaaggaccaagtgggacccgatcacggggacggaagccaactaagaaggatgtggtggaccttaggacgctactcatccactgtgctcaggcagtggcagctgatgaccgccggactgctaatgagttgttaaagcaaataaggcagcatgccaagccaaatggagatggctcccagagattggcgtattgctttgcagatggtcttgaggctcgcttggctggaacagggagccaactttaccataaacttgtggcaaaacggacaacagcctctgacatgctcaaggcataccatctttaccttgcagcatgcccattcaagaggctctcacattttctttcaaatcaaacaattttgagtttgacaaaaaatgcatcaaaggtgcatatcattgactttggcatttacttcggcttccaatggccgtgcctgattagacgtctcttcaagagggaaggtgggccaccaaagctgcgtatcacagggattgatgtacctcagccaggtttccgcccaactgagcgcatcgaagagacagggcagaggcttgcagaatatgctgagaagattggtgtcccttttgagtaccaaggcattgcatcaaagtgggaaacaatctgtgttgaggatctcaatattaagaaagatgaagtagtgattgttaattgcttgtatcggttcagaaatcttattgatgaaacagttgccatagacagtcctaggaatagggtgctcaataccataaggcaagtgaacccagcaatttttatccatggcattgtgaatgggtcgtacagcgttcccttcttcatcacacggttccgtgaggcattatttcatttctctgcattatttgacatgctcgagacaactgtgccacgggatgatgcccagcgtgcactaattgagagagatctatttggccgggaagcactcaatgtgattgcatgtgaaggctcagacagggtcgagagaccggagacatacaaacagtggcaagtgaggaatctgagagctggatttgtccagtctccattaaaccaagacattgtgctgaaagccaaggacaaagtgaaagacatctatcacaaagactttgtcattgatgaagacagtgaatggctccttcaagggtggaaaggaaggataatctatgccatatctacatggaagcctaataacaattagggtatggtctgtgagctgtgcctggttgcccgttagcactagcaattaacgaagaaaagtaccttgcattgggctacatgcgtatgtacaggtctgcttattgttttccaaagtactgctgctcagttcagtgattttcacatttgtccactattagttcagttcagtacttctgttcttgatttggcctttgagttgataatttttttcaagtttagaacaagtaggacatatgtcacaatgggttaattaataagcataactatcagcatcaaagtggcatatgtcagaagacaagtgtactttttacatgctatgcattccatgcgttggtgcagaccgcagagcagtttctgccttgcttttaccatatctgtatctatacttatatataacatgaaaagcactagtttcaaacttttaccatacatgaaaggttgctacaagtaatcctagcaattggttggtttgatcattttgtattgaagatggatccttcatcctttcccccaacccaaatctctccaaaacaattaatttgtacttaatatatactctttgctctgtccagatcttcatgtgcacagacagtcctaaacgtccgatctgatgaatctaatggatgatatccattccatggtcctgccttccacagataacttaataacaatagtcgtctacactaatacctgataaattaattaccttaatggcctatattcctcctaatcctgctctggaccaaaaaaaatcccagcctcctgagaatactctgcagctgcatgggtgccaaagtccaatgcctgtaacatcataggcatgaattaatttgacttggatacaatggacatatatcagcacatctatgcattacgaccttctgatcctcatgaagccttggttttaaccgttgccgtacgagtgcttagtgcttgcccctgtttagcctttttatattttcccttttccagggatgtaatttacaggttccttttatttggattgcattgtactaattacataaatgttttaacgttttttggcccaacc

SEQ ID NO: 26407 - DNA, 1396 bp, Oryza sativa
  ref <308>: DATABASE ACCESSION NUMBER: AK101849
  ref <309>: DATABASE ENTRY DATE: 2002-08-28
gacaccccctctagcgttgagagagagagagagagaggatgttttgagagagcacagctagaagcttggcttctcgcaacaagtgctgcatctctagtgagcgagtgagtgagagagacagccttggccttggcgttggtggtgtagctccagcctccaagcatccatccatgcttacataagtcagacagggagggaggaccggaaggaggaggagagaaaaagcgaagctttggttctttctttgcaccaccggttgcctccgttgatctccttgtcgatcgccggaagcaaaccgttgttggtgatgggcagcggcggcggtggctgcggcaggaacggcgctgtgaggcagtacatcaggtccaaggtgccgaggctgaggtggaccggggagctccactgcagcttcgtccaagccatcgaattcctcggtggccaagacaaggctacacctaagctcattcttcagctcatgggggtgaaggggctgaccatatctcatgtcaagagccacctccagatgtacagatgctccaggctcggctcccatggcacgggaaggagatcagagatgcaaccacagctgcaaaggaagcactcatgtggtgctgatgagcaagtccccagagaattcctgtgcccccctctgaaaaggaccaggatggggacagaagccacatacaaaggcatgcaaggaagccaaggaatcagtgagatgaggactactggcacccagtactgcattgatgattacatgcaagccatggcaatggagaggagaataaaggaggagggcctcagatggcagagggatgctgctgctgctgctgctgcagatggtggtgctgctgcttccaacctccaaaccgtgggatgttcggtgcaagaatctgacccctttaagatcatcaaaccagaagtgcaccatcttggtcccgtgttgaagctgcaatgctccaaggtggagaacagtggattcatctccagcagcaccggcacggctgcaagggatcaaccggagccgccgccgctggagaaatgttcgctgtcactctccctcggtccagaccccaaatgcatgccggcgatcgcctcgtcgccgagcgaaagcagctgcatcctctcgtcgtcgtccaggagcttcagcgactgctccgggaactcaggttgtcttgttgccccgggtgtgaacttggaactctccatgtccatctgtggatcttagaccttggttccagtaatccagtttttgtacatcagtcagtctcacatgtcggttttgaacttttaatcacctgcttcagtgttgatacggtgataccctgatcatgttaggaagttagccaattgcaagatgtcagtgtagggccttgagtatgcagtgcaatgatcc

SEQ ID NO: 26408 - DNA, 1154 bp, Oryza sativa
  ref <308>: DATABASE ACCESSION NUMBER: AK101850
  ref <309>: DATABASE ENTRY DATE: 2002-08-28
gacgaattcccaataaagaaataggcaaaattccccatctcctcgtctcctcccaactccaaaccctagctcccaccccctctcgccgtcgccgtcgcgtcccatggcgaagtcgcggccgcccaagcggatcctcgagtcctacaccatcaagggctccgacaaagtcatcaagcctggggactgtgtgctaatgagggcatctgatacatcaaagccaccctatgtggcaagagttgaggctattgaggctgcagggtcacgaggcacaaatgtgagagtacgggtgcggtggtactatcggccagaggagtccatgggtggaaggcgtccatttcatggtgccaaagaggtgttcctctcggatcactatgacgtacagagtgctgacaccatagagggaaagtgcaacgttcacagcttccgtagctacacaaagcttgattctgtcaatgctgaggacttcttctgtcgctttgagtacaaatcagccacaggaagcttcgtgcccgaccgcattgctgtgttctgcaagtgtgagatgccatacaatcctgatgaccttatgatccaatgtgaggaatgctctgattggtttcacccttcttgtattggaatgactattaaagatgcaaaaaaactagagcattttttctgccagagctgtactgcggaaaatggaaagatggctgaggattctcatgaagctacagcgcaatccgaagaaaagcaggtggagtcaaaaagacggagaaggtgactgccccccagattcattgacgagatacacctggatgtacaaagccttctcaagttggtgtaatgctatttatttgtcatggcaagtgtgtgtgacccacgaccacgagagtcccttcctgtaatgtcagtcgcatggtgtacataaacttttcgacctgagactgttgtattaggagacgacacgacctgttgttgttgcatgatgtttttagcagcgtcagaattagcatggtagagtcgggtgatgaagcccctcgcgggcattaggactcccgtatggatgttatcactgatcatacattgatactacattggatgcagttgagtctgtcatctgcgtttgtctttggagaattcttgtaccatcaatccatcatgtgaactttgattct

SEQ ID NO: 26409 - DNA, 1731 bp, Oryza sativa
  ref <308>: DATABASE ACCESSION NUMBER: AK101851
  ref <309>: DATABASE ENTRY DATE: 2002-08-28
gggcccgctcccacgctgtgtcacacccacctgccacctcgccgcgacgaccccctcgccgccggccgccaccgcgcgtcaactgccggcgatgccgcccccttccctcctgctcctccatccacgcacgccgctgccgcaccaccaccgctcctccttccggacgagctctccgcggccatccaggatggtctgcgccgctgccgaggggtttatctccgcggcgccgatcctcctccccgacggcccgtggaagcaggtggaaggcggcgtcacggcggcgaaggggttcaaggcggcgggtatctacggcggtctgcgcgccaagggcgagaagcccgaccttgcgctggtcgcctgcgacgtcgacgccactgtcgcgggagcttttactacgaatgttgttgctgctgcaccagttttgtactgtaagcgtgtccttaattcatcaaaaacagctcgagctgtgttaattaatgctggacaagcaaatgcagcaacaggtgatgcaggatatcaggatacagtggatagtgctgatgctgttgccaagcttcttaatgtgagcacaaatgacatactgatccagtccactggtgttattggtcagagaataaagaaggaggcacttgtaaattcacttcatagacttgtgggctcactgtcttcatccattgagggtgcaaattctgcagctgtggccattacaactacagaccttgttagcaagagcatcgctgtacagacagagattggaggagtgcctatcaaaataggaggaatggccaaaggttctgggatgattcatccaaatatggcaacaatgcttggtgttttaacaactgacgctcaagtcagcagtgatgtttggagagaaatggtccgaacatcagtgagtagaagcttcaatcaaataacagtggatggtgatacgagtaccaatgactgtgttattgctctggctagtgggttatctggtttatccagtatccttactcatgatagcactgaagctcaacagttccaagcatgcttagatgctgtaatgcaaggtcttgcaaaatccatagcatgggatggtgagggtgaacatgtctaattgaggttactgtagctggtgccaataatgaggctgaagcagctaaaattgctcgttcagtggcatcttcctccctggttaaagccgctgtatttggaagagacccaaactggggacgtattgcttgttctgtcggttattcaggcattcagtttgatgcggaccagcttgatatttcccttggagctattccactaatgaaaaatggtcaaccactcccatttgacagatctgcggccagcaagtatctgaaagatgctggagacatccatggtacagtgaacattgatgtatcagttgggaggggaggaggaagtggaaaggcctggggctgtgatttaagttataagtatgtcgagataaatgcggaatacacgacgtgaaagtcttacactgtctatgaagaacggtctccgcttgatggaaatggaacgctgttcggatgcagctaggcatctgagcgatctgtatcatattgagactcgccctttgttgtatcaatcggctgaacgtgcattcttttgtaagtgtaaggaatgcgctatacaatgttacggcacaataagtaagctgtctgccatgccatctgattcaattctaatttataacagtgacaggggatgtttgggcgc

SEQ ID NO: 26410 - DNA, 1716 bp, Oryza sativa
  ref <308>: DATABASE ACCESSION NUMBER: AK101852
  ref <309>: DATABASE ENTRY DATE: 2002-08-28
gacagcgactcgaccgtcgaacgcggccgcgccgccaccgccgccgccgcccgccgtcgccgtcgtgagcgccgccaaagcgatgcgccttgcctcccgcgcctctctacgccgcgccgccgccatgtccgcttactacaacgcccgaggatccgctcgcccgcgacgaggctactactccgggcgacccacgccgcctccccaccaccaccacgacgccggcgccgagctcgtcagcggcgactcccaccacagcgcggtgcgtgcctccaacgattcgctccgccgcggcggcggccgcgggcctcctccgtcgctgtacggatacgcgccgcctcagccgccgccggcgctatacggggccgtgccgtacaactacggccacccgcagcagccgggcccgccctacggggccgtgccgtacaactacgggcccccgccgccgcagccacaggatcctcagtacggatacgcgaccccgaatccgtatgtccaggggcatccgcagccgtactggcgtgggccaacaaatgcagggttccggccgccgtacgccggcttcaggcctggtgcgccgcagcaatcaccaaggctagcggagtaccgccgacggtggcgattcacgcagcatcggccaccacgccaagccggtaacatcttccagagtctgtgatatattctgtctcaatgcttagcactgcagtagtagtagaatcgcatagcaaaccatccagggagcacttctctgaagtaaaaaatagtgtaattgctttttactttttgtgtggaaaaacttttaggttattaatgatcggagtttcttaatatttgatggcttagcacttctctgaagtcaaaatggtgaaagcttttcaatttggtttgtgtactaaactagtaatggattatagtttcacttgattttagacaacagatgtgccatgtggtatgtgatatatgatatatgaaggaaaatgatttagtttatgcccctcaactcctccaaaagtttacgtgttcacacctcaattctcaaggtggatgaaaaccaccactgaaccttctataccagataaattacacccctaaccgatcaagcctgaaacagacttcagcgccacatccactgccatgctagcactgatgccacagcaaggcattggaaaagtgatacagtttctctttccctcctattacctttcccctctctcctcagctaaatcaatatcacagctaactatcttgttctgtgacaggataatgggcaaagagaatgggagagggaaacagaaaagggtccatgggcatcttatccatgagcaaacaccttatttcaagcttatgattgtaatctattcagttttacagttgaggggtgaaaactaaactttcagaagtattgaagatgtaaaagtagacactttccgtatatgaataattcagtcagataattacccatggacatggtgtgttttagaccaagagtattaaagtcgagtaatcattatgtgtgtggaattgatgttcttgttttaaaattaccacgtgttttcctttggtatattgagtagatctttttttatcatgcagagaggtttaaggttctatcatacaatatactagctgattatctggcccaggagcaccagtttctttatgagcgcataccatctttcatcatggattggaactggcggaaggaaaagttagtgttcg

SEQ ID NO: 26411 - DNA, 1356 bp, Oryza sativa
  ref <308>: DATABASE ACCESSION NUMBER: AK101853
  ref <309>: DATABASE ENTRY DATE: 2002-08-28
gacccttccgcgaaccgcggcggtgagagaggaagacgtggtggagtgagaactgagaaggcgggggagaagagcagcgccgccgccgccgccgagctctccggcgacgccaagtcgaatcggagcccgacgcggcggatgaagcgccggcccgccatggactcccacaacgagcagccgccgccgccgaagagcttaaagatctatgtgaagatgatgaagacgttcaccctcaatgtgaatagtactgatacagtcgatcagatcaaatccaaactcagtgctattgaggggattgacaagagcaagcaagagatgttctttgctgggatgcacttgaagaatgaggataagcttgctgattataacatcatgaccaactcttctgttgacctctatgtcactgatgctattcaaatatctgtaaggattccctctgttggaaagaccaccaagctcaatatgaggaaatcgaatagtattgctgacatcaaggcggagattgaacaggaggaaggaattcttatgaacgaacaaatcctgatgtatgccggtcaacagcttgaggacaaccagttgttaagtcagtgcgatttgaggaatgatcagacatttcatgttttggtttgcccaaatgacaagcttcatgtctttatcaatgttagaggagagaaaactataggccttgaaactaaacgctggtacaccgttgctgatgtcaagttgatgattgagaatttggagggcttgcctgcatgcagccagatactcacacggatgcaatctggtgttggtgtggcgctcacagatggtcggatgctacaggatcagcatgtcaaaaacaatgatactctcttgctgcagcagaatgttcagttcttcgtcaagtcatgggagggtaagaccttaactatggttttgaaaacgtccgacacgggtaagcaaatcaaggatagaattgcagagaagttgcggatcaaagaaagtctgtactatctctgtcacaagggacgtgttctgttaactgaggatactcttctggatcatgaggtcgagagtaactccacagtttacatccgccttcggaattcagcggtggtgaaaccaaatgcaaagaagcgctaggtagctacttctatgaactatcaacttccttaaggcaagagacaaaacatagttgcttagacgttagaccctcgtatggttagtttttggtgttactaatcctagttctctagcagtgaactggaggtttcaggttcctgacttgtgatgcctatctattagtaatacttttgctgtaaaaacttttgcttgaactgaaggggagacacagaaagaactgtgcatatttcc

SEQ ID NO: 26412 - DNA, 1931 bp, Oryza sativa
  ref <308>: DATABASE ACCESSION NUMBER: AK101854
  ref <309>: DATABASE ENTRY DATE: 2002-08-28
gcttttcctcctcctcgcgacgacgcctccctcgtacgccggcgctctcgcagttgccgccgccgccgccgcgaacgcccaccgcccgcgctctggtcggtggatcgtgacgtgctgtggtggtctctgatctgctctgggggtgggtgggcgtctcgcggagtcgccgtgttcgtcgagggctcgatcggctcggggagagcgagtgagaagaggtgagggttggggggaggcacatccgcggcggcggagagatggcggatttccggacctccacgcatcgggagaggtggatcttccagacgaacgatctgatggatagatggggggcggcgaaccagcgggccacggagacgctcgttcagtatggaacgacgcggttgaaggtggaccctgttgatgggtcgctgtcgtacccggaacctgcgcctgatcatgttgtagggagctcaggtgtaaagcctctgtcttgtgaagaggagcgattgatgcgggtattttatgagcaaaagattcaagaagtatgttcagcatttaagttccctcacaaaatccaggctaccgcaataatatatttcaagagattttatctgcaatggtctgtaatggaacatcacccaaagcatattatgttaacttgtatttattcttcttgcaaagtggaagaaaatcatgtttctgctgaggaacttggtaaaggaattcaacaggaccaccagattattctaaataacgagatgattgttctcaaatctttagattttgatctgattgtttatgctccgtatcgatctatcgaaggatttgttgatgacatggaggatttctgcagagcaggtaatggtgagcaccaacggttgcaggatttacgtcaaactgcgatatctcaggttgacaaaatgatgttgactgacgctcctcttctctacactcctggacagttggctctggctgctttgcacaaatccaatgatatgcacaagatccttaattttgaaaggtacttggaaagtgttttttcaaggcaacattctgattgtccaatcgaacaatttgttgggtcaatcaatatgatcaattatttggttgagcagcttaaaatacctactcctaaggacatgaggcatattgaccgcaagcttaagcattgtttggatccaagctcacaggatgagcataagaagaaagagaagaagtcgaagcacaaatcaaaaagggcagctaatgaagcccaacttgacagctagaaaacatacggttgggctgcaccgtgtaagaatcagttctttagtttgttgtggctccagttgatcaaaagagctactttcctgagcaggtgaggttccgttttagccgaggacaaccaattttgagatgaagcgagataatacccatgacctcgccttcttgtaatcttgtgtgcctggaagccctagcaaactcctcgttgcaatggctactgtactttttttggggggtaatttatcccttgtcaaatgggaagaagcagcatacatcggatgattgcctccatatacgaaaatgacagctaactcagacttttttcggttgcatttttctgtttacaattctcactattattaacgtatctgattgacttgctacaaagggcctaggttccaaattgacaattttgcaagttttcagccatagcagagggtttacagctccaagctataaaggttgaagaaaaggtaaattaattcaacagagaacatcagctgacgagcacgattgtacagctcatcctatgtctgcaatttttgctctcatcggttactaaaccgagtatgagagcatttgtcatttgttttgttccatgtgtttacagttgacacaaatagaagtcgtccttgctcagacaaggttgtacgtaagtgcaatataatataaagtactccatccgtctc

SEQ ID NO: 26413 - DNA, 4886 bp, Oryza sativa
  ref <308>: DATABASE ACCESSION NUMBER: AK101855
  ref <309>: DATABASE ENTRY DATE: 2002-08-28
gaggcgcgaaatccgaggtgccccgcgaccgcgctgaccggcggcgatgccgatccggcggccggcccacgggcggatcatggccgccgccgcccgcgttactccggcgcttggtcggcgtggctctggtgctgtgtgccagtactcaacagcaaacttatccaaacttgaatcaagatgagatggtgctcttatcttctttggaaattgaagactttgatggagaaggcaaagacgaacgcgaagagagcagcaaacccaacaacggcagttgctacataacctaagtagtcatgcctaaacccaaagtatcgtctgatgtaatcttgcaccacttccccgtcctccagtgtagagtttgtgatatcaccatattgtgaggcaacaagtccgtacagtgtccatgccactgggcatgcccaggaataccacctccaccatattggtatcctctgcaaaccagccatgtatatttcagcatcaacagtatagaaaaaagacttaaaggttggtatggacaatgaatgaatatcagatacttactggtcgggggattaggaagccggcaaagatattccatatgcaatagaatgcagtagagactatggcagcaatgtcgctgtttggtgtcatggcgactgccatcatcccatagaatgtgaagtacatgaaggtgaagaacatgaagaacatgtaccagaagaatttttcaactgtccagtcaaagccaatcaggctgtagacgatcagatcatacacgacagtctggaggaagatgtgtggtatctcaataagaacctgttgaaaggataaattgttagatttttttccgtataataaaggaagcacactgcaattgttttttgtttaaatatgcagctatgaccatttacctgcgcaaatgcatatggtagagcggagtacattccagcggccttttctcggtagaacactgttcgctcaacgtctacaattggttggacagtctggccgttttgaattccaatgaaaaggactgctgcatacatggatcccaaagagttgaacagatccaatctcttgtttctgtaggcaagataagcacaggttcaagaatatagtgccgaaaatgagggctataactgttgtgaagaagattctagttgctgtatacgacggatttctccagtatgatttgtgctgcttccacaggcaagccatgcattgtgtgaagaagggctgtgaaaattgagttgggaagtgtaggtccgttgatccaggtggaggtgtgcttaattcacttatcaatgttttattcctcctgcaatggtgcaattgaatcagtgatataacacagaaaaagcagaaaaagaacattttggggggcttttgtcatgaaacatactggtatagatcagaattcctgtatacttcagcaaagttgatgccaaggatatcttcttgggctagggtggtaacctccaacacccatgttgcaggattgtaaccatccttgattttcctcactccttgtataccctaaatttggagcagcgagcaaggttaccatgcatgtcttaagttggaaatttggtgttcacttcagtatttaagtatcgaggctcacctcaaagtaattgatgagatggcatgagttgtgtcccagggggcccacatatatttcttcacctcctcgtttcatcagaaacagctgcagaagttcaagaatagcctgttagtgttcgtatgagaggcatccaagaattgtgcaattttggcccttgcttcaacttacctcatcaaaagcttcaaatatgtcaatgctgggctggtgaattgtgcagacaacagttcttcctgtgtctactgtgtttctaactgttctcatcacaattgcagctgcccttgcatctagtcctgaagttggttcatccatgaatatgatggatgggttggcaacaagctcaacggcaatagtgagcctcttcctctgttcggtggataaaccattcactcctggcagtcccaccagtgctcccctcagtgatgtcagctcaacaagttccatgacttcttccacaaacatctgcatccgtgaagtgagtcagcatcacaatgcaaaatgtgtaatgagctagcagagtaaaggctgtttgactaacctttcttgcttctgagtctacttcagagggtaaccggagccatgctgagtacagaagggactcgtaaacagtgacatgtggagagtggatatcattttgctcacagtaaccagcaatccgagcaaaggtctcttgcttctttgggtatccagagatggagatgtctccttcaatgtaaccgcctgttttccttcccgccagcacatccattagagttgttttaccagctccgctaacacccatcagtgctgtaaggactcctggcctgaaagctccgcttacacctttcagcagcagtagccgatcttcagtaacacctttatctttcatttcctgtcaaaaattgtgcatcgggattagcataatagcatttggtggtatatttgttacacacagggaggcttccaatgcttgcttacctgaggcatatccacagagtatctgatattgtcgaaggtgatcgacagaggagtaaatggaagtaccattcctctcttcctggtgtcagctcctgtaatctctcctcttcctgcatttgctatacttgttaaaaggacacaacaaaatggcatatcttgttcaatgccataatacagaggaatgtactaaaaagactgaccatcagaaggtgaattctgggaatctgttccaagagtcagcagctcaacattttctccgagctgagatgatactcacggtcaagccattcaaggaacagaatgaagaggatgttgaagagcatgatgtatccaagtaatgcgccaacgccaatccagtaccagtttgcatcgacaaatatgccacgtaccttaaggacttggacaccaagcgtgtcgttgctttgtgtcggatcaacaacctgcgcaaagattaggttgcttctgagttatctaaatccaaacttagattgtcaggtttgagttggtgcaggagacactgcattaccttgttccagctgtggccaaggaactcattaactgctatggcattctgtgcatacatcagaggagaggaccagtagccccaaatccaccatttcttgatgttttctgcaaaaggagaactcagtacaatgctcttgttactactggaacaatatatgagttacttggcatacctctagatatcaagaaaccaccgagaaccagaagaataagctgagcaaatgacccaaacgtgtctgcaacaaccatctctcttcctagtgcagcgagaagccggaagagaccggacgccatctggctgatcagtaccagcagcacataatggcggaagaatctctctatgtttggatcgaagcccatgacatagtatgtcatgcaaatccacacagcacattctaagaatgatattgggattttgagcacccatgtaggtaatgcatacgcccatgatggatagaaaagcaggtccctctgcttatagaatatcggcagctttgcaatgctcatggcgagctccgcaaatccattgaacaaatgtgtgactaatccaaggaacatagcacccaggaagatcgcaccatcttctacactgcgtcgatgcatctttgtacgcaggaagaccgtcattccgatgcttccaaggattatgagctggtacagatgtacctttcgtcagattttatttatggtcccgaagtagagagaaaaaattcaagatgcgagatacatacctggagaattttgaagatgtaaacaaatgaattcctcttcatcagcagccactccctcgagaagcatgccttggtaagctccatcttgctgatgccatacctggaagttgtgagagcagcaggatggttcctggttcggtcaaagggcaccctgagctctgagcccagattacgcccaacatggaattccttgaaggcctccgaaaagtcgttcaccgagatgtaccggtatggttcatctctgcggcaccagtactgatgctgatccttcctcgatgtaacctgtgcattcagaatgaacactgtcaaatttgagttcctagtccaacatgcagggaagattactctgctggatcactcacttcttgcaagaagtctgcaacacctttcctctccggacatttgaagcccattgcctcaaagaactcgaggatgttttctcgaggtccctggtatacgatttggccctcggagaggagaacaatgtcatcaaagaggtcatacgtctcaggtgcaggctgaagcaacgcgatgagcgcggttcctcctaagatgtggacagattgcctgagggagttgacgatctggtatgttgtggagctgtccaaaccggtggagatctcatccatgaacagagcctttgctggaccgacaagcatctcacctacgtaaattcagtggattgagaggtcagatttttttcactatgatcgaagaacactgtcatgcctagttctttgttgactgcagattgcacataccagttgtgacacgtttcttttgtcctcctgagatacctctgatcatagcgtctccaaccattgtatcagcgcagatttccagacccagaatctgcaatagcaacttaattagttctagtcatgtatatttcttctttttttctctattttcctgtagtagtgttgtactcactttgagaatgtaatctgtgaccacgctttcctgaccttccacggagatggcctgtttgcacaagggaacaacaatttgagcacttcttgtatacttttccaaaaaaaaaaagaaaaaaaaggaaggcttgtgctttg

SEQ ID NO: 26414 - DNA, 2012 bp, Oryza sativa
  ref <308>: DATABASE ACCESSION NUMBER: AK101856
  ref <309>: DATABASE ENTRY DATE: 2002-08-28
tcccccttccacttgtctgacgggccctcgccttcccttcgcttcctccccatctccgcctccgcctccgccgccgcgccgccgccggcgacgactccgacgagcgacccctccgcgggcaccgggtcgccatgtaccgcgccgcctccggcctcggggccatcaagcggcatggactggatggtcaaatgttgaatgttgcgattaggtgtgctagcacaagtgttgcacagaggtcatcaggtggcttctggacctggctgacaggtgcacggtcaaatgcattacctcctccagattttacacttccaggggtcaccattccacctccgctacctgaccttgtggagcctggcaagacaaaaatcacaacacttgcaaatggtgtaaaaattgcttctgagacaactccaggaccatcttgttcagttggagtatatgttaattgtggttctgtacatgaagcacctgaaacactaggtgccactcagctgttgaagaagatggcctatacaaccattacaaacaggagccatttgcgtgttgtgcgtgaaatcgaggcagtaggtggcaatgtgaaagcatctgctaaccgtgagatgatgagctacagttatgcagccctgaaaacttacatgcctgaaatggttgaggtgcttattgattgtgtacgcaatcctgcttttcttgattgggaagtcaaggaacagataatgaaactgaaggcagagcttgcagaagcttcaagtaaccctgaaacttttcttttggaggctcttcattctactggttattctggtgctttggcaacccctctgattgcctcagaatcctcagttagccgattgaatacgaatgtcctagaatacttcttagctgagaattacactgctccccgaattgttctagctgcaacaggtgttgatcatgatgaattggtatctattgctgaaccacttctgtctgacatgcctggtgtaactggaccagcaaagccaaagtctacctatgttggtggggaatatagaagaactgctgattcatcgaacacagatgttgctttggcatttgaggtccctggtgggtggctcaaagaaaaagaatttgtaacagtatcagttcttcagacccttcttggtggcggtggcacatattcctggggaaggcatggaaaaggcttgcattcaagtctaaatcatctcgcaaatgaattcgaccagattagatcgatagctgctttcaaggatgttcacagtaacactggcatttttggaattcatacatctactgatgcagcattcgttcctaaggctattgacttggcaaccagagagctcacttctcttgccactcctggaaaagttgaccaaactcaacttgaccgtgctaaagcgacagctaaatcagcaatcttgatgaacctggaatcaaaggcatcagcaactgaagacatgggacggcaaatattggcctttggtgaaaggaaacctgttgagcaccttctcaaggctgttgatggtgttactctgaaagacattacagcccttgctgagaaaatcatatcatcaccattgacaatggcatctcatggaaacgttctgaacgtgccaacttatgattcagtcagtggcaagtttcgctcgaaatgagtagtaatgtggtcattgttttcctcctcctggacaagttttaactgttgatagtttttcctcaggccattcattggcagggtttcagagagaaaaataaggagcttcatacaattttgatcatttaactctggatgattgagaataccatattttacctttttctgcaacatttgtccacttgagttggaattttttatgctgttttcatcagttttatgggcctgtaaattttagggccctctttcggtggcggccagggcctgtacaaaataccggtctccttgcaaaatctttgacacgaatgctgaaacacttgaataaatattctatctatactcttgcatgacagtgaaattctgc

SEQ ID NO: 26415 - DNA, 3412 bp, Oryza sativa
  ref <308>: DATABASE ACCESSION NUMBER: AK101857
  ref <309>: DATABASE ENTRY DATE: 2002-08-28
gaatcccaatctcctccccccttccttcctcggccagagaaaaaaaaaagagaaaaaagaggagaggcctcgcaactgcaaaccctcgctttctccgatcgaattgctcgcccgagcaccaccagttcgccgcccttcccaccaccagtcgcctccctcccccgcgcagggtatctcctccggccgccccagtggcgattccccccgagctcccccgcgcggcgccgtggccatgtcgctcacctgaggatacggtcggtgggctgtttcttgcaagagtctctcccccgagccccccaagagaaacagcccgggggacgccgagttgttgattcgatcgccggagttgcgccgaggtgaacctgttttttgtttttggtggtggttccgtctcggttaatctgctttaacttggaggcaaaggctcggtcttcgtctgaggaacgcgggggagcggtggtagcgtcgcgtgcacgggtcctcctcgaggtcggcttgatgcggagcggcgcgcaggctcctcgaggcggcggaggcggcggggccttctcgaagcggacgctgtccggctacatgaggatcatgtcgtcgggggcgtccacggccgcgtcaagcctgctgtcggtgggcgcgtcgctggtgaactcgatcgccagccacgacgaggatgggagccgtgaccaggtacaatgggctggatttgataaacttgaatgtgggggtgacatgctgcgacaggttttacttctagcttacagatctggtttccaagtatgggatgttgaacatgctaatgatgtaagacagctagaatccagacatgatggtacagtttctttcatgcaactcctaaagaaaccaattgcctctacaaacagtgaagacaaatttgcagatgaacggccactgttagctcttgcttgtgacggaactagcacaggaagtctaatcagcaatgatggcaatggccctgttcccaatggagccaatggtactctccataatattggccatgagaatcatcctactgtacttcggttttattcattaagggtccatgattacgtgcatacaataaagttcagatcaactgtttattccatacggtgcagttctagagttgtagctgtatctcaggctaatcagatacattgttttgatgctgcaacactggagagagaatacacaatccttaccagtcatatagttccaccaatttcaagttatggaccacttgcactgggtcctagatggattgcatattctgggaatccagtcccagttccggatacaggccgtgttacccctcagcttcttaatctatctcccctagttccacaacctggttcaaatggcagtgttgtggcatactatgcaaaagaatcaagcaagcaactggcttctggcattataacacttggtgatgttggatataagaagttgtccaagtattgttcagacttaattccaagtagtaacaatgttataaaccaaaggaattctggcttcaaagcaaatggggcaacaataaacgggcatacagacagcgaatatgctggaatggttattgttcgagatattgtctctaaatcaatggtggttcagttcagggcacatactagccccatttcagcactctgttttgatcccagtggaactttgttggtgacagcttcaattcacggtcgaaatatcaatgttttccgcattctgccttcttcgcatgggagttcatcagaagctggtccaaatggaacctgtgttcatctgtacaaattgcaaagaggcatcaccaatgcggtcataaaagatatcagttttagtgacgacagtgaatggataatgattagctcttcaaggggaactagtcatttctttgcaatatctccatattgtggatcaacaagctttcactacaacgaaaacaatcttgcagaaaatagttatgcggtggattcatcagttaatcatactgcccattggtcccaaaactcagctccctctctgagtctcaatcagaagatactctctgttacgggcccccctgtaacattgtctgttgttagtagaataagaaatggaggcaacctgttgaagggcgctgttcatggtgctgcagcatttgcaacaggtgtttccagtccaatttctggtgctattgcttcaacatttcacaattgcaagggtgccgtcaaaaactcagatggaagttcgccttgcatgaagtatcatttactagtattttctccatctggaagcatcattcagtatgttctccatcgctctgcagagcaggatcctggaattgattttccctcgagtgccattccttatggatcacaaagagaaactgacactaggtttattattgaggctcttcaaaagtgggatgtttgtcataaaagaaatcgaagagacgctgctgagagttttgtatatagtgattttgacatcggagaaaacagtaaactttttcagaaagtggcaaagaaaggaactagtgtttatccatccaatggcactgctgttgaaaagcagaagctaggtgatgagaatcataatttttatatttctgagagtgaattgcagactcatgttgttccaacaccactctggtcaagatctgggatgcattttcaagtaatgggggatggagctctagaagcagacaatactggtataatttcaggtgaacttgaaatagaaaagctccagactcgcaatattgaatctaggtcaaagaatcttataccagtatttgaatctcttcatacatccaggtttcaacagtcaagggtgagcacacctgatagtaacaaatatggattgcttcagcgtcaaaagtccggattttcagaggacggtagactctcctgcagaagcagttctagctctttggactgcatgtctgaaggcccaattagcactgatgataatggttttggtcaatgtttagtagaagatagtggtggtgctgtaaataagaacccaaatgttaacccccgttccgagcttgtaaataatactcagagccttaacacagaggcccagctcggatttgtaaataacaaagaggattgtgaagacagagagcaactcccagatttgtgatagcaactgtgatcaaagacgatcactggtgatggaggagcttcttgaatcgcaagtcttcattgtgcgtgtgtagctgctattctttcatttctcctcctggagttcttgacctctcttctatagctctatttataagcattcatgataaatttactgataaaaaaatgaaggggaggtcgaattaaggcccaatgggtatgggagcggtggtgctgtgaagttgggtttccatcttacaaaagaacgtgcacataacaagattgttcattgcattttcaataatagctcttaatttgtg

SEQ ID NO: 26416 - DNA, 2175 bp, Oryza sativa
  ref <308>: DATABASE ACCESSION NUMBER: AK101858
  ref <309>: DATABASE ENTRY DATE: 2002-08-28
ggcgtcgcggcggccgcagaggatggcgccgccgctctatctcctcctcctcctcccgctcctcgcctgcgccgacgaggtccctgaccgctacgccgtcctccgcgccccgcagggcccgggtgccagcgcggcggccaaggagtacctcgacccgaccttcccgctccccgcgcccccgccggcggcgccgtcctgcaccgtgccggtcctctcctactccttcggcgacacctacggcgccgcgccggccaaggcctcgtacgcgccccccgccgggtgccccgcgccctggtccctcgtcgtgctcaccttctccgcctcctgcgccggcgaccagtacgaccgcgtcgccgccgtctggctcgacggcgccgagctcctccggaccaccaccgcggagccgacccccgagggcgtccgctggaccgtccgcaaggatgtcacccgctactccgcgctcctccgctccccgcccggcggcgtcctctccgtcatgctcgagaacgtcgtcaacgacaagtacaccggggtgtacagcgtcaacgtctcgctggagttccatggaactccgccgtacctctccgacgcggcatcatcctcccctgctggcgtcgcaagcaacgatcccaaggaacctatgctgccggagtcatacttccagccggcggatctcatcgtcccgatctcggatgtcgccggcaacggcaagggcgggttctggttccgcatccagaacgcgtcggactcgcactccaggctcgtaaccattccgtcgagcacctaccgtgcggtgctcgaggtgttcgtgtcccctcactccaacgacgagtactggtactccaacccgccggacatctacatcagggagaacaacctcaccacgcggaggggcaacgcggcgtaccgcgaggtcgtcgtcagcgtggaccaccgcttcgtcggctcgttcgtgccgttcccggtcatctacacgggcggcatcaacccgctcttctggcagccggtggccgcgctcggcgcgttcgacctgcccacctacgacgtcgagctcaccccattcctcggcctcctggtcgacagcaacgcccacgagatcggcctcagcgtgttcgacggcatcgccgagtggctcgtcgacgccaacctgcacctctggctggaccccagcacgtcggacgtgcacgccgcgctcggcgcgtaccagacgccgcgcctgaaaatctcacgccactactcgacgcggctgctcgagggcaggttcaagatcaaggccaagaggaagtcctccttcagcggctgggtcaagtcctcgttcggcaacttcaccacggaggtggaggcggagctgaaggcgaccagcctggtggagttaaccggcgacggccggaacaagaccgtgtcgctggaggcgaagcaggagacgaagacgctgatccgggcgggcgacacgcggaaggtgatcggcagggtggagagggaggccaagtacccgctgtcgctcttcgcggagaccgaggacggcgagaacggcacgtccgtcgtcacggtgagcctcacccacggcctcagcgtggagacggaggtcgagacgaaggccctcgagagcaaggagaagctcgatgacgcgcaggccgcgcaagggtggatggtgctcctggaccacgacgtgctcaacgggtcggtgacgacgacccaggcgtaccggttcagcgacgacgagcgggagtacgagcgggcgatcgacgtcgtggacggcgccgtgctcagcgacaacgtcaccgagagcttcagcgccctggccgccgcagcggcggacgctcgccgccgccggttccacgccggcattgctgcgttgtaaggctaccttggattgccgtgggagttgagctgtttcgtgtcatcgatggctacggaatccaggtgaaattcgtcagttcgaagaattcttatgtgcaggattcgtttccgaccgcatcgacgtgaccaagactattgcttttcttcagaggtaaattgtgcactgtaatttgtatttagcgtatagtttctgtaatctgtattatgtatgcaattttgtcggtgtgaatcgtcgtttctgcttttgcagttcaaattttggttgtgtttgtcttaataaaaacgaaataaagctggaaattgcagattactacc

SEQ ID NO: 26417 - DNA, 2988 bp, Oryza sativa
  ref <308>: DATABASE ACCESSION NUMBER: AK101859
  ref <309>: DATABASE ENTRY DATE: 2002-08-28
gccacgcacgcacgcctttccttccttcctccctcccctccctccttcccccacccgcttcccttgccgtcgccgccgccgccgaccgccgcgggaggggaggtccccggcgccatctcccagaaatggacgcctgtttttcaacacagcttattgatggagatggcgttttcaatgtttctggattggagaacttcatgaaggaagttaaaatgggcgaatgtgggctttcatatgctgttgtgtcaataatgggtccacaaagtagtggaaagagtacacttttaaatcaccttttccgcaccaatttcagggaaatggatgccttcaaaggaaggtcacagactaccaaaggtatatggatggcgaaggcccataatattgaaccatgcactcttgtaatggatttggaaggcacggatggtcgagagaggggagaggatgacacagcctttgaaaagcaaagtgcactgtttgctttggctgtttcagatattgtgttgatcaatatgtggtgtcatgacattggtagagaacaggctgcgaacaaacctcttttgaagactgttttccaggttatgatgagattgttcagtccacgtaaaacgacattgttgtttgttattcgtgataaatcaaagacacctctggaaaatcttgaaccgattctaagggaagatattcagaagatatgggatggtgtccctaaaccccatgcccacaaggaaactccactgagtgaatttttcaatgtcgaagttgtggccctatctagttatgaggaaaaggaggagttattcaaagagcaggttgccagtttaagagataggttccaacagtctattgctcctggtggacttgctggagatcggcggggcgttgtccctgcatctggtttctctttcagttcacaacaattttggaaggtcattaaggagaataaagaccttgatctaccagctcataaagttatggtcgctactgtacgctgtgaggaaatcggtaatgagaaaattgccagttttacagctgatgaggagtggcaacaatttgaggaagctgttcaacatgattacgtgcctgggtttgggaagaagatcagcaaccttcttgacagatgcttatcagagtatgacatggaggctatttattttgatgaaggtgtcagaacttcgaaaaggcaccaacttgagtctaaacttttgcagcttgtcaaccctgcataccaaaatattttggatcatttacggactagaactttagaagtatttaaggagtcctttgacaagtccctagaaaaggagggttttgctgttgctgctcgtgactgtactaaggttttcttggagaagtttgacaaaggatccgaagatgctgctatccaacaagtgaaatgggacccatcaaaaattaaggataagcttaagcgtgacattgaggcgcatgtggcatcagttcgtgccaaaaaaactatctgaactttgttccaaatacgagggacaacttaccaaggcactggcagaaccagttgaagctcttctagattcagccagtgaagaaacctggccagcaattaggaagcttcttcaacgcgagacaaaatctgctgtttcgggttttgaatctgccatggcatcttttgagcttgatgaggtgactcagaaagaattactttcaaagctggagagtcacggaaagagcgttgttgaatcaaaggcaaaagaggaagctgcaagggtcttgattcggatgaaggacaggttctcaacactattcagccgtgatgctgactcaatgccaagagtgtggaccggaaaggaggacataaaggccattactaaaactgctcgttcagcttctatgaagttgctttctacaatggctgcaattcgattggatgaagatggtgacaacattgagaacaccctgtcccttgctctagttgacacagcaaggccagggactacagataggagcatccaatcgttcgatccacttgcctctagctcatgggaaagggttccagaggagaaaactttaattacacctgtccagtgcaaatctttatggaggcaatttaaggctgaaactgaatatactgtcacacaggccatagctgctcaggaggcaaataagaggaacaacaactggctgccacctccatgggcacttgccgcaatggctatccttggattcaacgagttcatgacattgttaaagaatcccctttacctgggagtcatatttgttgttttccttgttggaaaagccatgtgggtacagctagacattgccaaggagttccaaaatggatttcttccagccgtcctatcactttcgacgaaattcgttcccacgataatgaacatcctgaagagattagctgatgaggggcagagacctgcagccccagagaggcaaagagagatggaactccaaccaaaatccacaaggaatggttcacacagcaacgtgacatcggcagggtcatccagcataacctcttcggagagtggacccgaatattcaagcccgattgcacactgatcagttcatctatagcttttagctgaaaaccccagcagttgtagtttcaacgggtgagcctttggagaccgaagcgccttgcagtttttgtaagcttgcccttccccatctgatgtacggagattcaatggccccagccagaggttatttatgggattttgggcccagggagtttgtttgtaagaaacgctgtagaatatgttttatttcattttttttttgtaacagcttatatgatggttgtatagaagatttgcggttttatcatctcaacccaaggaggccaggggagcacagcagtgcattctacactactaaatacagttgattgcatggacacgaaaaatgtatgtacatgtcttgaaactgcagtccgattgcttttgagaatgacccgttttgcttaaacaagaatgtattgcgattttgtgagctgtttgc

SEQ ID NO: 26418 - DNA, 1682 bp, Oryza sativa
  ref <308>: DATABASE ACCESSION NUMBER: AK101860
  ref <309>: DATABASE ENTRY DATE: 2002-08-28
ggtctgacttcttgttgcctcttgcctccttcttcttcttcttcgtcttcgtcgtcgcgaaatacaggcgtgtggggcgagagtgatcaggtggcagctgggtgtttcttcttcttcttcttcagctcgagttcttccttagccatggcgctcctgctgctgcgtatgggcgtctccgtcgcgctgctcgtcgccttcttctcctctctgattccgtcgtcagaggcatacgatccgcttgatccaaatgggaacataacaatcaagtgggatgtgctgcaatggactccagatggatatgttgctgttgtttcactatacaactatcagcagtatcgacacattcaatcacccggatggaaactcggatgggtgtgggcaaagaaggagataatctgggcgatgaacggcggccaagcgacggagcaaggcgactgctcaaagttcaaatcaaatatcccacattgctgcaagaaagatcctgagatcgtggacctgctcccgggaaccccttacaacatgcagattgccaactgctgcaagggaggagtgctcaactcgtgggcacaggaccctgcaaatgccatagcatcattccaagtcagtgttggtcaggcagggacgacgaacaagacggtgcgggtgccgagaaatttcaccctgaaatctccaggtccagggtatacctgtggcagtgccaaggttgtgagacctaccaagtttttttcgcaggatggaaggagaacaactcaggctcacatgacatggaatgtgacttgcacatattcacagattgtcgcgcaaagatctccgacgtgctgcgtttcgctctcgtctttttacaatgataccatagttaactgcccaacatgctcatgtggctgccagaataataaaccaggaagctgtgtagagggaaattctccttatttggcttctgttgtgaacacccataacaaggacagcttgacacctctagtccagtgcacttctcatatgtgcccaataagagttcattggcatgtgaaggttaactacaaggagtactggagggtcaagatcacagtgacaaacttcaattacaggatgaactactctcagtggaacctagtcactcagcaccccagttttgacaatctgacaaccattttcagcttcaactacaaatctttgaacccatatggagtaataaatgataccgcgatgttatggggaatcaagtactacaatgacttgctcatgacggcgggtccagatggaaatgttcagtctgagcttctgttcaagaaggaccccaagagtttcacctttgagaaaggctgggccttcccaagacgtgtatacttcaatggtgacaactgtgtgatgccaccaccagatgcatatccatggctgccaaatgcttcaacaagagtgatgtcttcaattctccttccattcattaccatttggacagcactgacattcttgatggtttacgcatagtgaaaggaaatcgtaattttacgtattcaggaaagttttgaccttgttgtgcattacaaagttttagatgatatgttgcatgaagagaagattcagtgcagatacctaaccataaaccgtcgttgatcattgtataaacttacttgtatacatttaatctcagacaagataagatgcaaacacagtacttcttaagg

SEQ ID NO: 26419 - DNA, 3512 bp, Oryza sativa
  ref <308>: DATABASE ACCESSION NUMBER: AK101861
  ref <309>: DATABASE ENTRY DATE: 2002-08-28
gggtggtgttccttgcgcaaatctcgaagcaggggcagcgtcaagccgtcaacccggctcctggcaaaggagcagagccgagatcccccagcaatggcggcggcgcagtgagctcgccgccgattgccaacatgcgggcgacgccaccgccgccgccgcgtcccccggctcgcgcgtacccaggaacgtctcccatgggctcgtctccagccttgccgcgctccaccaacccggcggcgctcctcgcccacctcgccgccgtcctcacctcgcccgactggttcctcaacccttccctgccccgcctccctgccctgctcacgccgtccctgccggagtcgctccccgtcccgctccccgtccgcctcgccgccgcggcggccagggtggccgcgccgtcccgccacctcctcgccgtcgcgctcccggtcgtcctccgcctccactccctctcgcccccgccgctccgcccgctcttcgaccgccccttcgcctccctcctcgcccacctctcccgcttcgccctcgcgccgctcgccctccgcctcttcgcccacatgcaccgccacgccccgccggcgccgacagcccccacctacaacgccgtcatccgctccctctgccgccgcgccgacctcgcccgcgccctgcggtacctcagcctcatggtccgctccggctggcgccccgacgcctacacgttcaactccctcatcgtcgggtattgccgcaccaaccaggtcgacgttgcccgcgacctgttcgacaaaatgcccctgagagggttcgcccaggacgtggtctcttacgccacgctgattgaggggctttgtgaggcggggaggattgacgaggcagtggagttgttcggggagatggaccagccagacatgcacatgtatgcagccttagtgaaggggttgtgtaatgcggagcggggggaggaggggcttctcatgctgcgtaggatgaaggaattggggtggcggccaagcacccgtgcttatgcagctgtggttgatttccggtgtagggagcgtaaggccaaggaggctgaggaaatgcttcaggagatgtttgaaaagggattggcaccgtgtgttgtgacatgcactgcggtgataaatgcatattgtaaggagggaaggatgagcgatgcattgagggtgttggagttgatgaagttgagggggtgcaagccaaatgtgtggacatataatgcattggtccaagggttctgtaatgaaggaaaggtgcacaaggcgatgactttgttgaacaagatgagagcatgtggagtcaacccagatgctgtgacatataatttgttgattcggggccaatgcattgatggacatatagagagtgctttccgattgctacgtttgatggaaggagatggtttaattgctgatcagtacacatataatgcgttgatgaatgctctctgcaaggatggaagaactgatcaagcttgctccctttttgatagtctagaaactagaggcataaaacctaatgccgtgacattcaattccttgataaatgggttatgcaagtctggtaaagctgatattgcatggaaatttttggaaaagatggtttctgcaggttgcacacccgatacttacacatacagttcatttattgaacacctatgcaagatgaaggggtcacaagaaggtctgtcctttataggggagatgctacaaaaggatgtgaagccctcaacagtcaattatacaattgtgattcataagcttttaaaggagagaaactatggattggttgcgagaacctggggcgaaatggtttcatcaggttgcaatcctgatgtagtcacttatacaacgtctatgcgtgcttactgcattgaaggaagactaaatgaagcagaaaatgttttgatggagatgagcaaaaatggggtcactgtagatacaatggcatacaatactctgatggatggacatgcaagtattggacagacagatcatgcagtctcaatcttgaaacaaatgacaagtgttgcttctgtgccaaaccagtttacttattttatcttgcttagacatcttgtacgcatgagattagtggaggatgtgttgcctttgaccccagctggtgtgtggaaagccatagagcttactgatgtctttgggttgtttgatgtaatgaagaagaacgaatttcttcctaattcaggaacttattcttccattctagaggggttttctgaagatggaagaacggaagaggcgacatcgttagtttctcttatgaaagaagatagtatatctctgaatgaagacatctatactgctctcgttacttgtttttgcaaatccaaaaggtatttggatgcatgggtgttggtttgctctatgattcaacatggttttataccacagttgatgtcctaccaacatctgctttctgggcttatttgtgaaggacaaacagataaggctaaagaaatattcatgaattctagatggaaagactatagtcccgatgagattgtgtggaaagtgattattgatggcctgataaaaaaaggtcactcagatatatcccgtgaaatgattatcatgttagagcgtatgaactgcagaccaagtcatcaaacctatgcaatgctgactgaggaattacctgacagggaataatatgccacacaagtctcattcatcactcgaagcgaaatccccatcagctgtgcaaactggcatctcattaggtgctgttcaagcacaaggtgcaccaagtgatgtgaaatggatcatccaacatactctctcacacacaaaatgagttcacgctctatttgctctctggaagagcagtgattatcagatttttgaagactgatatgagcgcaaagcatttgaatccagattgtgtgtgtgcctgtactatatcaggtcgacagatagtgtttacagatttgtaggagccaaaagtcccataccgctatggcaggcttcgctactttattattttattgatctgaagagaggttgccaagtttgattcgacgattttgtcacggatcttctgagttactgtgtggcacaatttctgatgctggttgttgaaccgatgagtgatctgatttttttgggtggcaagtattgttgccagtaaaatatatggaagggccgaaagatttggaaatgcactcagcgatcagtttcaataaatcatcaacataggaattactggtcacaatctgggaaagaaaggaatctattaacggacggccaagattccctggcccactcaaaacagcgaaatgcacaaagcctcgatcggcgtctgacaggctgtcacggacgtgggctcacaatcgggctttcaggctgaatgtatggcccagccagataggaaagacagcgttataaaccaaagccacgctgcagccatagctgagcacatggaggtgccacattttgtcacactaaatgttactccatccgtctcataatataatattttaagtttttgtttgc

SEQ ID NO: 26420 - DNA, 2587 bp, Oryza sativa
  ref <308>: DATABASE ACCESSION NUMBER: AK101862
  ref <309>: DATABASE ENTRY DATE: 2002-08-28
gagaggaggaagcgccagatctccacacccacccgcgccgcagatccagccagagccatggcggatctcgccgtggcggcgccgccgccgacggacctcttcggcgagcccatcgaggcgcacccgccgtggttcaagcccgactccttcctccgccccgacttcgacccggacgcctacgtcgccgacctccgctcctacgtgcccctcgacagcctcgccgccgagctccgctcccacctcgcctccctccgcgccgagctcgtcggcctcatcaaccgcgactacgccgacttcgtcggcctcagcgcccgcctcaagggcgtcgatgccgccgccgcgcgcatacggcccccgctcgccgagctcagggacaaggtcgcctccttccgcgccgcagcagccgccgggctcgccgcactccgctccggactcgagcagcgcgcggctgccacggctgcacgggagcttctcgagctgctgctcgacacctcccacgtcgtctctaaggttgagaaactgatcaaggaactaccatccgccccatctgattcatcaaatgttgaggctgtttctggtgataagggctactcaggcaacgttgccacaccaccaaacatggatgatgggacagatgttagggagacacaaagcattctcttagaaagaatcgccagtgagatgaaccggctcaaattctacatcagtcatgcacagaacctcccttttattgaaaacatggagaagagggcccaaggtgctacaaaactacttgatggtagcttggagcgttgctttgtggatggtctagaacatcgtgatgacaaagtaatatacaactgtttgcgtgcttatgctgctattgacaacacatcttcagctgaagagatattccgtacaacagtggtgtcgccgttgatccagaagattgttcctcaaaactatgcaaaagtggttgctggggtatcttctgatgacctagaagatgattatgagcagataatgcaatgcgtagaaaaagattgcaaatttattttggagatatcctcgttggcaaactctgggcttcatgtttttgattttctggccaattcaatactcaaagaagtccatttggcaatccagaaggggaaagcccggggcgacctctcctggaaaacctaaacagttcctcaaaaactacaaagcaagcttaagattccttgattttctggaaggttactgttcatctaagcctgctgtaacaaagttccgctccgagcctgcttatgccgatttcatgcgacagtggcatgttgctgtctacttcacattgaaatttcaggacattgctggtggtcttgattctgtgcttacagccacaattactcctgctggaatgcatgacaatcaagcgaagccgcagacactgttgttgaaacaaagcgttaagctcttagaaagtttgcaggcctgctggagtgacgatgttcttgttttctcccactctgataagttcctccgcttgtctttgcagcttatttcaaggtatacaacatggctttcttctggtttggctgcacggaaagcttctgatgggggctcaagttctcctgcggatgctgaatgggcactatctgtacctgtggaggatttcatttatgtaatgcatgatgtaaatgctgtaataagcgagcttttggaatcaggccaatttgtggaacatgtaaaccaattgctagcatcatgcccaaccgaagtacttgctctcgtgaaacacagtatactgcaagctgttgagcctttaaaggagttgttgcctgctataatgaatgtcatgattatggtgatagttaaaaggtctaatgaggacttgaagcacctaaagggaataacagcaacatatagaatgaccaataagcttccagtaaggcattctccatatgtatctgggattttgcatccacttaaggtttttcttgaaggtgaccgtattcactatttatcagaagatgataaagcaaagctgcgccgtggatcgacagataagatcacttcaatttattatgacatggtgtctgaagtagtcactgtggcaaggaaaactgaatcatcattgcaaagactacgtcaaggtgcacaaagacgagtaggagctaataccgatacctcggataacatcatttctgatactgacaagatctgcatgcagctatttcttgacattcaggaatatgcacggaatcttcgtgcaataggaatagatgcaagggaaatcgaaacattcagagctttatggcagtgtgttgctcctagagacaaacaggataacatccagttttgatgtaaagatcaatttgagtacatagaagaaaattgccttaggtccctcaatatccgtagatacgtctcgtgttgttcgtttaggatggatgttggaatgatttttatacatagagctctggattttgattgtttcattttggacggtctcctccggattatacaagggtcaagggtacatccaaaatttgagaagtgtatcaaacctcatgttgttggaaacacaccgattctgttgaaagattgttttagtgtcttggtatct

SEQ ID NO: 26421 - DNA, 1832 bp, Oryza sativa
  ref <308>: DATABASE ACCESSION NUMBER: AK101863
  ref <309>: DATABASE ENTRY DATE: 2002-08-28
gaatctcttcttcacatcaatatcggagtgatcgatcagtctcgtcgcggttcgatcgattggcctctgatccgtacatcttcttgtgtgatcgatcaagaatcattcaagattgcaaggtgagtaagtatggcgagtgatggccacctcgcggcgccgctcctcgacggcggcggcggggtggacgacgcggcgcttctccggcggctctacgtggggcacttcctggcgaggtggggcgcgaggatgtgggagttctcggtggggctctacatgatccgaatctggccgggctcgctgttgctcacggcggtgtacggcgtcgtggaggcctccgccgtggcggcgctgggccccatcgtcggcgccgtcgtcgacaggctcgcatacctgcaggtgctcaggctgtggctgctgctgcagggcgcgtctttcgtcgccgccggcgtctccgtcacggcgctgctcgtctacggcgcccggctcgccgccgcggggttcccggcgttcgtggcgctcgtcgtcgtcaccaacgtctccggcgcgctcgccgcgctctccaccctcgctggcaccatactgatcgagagagaatgggtggtggtgatcgccggcgggcaaccggcggcggtgctgacggggatcaactcggtgatccggcggatcgacctgagctgcaagctgctggcgccggtgctgtccgggttcttcatcagcttcgtgtccatggaggcctccgcggcggcgctggcggcgtggaacctcgccgccgtgtgggtccagtactggctcttcgtctccgtctacgccggcttcccggcgctcagcgagaccagccagatctcaagacggcgcgccgacgatgacgaggcagcggcggcggcgcagccgcagaaggtggagcggctgtggatgacgatgctgccgtgctgggagtcgtgggcggtgtacgcgcggcaggaggtggtgctccccggcgtggcgctcgcgttcctctacttcaccgtgctgagcttcgggacgctgatgacggcgacgctggactgggaggggatcccggcatacgtgatcagcctcgcccgcggcgtcagcgccgccgtcggcatcgccgcgacgtgggtgtacccggcggcgcacgcccgcgtgtccacgctccgcgcgggcctctggtccatctgggcgcagtggtgctgcctcctcgtctgcgtcgcctccgtctgggccggcggcgccgcgccattggcgtcggcgtggatgctgatgggcggcgtggcggcgtcgcggctggggctgtggatgttcgacctagccgtgatgcagctgatgcaggacggcgtcccggagagcgaccggtgcgtcgtcggcggcgtgcagaactcgctgcagtccatgttcgacctgctcacctacgtcatgggcatcatcgtctccgaccccagggatttcggcgagctgatcgtgctgtccttctttctcgtgacctgcgcggcggcaatgtacacgatgcatgtgtaccgggtgaggaagcatctgttccatctcgacaggatcctgcccaagatgaactggatcaaagcttcttgatatggcatcccgtgatcgataatgatgattcatcagtgattttctccagcaaattagtactgatcaatgctggatactgtacaattatctgctttggtttacttcaattttagacctgttcactggaacttttgctcaaaagatttgtggcatctggagaaatgccacatgttccatccaactggggcttgaagaatctccatgtaattaaccttacaataatatataagtactcgcttgatcccatg

SEQ ID NO: 26422 - DNA, 1450 bp, Oryza sativa
  ref <308>: DATABASE ACCESSION NUMBER: AK101864
  ref <309>: DATABASE ENTRY DATE: 2002-08-28
gagttggcttcccaccaccaccaccaccaccacctcctctcctcttctctccaggcgcgccgctgtgcccctgtgctcacctctcgtcgcggtcgccctcgacggttccaccacccgcggaccccgctcgccgccgccgcagccgtgcgcggatcgcgacgacgcgaggcgatcggcgagcggcccgggggaggggaggagatcgcccgtcggcgcccccccggccccgccgagccgcgtctcctcccgtccgatcgcggggcttcctggggcttcagtgtgcgccacttctctcgggacgggacgggacgggcgcgattgcggcagatgagacatggcttctatgttaaacattgttataggctctcatgtctgggtggaagataaagattcagcttgggttgatggtgaggtcttccggattgatggtaaaaatgcccatgttcgcacaaccaagggaaagacggttattgcaaatgtatcagatatacatcctaaagacacagaagcaccacctgatggagtcgatgacatgacaaggttatcatacttgcacgagcctggtgttttagataatctggctgtcagatatgcaagaaatctaatctatacctataccggcaatatcctgattgccataaatccgttccaaaggctgcctaatcttgttgatgtccgaactatggaaaaatacaaaggtgcaaaccttggggatctagatcctcatgtatttgcaatagctgatgtctcttacaggcaaatgatgaatgaaggaaggaacaattccattttggtcagtggtgaaagtggagctggtaagactgaaacgacgaaactgctgatgagatatcttgcatatttgggtgggcggtctggaacaggaggaaggacggttgaacagcaggttttagaatcaaacccagtccttgaagcttttgggaatgcaaaaactgttcggaacaacaattcaagtcgatttggtaagttcgttgaaatccaatttgacaagagtgggaagatatctggcgctgctattagaacttacttgcttgagagatctcgagtctgccaaatcaatagtccagagcgaaactaccattgcttttacttcctctgtgctgcgccaccagaggatataaaaaggtataagctgggggatccatcttcatttcattacctcaatcagtcgtcttgcattagagttgatggtatcaacgatgctgaagagtatcttgtaactagaaatgctatggatacagttggcatcattgagcaagaacaggaagctatattccgggttgttgctgctgtgctgcatcttggaaatattaattttgcaaaggggagtgaggtagattcatctgttataaaggatgacaaatctagattccatcttaatacagccgcagagctcttgatgtgtgactgcaagaagttggagaatgccttg

SEQ ID NO: 26423 - DNA, 1718 bp, Oryza sativa
  ref <308>: DATABASE ACCESSION NUMBER: AK101865
  ref <309>: DATABASE ENTRY DATE: 2002-08-28
gaccgcactctcgctgctgctgctgctgctcgcgacgccccgaacccccccatgttcgccggcggcgcggatggcggcaacggccacctgccgcggccgcggagggcgcggcgcggcggcggaggcggaggaggaatggggtctcctcctctggggccgccaccgccgccctgcaccgactacgacatggcctacttcaaggcgtactcccacatcggcgtccacgaggagatgctcaaggaccatgtgggaactaatacttacagaaatgctatcatgcatcaccaggatttaatttcaggcaaagttgtgttggatgtgggctgtggcactggtgtactttctatattttgtgcttttgctggtgccgctcgggtctatgcagttgatgcaagtgatattgccttacaggctatggaaattgtgagagaaaatgagttatctgacaaagtcattgttctgcacggtcgaattgaggatgtcgaaattgaagaaaaagtcgatgtcatcatatctgaatggatgggctacatgcttctgtatgagagtatgctggggagtgtaatctttgctagagataaatggcttaaaccagggggtcttattcttccatcgcatgcatcgctttacctggcacctattacaaattcccacagatatcaggatagtgtttacttctggcaagacgtgtatggtataaaaatgtcttctatgatgcctcttgcaaaacaatgtgcattcatggagccatctgttgagacgattagtggagagaatgttctgacctggccatcagtggtggcgcaggtggattgttataccatacaagctccggagcttgaaactatcactgctacatttaactatacgtcgatgttgcaagctccattgcatggttttgcattttggttcgatgtcgagtttaatggaccagtgcgccagagatccaagaagcaagcaaaccaatgcttggatgggaacacacaagatgccagcccaagtaataaaaagaaaaaggcagatgccccaattgttctgtcgactgcaccggaggatgcacctacccactggcagcagaccctattgtacttgtttgaacctatcgagctaaagaaagatcaaaatattgagggttctgttaccatatctcaaagccagcaacatgctcgcttcctcaacatctgcctgaaatattttactagagatcaatggtatgttaaagaatcggtgatgaaataagacgggggtagcttcaagagtggactgcaggatctcatatttgtttttcctgtgcacgttgaagcttacttgcaattttggagaatctttgacaagcgtcacgtactgacatcctgatgacaagcgtcttttggttcctatttggaaagctggattttttttttaggaattgagtgcaactccgctagaattcgtacagaaatcctttttttcttgaaaagggcctgattagattaacagcctgatgatcatgtgcattcagctgatgaaaggagcagtgagaaactcataattacatgccgaccaagggtgggataggttttcctgttaagtttgtcttagctcatgtcatttggttacgctttgttattttttcctatagactaagatagcaatgttcttttctttgtaagaacaaattgtcaacattcatgcggcccttgtggtaggctatcagcggcgtgattttctgattttcc

SEQ ID NO: 26424 - DNA, 1149 bp, Oryza sativa
  ref <308>: DATABASE ACCESSION NUMBER: AK101866
  ref <309>: DATABASE ENTRY DATE: 2002-08-28
gagtagaccaccggcatttacaccccgcaacaccccccctcatctcgccgaacccacgtcttttaataacaaagcagcttgccaccgtccctgcctctcctgctttgctttgccttctcggagaagacaaatctactgtagctgcttgtctctgttcgccggtggcgaccgtgagaggaggaggtagtcctagtcctagtaggcgagatgagcggcgccaccaagttcatcaagtgcgtcaccgtcggcgacggcgccgtcggcaagacctgcatgctcatctgctacaccagcaacaagttccccaccgattacatccccaccgtgttcgacaacttcagtgctaatgtttcagtggatgggaacatcgtcaacttgggattatgggacactgctggacaagaggattacagcaggctgaggccactgagctacaggggagcggatatatttgtgctggcattctcactgatcagcagagcaagctatgagaatgttctcaagaagtggatgccggagcttcgccggttcgcaccgaatgttccaattgttcttgttgggaccaagttagatctacgtgaccacagatcttaccttgcggaccatcctgctgcttccgcaattgcgactgcacagggtgaagaacttagaaagcagataggcgccgcggcttacatcgaatgcagttcgaaaacacaacagaacatcaaggccgtgtttgatactgccatcaaggtggtccttcagcctcctcggagaaggggggagacgacgatggcaaggaagaagacaaggcgaagcaccggctgctcgttaaagaacttgatgtgtggcagtgcatgtgttgtttaggacctgtctgaattcttgaaggtgtgtaagcgttgtgtaatggcaagtgagtttgctgactgttctgctgcttccatttactactactaagctctttcgtgtgtttgaattactacatctagaactagagcatcaggctcatagactgacttcatatcaggtgtttgtatcattaatattattatgtaggaaggttgtggtttgtggaacaactaaatacaacaatgcaggctatgttgtagtatgctctgctactggtgtatgttataaatataaaattctgctacatacttttgt

SEQ ID NO: 26425 - DNA, 3060 bp, Oryza sativa
  ref <308>: DATABASE ACCESSION NUMBER: AK101867
  ref <309>: DATABASE ENTRY DATE: 2002-08-28
ttggcgcaaatccgaaaagaaaaacaaaagaaaaaggaaaaaaaaggggggaaaactcaggaagacgactcctcgccgccgacctacccgagcgaggagcaccccggcgggcggcggcgcgtggcggatcgcgcgggttccggctccgagcctccccctcccctctctctctcctgggctcgtcgtagtcgcggcgggcgcgggaggtggtctccggcggcggcggggcgcgtggtatggtccgtggcggcggcgggggctcgaccacccggcgaagttttttttttcttctccccgatgctacggctggtggggatcggcgagaggctgttggcagtcggaacaaatagacgggcagcctatttttcccagccgagccacaggagtggctactacacagcagcgagggacaatggattgtcggcaaagcgaaagattccaactgtcttctctagaatgttctcacattacaaggtaattgtcaggaagaacaaagctggggatcacaagtgcagaaataggatttcaaggggattccgtaccttctctgggacagtcgcgaattcatcggcaacacagcacgcccaattggcatggaagcggctcagtcatacatacatgtacagcggaccccggtttccattgatcagccgagcagcctgtgctctaagcttttccttcacgaggttccatgttgtccctggggtcatggctctagcatttggcaagtttgcattgtcacggcctgtcctggcagattcaccacacctgcccacaatggaaggtattgtcacaaatgcgcgggatactcgccagtttctgtcatccatagtttggtcaatctgggagggtgtcactttgcttattagagctgtgcatttggcaatcttgttcttccctgcaactgcattgtctccatttgctgatactttcagtgttggatttagaaggagatggcttcgtcttgtgcgccgtacccttgaaatagctgggccagcatttatcaagtggggtcagtgggctgcaacacgacctgatctttttccaagtgatctctgtgttgagcttgccaagcttcatagtgcagctccagcacatggatttgcttacagcaaagctaccattgagaaggcgtttggtcgtaaactttctgaaatatttgagacttttgaggaggaacctgtagcttctggaagtattgcacaagtacatcgagctacattaagagatcaacatactgaaaagcatgttgctgttaaggtgaggcatcctggtgtgggtgaatcaatcaagaaagactttttactcatcaatcttctggcgaaagcttcgaatgttgtccctgggttgagctggctgaggctggatgagagtgtccgtcaatttgctgttttcatgatgtctcaagttgacctttcaagggaagctgctcatttgagtcgttttatctacaatttccgcagatggagacatgtgtctttcccaaagccattatatccactagttcatccatctgtccttgttgagacgtttgagaatggagaaagtgtttctcgttttatggatgagattgaaggaaatgctcggatgaagagagatcttgcccacattggcacatatgcattcttgaagatgcttctggaggacaattttattcatgcggatatgcatcctgggaacattcttgtccgtctaaatgagagaaaacctaagaggaaactgtttttcagacctaagccccatattgtgtttcttgatgtgggcatgactgctgaactcacccgagatgaccgtgataacttacaacagttcttcaaggcagtggccaccagggatggtcgtactgctgctaactgtactctgcaattatcaaaacagcaaagctgtccaaacccagttgcctttattgaggaattggataagacattttcgttctggggaacgcctgaaggggacattttccatcctgttgaatgcatgcatcaactgcttgacacagttcggcgccacaaagtcaacattgatgggaatatctgtactgtaatggtcacgattctggttcttgaggggtggcaacgcaagctagacccaggctttgatatcatgcacacgttgaagactctactactagacaaggatataaagcaaccagttgattttttctcataaacaagttcatgctttcaagtgccaaatctacgagcctcagaatatgcatatatacagcagagaaaggtgatgacaccatgggacagaagttcgcaaaccaagcaatctatactaatgccttatgtcatgttatgttctctctctttttttttaaacaacctctctacctgcaacttacggcattgggtttcacatttgacaaccttcagtgctaaaattttgtccagcgccttggtggagtaagccaccaaaattccttgtgctaaaatctcttatcgagaaacaaaccctgttagatgtagcaaccgaatattgataacgagcagaattacgttgcagattatacagaattttacttcctgctatgctgctgcaatcttgatgtgaatcaacttctgcgagtgatgatagacatttataaatggcgtatcattatattagccgttgttaaactctctgcagggctgaatgattgggctggaggaccgaggacggtgtcctttcgggcttcagcttcagctctctttccatggttcacctgtgctttcgctgcggctgccggaggacgaagaagtgagaaaaggtgcccccaaaaggtctgtgtcctgtaggattagcaggatccactacaccgcaggttgagtcagtccagtgaggattgaggatatcatcgactcaggctttggtcgccggcggccgggaaagctggtatttgccgagctgattaaaagtaggccagcctttcagtttaggttaggtcctgacatttaataaaagagaacctcactacagttagttaacgatagtagtaacatggaggagtagtattgtcaagaaaaaaggtgcagactgtataatcatcatttagtaatgacaaactattttctctct

SEQ ID NO: 26426 - DNA, 3160 bp, Oryza sativa
  ref <308>: DATABASE ACCESSION NUMBER: AK101868
  ref <309>: DATABASE ENTRY DATE: 2002-08-28
gagacttagagagagaggtagccctaacaaacacaaacacccgcttcccccttcgccggcgatgcggtccaccgccgccgccgccgatgtgatcgatctctccagcgacgacgacgacgaggtgcccgtccccagcaccagcgccgccgcagccgcagccgcgcgccgcgtcgcgccctccacgtcccctcgcgacgtcacgccgtacgcgctcgtcgatgtgaagcccgcgctgctgtacccgctccagccaccgggcgtcgtcgtcggtggcagcggcgcgctcgtgcccgtgaaggaggagctcccggtgctgacgccggtgcccctgctggccgcgggctattccccgtccaccccctccaccaaggtcgccctcccggcgccgcgcctctgccgccagttctggaagtcgggcgactacgtcgtcgcccagcgcaaccccgacgccgatgcacccggtgggcggaaccgacttcggattaatcccaggttcctgcactcgaatgctacttcccacaagtgggcttttggtgccattgccgagcttcttgataatgcaattgacgaggttaacactggggcaacatttgttcgtgttaatgaatttacaaacccacgagatgggagttcctcattgttaattcaagatgatggagggggaatggatccagaggcactgagacgctgcatgagctttggattttcagataagcagtccgatgctttaatcgggcaatatggaaatggattcaaaactagcacaatgaggcttggagcagatgtgattgtttttacacaaaaccaaaataactgggtgccaacaagaagtatcggtcttctttcatacacatttttgatggaaactggctgcgatgatgttttggttccaacagttgattatcagtatgatatatcaacagcttcgtatactcagatgctgcgtcatgatcagaagctcttctcttcaaatttagcgatcctcttgaaatggtccccttttgctagtgaagctgagttgctcaaacaatttgatgatatcggagagcatggaacaaaaataattgtattcaacctctggttcaatgatgatggggatatggagcttgatttcaactccgataagaaggtaagtaatgctggcatattttagggctctattgggcgctgtccaatgatatgtgtttaggagcttctatgcttcagtatgtgggaatttgaaaagttgtaatgcacaaataaatggtgagttccactcattgcgtgtttcaagtcgtgcaaaacttatcgaagggggtgaagtatggaagcacttccccaacccccaccccacccccaccaaatcacatggcacatttgtgggcacgtttcagatacaccatcctccttccaactttctcatatagttatatgactggtttatacataagctgtatgtattacgctaagttgtaattgatcaattcgtatttaatattttaggatatcctcattactggggcacacaggaaggtgaataccaacaaggcagataaggtcgcaacacagaactacgtttcaactcgactccgttattctcttagagcatacacatctgtcttgtaccttcacattcctgataatttcagaatagtcttgcgtggacatgatgtggaatcacataatgtaataaatgatttgatgtatcctgaatgcgtgttgtataaaccacaaattgctgggcttgcagagctatctgcaataaccaccattggatttgtcaaaggcgccccagaaattgatgtacaaggctttaatgtgtaccacaagaatcgtttaatagcgccattttggaaagttgcgaacaactcatatggcaaagggcgaggagttgtgggcattctggaggcaaacttcatcaaacctacccatgacaagcaagattttgaaaagtcggtcctttatcaaaggctggagagccgcttgaaagaaatgacatatgaatactggcaagtgtgcactgtacatggcatgctcgcaatacacatgtgcaggtgcatgatttcatgaataaaaaacctaccagcgcacacatctgcattctcactcaattcatactgggcatttgtgacccaaaaagattgaggtcttaccatttcctcggtcagagggacctgcattgccatcgtattggttatgacaacaaaaaattacctaaatcttcccgtgcacttaatcgtgctaatcagatgaatgctggcagttccccgccaattgttccacgtcagctattggctgctgatattccgacaagcagctgtgctgtccctacatttatggcccctgcattaaggcaaaaacagatgggattggagagaaatattgatgcccttggatccaagacagacagtgctgaccaagatggatctcacttggacgtttctcaacggagacggtttaacgaatacaggactttgacactagagaatgataagttgcgtggcgaatgcttgcaatacgaggagtcagcaaaacaacttgctctgaaggagcaaaagctccgatctcaaattgctttggaaagaaagaaatatgaggaattattacaagagctcaggtcgttggatgtgaagacagagaaatagcaaactgtttctgcttttgtccgccatgatgcttctcagcttgcttcttgcctgactgttcatgtgaggattacaattaacttgctgttggagttctgcagtcgtgattatggaagaattggaccttggacaactgaggtcgtcagcttaactttcatttggtagagatgtacaattttggtttggagttgagcgtgtacaactgttgtaacattatctgtatgtacagcagtgatatcatgacattgacctgctgattcacatttttttacagttaatacacatctgttacttatgtccagtgtaaaacgaatgttagattttgatctgctagttgcatcttagtgtttcgagcaaactattacatttatattgttatgcagtagatcagttgcccgacctttgtagtgccaaagtttgtggagtggcacgtcattattctttccataaatcagagggtatcaatgaagatgcactgcattgtaatttcagatatagccgaaagtatccatcctttttatagcctttgtattctg

SEQ ID NO: 26427 - DNA, 2565 bp, Oryza sativa
  ref <308>: DATABASE ACCESSION NUMBER: AK101869
  ref <309>: DATABASE ENTRY DATE: 2002-08-28
gcctgcgccatcgccgacgcgcgccgcggcgaacccaccggatcatcttctcgcgcgccgccgaattccctcccgcctccgccgaatccaccggcgggcgcccgatccctcatcctcctcctcctctgctcgtgccgcaggcgcgggcggactccctctttctctctcgattggaaggaatagctgcttactgttgaatattgacttgcttttgttgctgtcacaatgtcgggcctgctgaattcaaacctgaacaattctgcatcaaatcttcaagactcaactggaagaccgtttacagggtccttttctggtcaatctggatcagttccagggggtttccatcactctggtttgcacaacatgcatggaagtttaaatatgccaaatatgcctggatcgttttctcagaggaatgctgccatgagtggccttccatcctctggggttcaacagcctggagggagcatgcctgggagatttgcttcaaacaaccttccagttggcatgtcccagatccctcatggtcattcaggagtcggtagtaaaggattgaatgttggtggaggtccagcatttagtagtagcctgaatattggtggtaccattcaaggcttatcctcaaacctgggtgctggtggtagtcgtaattctgttcctgggatgtcagtatctccatctttgggaaatttgggtcctagggtcactggttctgtaggaaatattgtgggtggaagtaacattggaaggaatataagctctggtggattatctgtgccaagcatagcatcacgcatgaatttgagtggcaatgttggcagtggcggtctgaatgtccaaggatccagcaggatgatgaatggcattcttcagcaaggatcacctcaaatgctgaacatgatggggagtttatatccaacatctggaggttctttatctcagaaccaaatacaaggaggaaataattcccttggttctatggggatgctgcatgatgccagtgacggtgctccatttgacatgagtgattttccccagctgactggtcgacctagttctgcgggtggtccacaaggacaatatggctccctacggaagcaaggagttggtgttaacaccattgttcagcaaaaccaggaattcagcattcaaaatgaagacttcccggctttacctggatacaaaggcaacactacagattatgctatggagttgcatcacaaggaacaacttcatgataatgtacctgttatgcaagcgcaacaatatccgatgtcaagatcagttggctttaacttaggaagtaactacccaccaaatcgtcagcaacacagcaaggtgctaattcagttcagaatgctggtcccccaaatatcggactaagaccactaaattctccaaatcaaacttctagtttgggatcatatgagcaacttatccagcaataccagcaacctcaggctcaaaatcctttcagattgcagcaggtgtcttcagctacccagtcatatagggatcagagtctaaagtccatccaggggggccaaacaccatctgatccatatggcttgatgggattgctaggagttatcaggatgaatgatgttgacttatcatctcttgctttaggaatagatttgacaacattgggtttaaacttgaactcaccagacaatctgtacaagacatttggctctccatggtcaaacgagccagcaaaaggagaacctgagtttcatactccagcttgctactccgctgagcaacctccaccactacaacctatacattttcagaaattccagacgccaacactgttttacatcttctatagcatgccaagggatgaagctcagctatgtgctgctagtgagctgtatactcgaggatggttctaccataaagaagtgcgtgtgtggctcaccagaattccaaatgttgagcctctggtcaaaacacctcattatgaacgaggatcttatggttgctttgatccaaacaactgggagacaatccgcaaggacaactttgttctccattatgatcaaatagagaagaagccagctatcccttcatcccaaaacgttaggtgaaacatttcttatacctcctggctcaagttttatccttttttctcaaggggaggaagaaatttgtgcttacgctaagagcagtgtcatgacctaactctgaggacagtgagaacgcagggccatgccgatctgcagaggggaggctgcaaaacaaaagcgggaatgcctgcttaacccttgtaattagattatagtggtgaagttttcctttaatcgtttgtagattgcactctcagcaacatctccaggtgaccaacttttaggaatagcaagtcttaaacatgcttttttaccgttaaagctttcggtgtcgaaacgtagttggcaaatgcacatatcggcgttggtgtttgcccttttaccttaaaacaaagtacaatgtgggcattaggcgccagattgatttgcttaattttggcagtcttaaaacctaggcatgcttaatttgcttaattttggtagtcttaaaacc

SEQ ID NO: 26428 - DNA, 1763 bp, Oryza sativa
  ref <308>: DATABASE ACCESSION NUMBER: AK101870
  ref <309>: DATABASE ENTRY DATE: 2002-08-28
ggcactctcgcatcgtcttctccttcctccgccttccactctctccgtcgcctcgcctcacctatctagggttttggagcaaaacctagccttcgatcccagcgcgcatggacgtcgagggcgaggtcccggccgcggcggcggaggccgtggccaacggcctcggcggcgcggagccttccccggcgccggtgtccgcggagcagctggacgtggaggcgtacgccgcgcagtacacggggcggacgcgcctggcgcgcctcctgttcatcgccgagaggtgcggggtggaggcggtggagctcgaggcgctgcggatggcgtatgacgagatcaagcggggggaggacaccatgttccaccgggaagtcacgaacaaaatcaacggccgcctcggcccgaaatacgcgctcgaccaggcctggaccgattccgtcaaccgccgcgccgagcagcgcaaggagaagctcgagagcgagctcaatggctacaggaccaaccttatcaaagagagcatcagaatgggttacaatgacattggtgatttcttctatgctcatggccacctttcagatgccttcaaaagctacatccgtacacgtgattattgtaccacttccaagcatatagttcagatgtgtatgaatgtgattctggttagcattgagttgggacaatttccacatgtttccaactatgttagcaaagcagagcaaaccccagatactttggaccctatcattgttgcaaagttgcgagcagctgcaggattagcctacttggcaacaaagaagtacaaacttgcggcccgtaagtttgttgagacaggacatgaactaggaaacaattattctgaagtcatagctccacaagatgttgctgtctatggtgccctttgtgcacttgcttctttcgaccgttcagacctaaagagcaaagttatcgacaacagtaatttccgaaactttctggagctggtgcctgaagtgagggaacttgttaatgatttctattcaagtcgctatggatcatgtttggagcatcttgagaagctaaagacaaacctcctgttggatattcatttgcacgatcatgtagaaactctatacatggatattcgccacaaagctatcatacagtatacacttccatttatatctgttgatcttaacacgatggctgctgcttttatgacgtccgtgtccatgttggagaaagagctagctgcactgatcactgagaacaaaatacaggctcggatagactcccacaacaagattctttatgcgaggcatgctgaccaaagaaatgcaacttttcaacgtgtccttcaaacaggcaatgagtttgagagagatgttaagtctttgcttctgagagctaacctcatcaaacatgatttcaaccaaagagctggacaaaggaagatgtgaactctgccactgctgttgctgaaacaaggcgtgccggcttatccttttggacacatttgttttgtgcctaaaagtgtatgggccatggagaagttttggtgatgaatcatgaattagactgatgactgagcatgcaagtctgtttaaatgcgttttaccttttcggacaattccttgcttgctgtggttttaaatatgatgctgtgtaaacagctctggatatttaagcatctagagacttgacagaacgatctgtcacatttgaggccaagctattttttaaaatataaatgcttagagctggtactgtgatgcatagtaactcttagt

SEQ ID NO: 26429 - DNA, 3349 bp, Oryza sativa
  ref <308>: DATABASE ACCESSION NUMBER: AK101871
  ref <309>: DATABASE ENTRY DATE: 2002-08-28
gagccgagaggagtggggggagagggaggaggaggaggagagtggctactagtactagctatctttggagtgggcgtttcttggccggcggcgatggagcaggtgcggcggaagagtagcctgaggtcgcatggctcaggcaagtcctcgccgcgggtgggatcgggggtgttcgatgagcggtccggactggcggccgatcgtgacggcggcgaggaaggggaggtggtcgtgaggatcgacggggaggggccttgccgcgagccgttcgcgttccccggccaggatggcggtggggcggggaatgtgagcccgaacaccgactccacggcgagcacgccgcggggggcgagcaggacgtggtccagctggaccaactcgccgcgatccccgcccaaggtgaggcgggacgggagcgttgagttttggaagaatgatggcggcggggacgggggcagcgatgggggtggaggcagaggcggtggcggtggcggtggcggtggccggcgcgcctgcgaggcgttcagcttcaagaaccgggcgccgccgcggccttcgtcgtcgcaggcgtcgtccccttcgctatcgccgcagccggcacacgctgcgggtgcggtagacggcggcgaggatccgcccacgcgtctcatcgggaacttccttcggaaacagaaggcgtccggcgccgagctgtcgctggacctcgacatggaggagctcgggaggccgtcgcaactgcatgcgcagccatccttctcaaactccctggaacgcgaggcgcgagtctccttccaaccgaaaaggcgtgtcgcctcgtcctctgactccgactccgacaccggaggtagccgtaggcgcggcggcgacgacggcgaggttgttcgctgcacgtccagttccactgcagcgggacacttgatgcgagccaaaacgcgatcccggctgatggacccgccgccgcagccccagccggcgtccgcggtccctcccgtcggcgacgaggagaggagatcctctgtcttgcggacgcctacgaagtccggccagttcatctcgggcctcatgaccggcaagtccgggcaaatcgccaagtcgggcccgttggaagaggaggaggaggacccattcatggacgaggacatccccgacgaattcaagcgcgggaagctggacgccatcactatccttcagtggctcagcttggtgctcatcatcgcggcattggcgtgcagtctcaccatcaaggccctgtccgggaagaaggtctgggggctgcacctctggaagtgggagctcctcgtgttcgtgctcatctgcggccgccttgtctccggctgggtcatccggatcgccgtgttctgcgtcgagcgcaacttcttgctgcgcaagcgcgtgctctacttcgtgtacggcgtgcgcagcgccgtgcagaacgcgctctggctcggcctggtactctcctcttggcacttcatgttcgacaagaacgtccagcgggagacgaactcgcctgtgctgccctacgtgcagaagatactgttctgcttcctcgtcgccacgctcatccgcctcgtcaagacgctgctgctcaaggtgctggcatcctccttccatgtcaacacatactttgaccggattcaggaggcattgttcaaccagtttgtcatcgagacgctctccgggccgcccctagttgacgaaaaccaattccttgctgagatgcatgagcttcaacgcgcaggagcaaccatcccagctgagctccgttccactgtaccaaccaagaatctttcagggcaaaggagtattcggatgtccggggtgattcctaagggagaagggagcaagcagctgtcaaaagagaaaggagagcaccagattgaggaggggatcaccattgacaagcttcataaactcaaccagaaaaatatctcagcttggaacatgaaaaggttgatgaggattgttcggtttgggacgctcacgacaatggatgagcagatacagcaggcaacgggtgagggggatgagtcagcgacacagattcgtagtgaatatgaagccaagattgctgccaagaagatctttcacaatgtggcgaagcctggctccaagtatatatacttgtcagatttgctgcgtttcatgaggcaggaagaagccatcaaaacaatggatcttttcgaaggagcacaggagcacagcagggttagcaagagatctctaaagaactgggtggtgaatgcatttagagagcgcaaagcccttgccctaacacttaatgatacaaagactgcagtgaacaagctcaaccagatggttaatgttgttgttgggataattgtgtttgccctctggctacttattctgggtatagcaacaacacatttctttgtcttcctcagttcacaagttcttgtggcagtttttgtatttgggaatactttgaagacaatttttgaggcaattgtgttcttgttcgtgatgcatccttatgatgttggtgatcgctgcgaaatagaagattgtcaggtggttgttgaggaaatgaatataatgacaacagtgtttctccgatatgataacctgaagatctattatccaaacagtgtacttgccacaaaaccgattatgaattactacaggagtcctgatatgggagaaggaattgacttctccgttcatgttgccaccccagtggagaaattagcccttatgaaggaaagattattacgttacatcgacaacaagaaggaccattggtatcctggtgcaatgattgtcctccgtgatgtggatgacaccaacaagctgaaagtgtccatatggctccggcacacactcaactggcaggacatggggatgaggttcgtaaggagggagctggtgctccaagagatgatcaaagttctcaaggacctcgacatagaatacaggatgctgccactcgacgtgaacgtgcgaaacgcgccccctatccagtccacgaggatgccaacgacatggaactattcctgattactgaatcggtgaatgcaccagatcattcagctatgagattacagagaggaggaaatgcctttgatcgagtttgagctgcaagatcctggtggcaactagcaagtgttctgcgctgcaagagcttggtaacaactagcaagtagtggatagcatgtaaaaactagcaatggttgttattgttagtgtgcttgaagccatcatcacttggtagttggtgcagtatgtaattactggtgctgtgtagttgatggataacgtagatacagagataaagagttttcattccaaatggtgaaagcagtaataaaaagttcaatgggtgaactcc

SEQ ID NO: 26430 - DNA, 1108 bp, Oryza sativa
  ref <308>: DATABASE ACCESSION NUMBER: AK101872
  ref <309>: DATABASE ENTRY DATE: 2002-08-28
gagctttcctccccctcgaaaccccaccacaccactgcaacgcgtgcgagcggcggcgagaggaaggaggagaccgatggggcggccgtacgcggtgaaggggcggaagaagaagcggaagctcgacgacggcggggcctcccgcgagcccccggtcgacgaagaggcggcggaggagctgccgccgccggagggggtggaggaggaggaggggaaggaggaggacgtggcggcggcggcggcggccggggaggttgctgatgggctacccgtcgtgccacggccggtggacgggaagcggcggcccggcgcgatcttcgtgctcgagagggcctgcctcgaggtcggcaaagtcggcaagactatgcaaatcctgaactcggatgaccatgctaattatttgaggaagcaaaacaggaatccagctgattacaggcctgatatcattcaccaggctcttcttgcaatatttgatagcccactaactaaagctgggaggttacaagctgtttatgttaggactgaaaagggagtattgtttgaaatcaagccttacgtccgcatgccacgtacattcaaacgtttttgcggtttaatgtcacaattattgcagaagttgagcattacagcagttggaaagcgggagaagcttcttaatgtcattaaaaatccagtcacccgctatctaccagttggagcaaagaagattggtctttcatatagtgctgagaagtcagtcaatttgtttgactatgttgccaaatccagtgacgatgtaccccttgtgtttgtggtaggtgctatggctcatggaaagattgacaacgaatactcagatgattacatacaaatttgcaattaccctctcagtgctgcctgctgtttgaatcgaatatgcagtgctctcgagcagaagtggaacatccagtgaaaggaaattttgaaaacgaacactgaaaaacattatgtgaaattgttgtgtactcgctagctaatgcaattttgcggtctcctcccatgctgagtgtgtactgtattctgattgtggagacttgaaaactccggtggtaatagtgttaaagttcaatttttgtcgcaacaatatgtt

SEQ ID NO: 26431 - DNA, 2915 bp, Oryza sativa
  ref <308>: DATABASE ACCESSION NUMBER: AK101873
  ref <309>: DATABASE ENTRY DATE: 2002-08-28
gggcgcgtcacagtctcgcatcgcttcgcttcccagtttcgggtctctcgcttcccccgcgcggatccccggcctagggtttcgccctcttcagatccggcttcttcagatctggcgcccgggcacatgacaccgacggtcctcatggagtttgggcagcagaggcagattaagcggggctacgatgaaatggcgttccggggcatggcgtcagcggcgccacggggttacgcggagaccgttggcgagtcggagggcgcggcaggcagccccgttcgtgttgactccgaggactcttcggcccccaagcgcaagtgcatcagcctaaacagcgacggcttcgatgtcaagcgggagattttcgtcccagccaagatgtcctcctccgagaggaggcatctccggaagaggttccgcacagagcttgattcggtccggaatctcctcaagaagccggagtttgctgtccctgtccctgtcaatagagctcccgcgctctcgtcctcggctgcccctcgaggtaagaagggacagcgtggtaaccatgtggtccgtggtgccaaggggcgtttcttgcctacaaagccccgacctgaggcttccacggtgttgactgaggatgcgatttttaagcaatgcgatgctattctgaaaaagctgatgactcagaaatgtagtaacatattcgactccccggttgatgctgttaagctgaatattccagattattttcaaatcatcaagaaaccgatggatcttggaactatcaggaataagcttgactctggttcctacacgagtccatctgaatttgcagccgatgtacggctgaccttttcaaatgcgatgacttacaatcctcgtgggcatgtagtgcatgattatgccattcaactaaacaagatgttcgaatcaagatggaggacaattgaaaagaagctggcttccattgccacagaggcgcacgtcgaggttgacagggctgactcaaagaggaggaagactccccctgtggactgcagtgaggtgtcaacagagtgtgtgaggccaacagagtctgttagaccaacagagtctgtaaagccaaaaatgacattcgaggagaaagaatcatttgggaactgtttggcatctttgtctgaggatccggaggtaccttcacacatcattgatttgttgcagcaatgcattgacaacaacacagatcagcttggtgatggagagatagagattgatatccatgctgtcagtgatgacctactattcgagttgaagaaacatgttgacaagtatttgcaagagagagagcagagccagcaggcaaaatctgagccttctgagaatgaggctgctaatgtatctggccttagccactcctctacaaatccctgcaaaggtggtgatccagttgaggaggatgtagatatttgcgggaatgcatcccctatattgatagaaaaagatgcacacaacaatcctaacaagtgtggtagcccaagtagttccagcagtgactctggatcttcttccagcgattctgagtcgggcagtgacagtgaaagcgaacaagaaaaaggtggtagcccaggaaagccgaagggaagtaagagatctgaacaactggtggagcaagaaaagagtgatgttataagtccagtcgatgccatccgtcctgctgatgatgtggagctccgtgagcaggataacgagtcaaagcctgccccagagggggagaattcaaaacccgacaggcaagtctccccagacaagctcttaagagcagccctccttaggagtcgttatgctgatgtgattgttaaggcacaggggattctcagccagggtggagacaaacaggaggagctggaaaagctccagaaggaagagaaagcaaggctgttggctgaaggaaatgcagctatggaagctcgaagagctgaagctgaagctgaagccaagcgtaaacgggaccttgagagggagaaagctcgccaggccctgcaggagatggagggaacggtggaaatcaatgacaacctccatctaaaggatttggaaatgcttggaacggcaaccacagaacatattgtgagttctgttgatgagactagtcctgagcattcccaggatggcatgcccagttttcttcctggatcaggcaatccattggaacagctgggactcttcatgaaagcagatgaggaggaagaggaagaagatcctagcagtgtccccagcactaaagatgcagaggaaggagagatcaactagtcccagtgcttgtgggctagttgctgaattagctgtgcatatggtagacgctccttccttctgcttccaaactagctcgaacaaggccctcaattttgatgctgctggatgtcgtaaattatgcgcctggagtatcgcggtaacctgccctacaaatcatcatatgtgcttggaggacggcacagccataatggccgcgacttgcggtactccgagctgttgtcgggtgtatgtatgtagccatctttgaagtgccatggccaggccgcaaggtgggtaagcaatgagaggaccaaatggttctttgcacatagtgaattagtgatccaggtgctaaagctcccagcggcaaaaggtgttgcccagcggcttatagatttttcgttcgttcgttctctagttttcggtttgtccaattgcttcctgctgtaaattcgaattttgatgtagtggaggaagcgatagttgtttgctgggcatatgggcaaataggaaaaagcttctgcttttcttgtttacagggaaaaaaaaagaaaattcatgcgtcttttagcgcaatttgttgtctcctgtcagatgtttgtcgactgtttgttgtggatgttcaatattctcaatacacaagatatttcttgtctttcctc

SEQ ID NO: 26432 - DNA, 2408 bp, Oryza sativa
  ref <308>: DATABASE ACCESSION NUMBER: AK101874
  ref <309>: DATABASE ENTRY DATE: 2002-08-28
gggctgaaacattaggctcgcttgccgagttagctaagctacctctcaagtatagtctagtagctagagatgcgcctcgccggcggcttcgtcttcctcctctgcgtgcacctgttcttgattcctcccgatggggctctctcggcccccggcggcggcggcgagcggtgcaggcggcagtgcggcgggttggttgtcccctaccctctgggattctccggcagctgccccatcctgctggcctgcgtcgacgccggcaactccacggccgcgttgatcctccctggcggcggcggcggcggcaacgccacgacgacgacctcgtcgtactcgtataccgccagcaacttcaacgccagcaggtcgacgttcgtcgtcgccctcccgccgtcctgcagccgcaccgtctccgaggcgaggcggtggctctctggcgccaactacggcgtgtcgtcgcgcaccggcctgttcctccgcggcgactgccatagaaacagcagcgcctcgaacgccaccaactgcagcatccccgccgaaaccatgtccaggatggtccccacggcgagctgcggcgccgaaggcaacacaaccgcgtcggcgctgacttgcgtcacgtcgacctcgccggcgccggacccagcaaagccagagtcgtcgtcggggtcggggatagtaggcctgttcgcggagtggaagaagctcgaggaacctagctgcgacaacctgctgacgtccgtgtacggtgacacacgggagggggtgttctctctggagttctcggtggcggagatggggtggtgggtcaacgggaactgcacccacggcggcggcggcggcgacctcgcctggcggtgcgcgccgaacgcgacgtgcctcaacgtgcagacaccgaccggcgggtgggggcatcagtgcaagtgcctgcacgggatggtcggggacgggttcgccgccggcgagggatgctactttgccgctaagaagagctctacgaagaaaatccttatcatagttggaggtgtcttggcgggaacggtggcggccggagtgctcttcctctgctgcgcgcgttgccggcgatccggcggcggcggcggccggtccggcttcgacaggctggcggcgaagcggctgctgtcggaggcggcgtcgtcgagcggcgtgccggtgtactcgtaccacgaggtggcgcgcgccaccaactccttctcccacacgcaccgcctcggcacgggcgcctacggcacggtctacgtcggcaagctgccggcgagctcgccgtcgctggtggcgatcaagcggatgcggcggcggcacgacgacggcgacgacgacgccgccgtggcggtgctcctcaacgaggtgaagctcatctcgtcgctgagccacccgggcctcgtccgcctgctcggctgctgcctagaccgcggcgagcagatcctcgtctacgagttcgtccccaacggcacgctcgcccaccacctcgccggtggggggctcccatggcgcgcgcggctcggcgtcgcggcggagacggcggcggcgatcgcctacctgcacgccaagcggccgcccatcctccaccgcgacgtcaagtccagcaacatcctcctcgacggcgacctccgccccaggctcgccgacttcggcctctcccgcgccgtcggccgcctcgaccaggcgtcgctgtcgcacgtctcgacggcgccgcagggcacgccggggtgcctcgacccggagtaccaccagaacttccacctctccgacaagagcgacgtctacagcttcggcgtcgtcctcctcgagctcatcaccgccatgaaggtcgtcgacttcgcccgccccgcggcggaggtcaacctcgcgtcgctcgctctcgaccgcatcgggaaggggcgcgtcgacgacattgtcgacccggcgctcgtcgaccgcgccgacgagtgggtgatgcgctccgtccgccatgtcagcgagctcgcgttccggtgcctggcgttccagaaggacgtcaggccggccatgagcgaggtcgccgccgagctcgcccggatcagggacgccgcgccggcgtccgtgccgggagcccggaccggagccggcagccgcccgcccatggtgatcgacgtcggcgtcggcttcgacggcgtcgacgccgcggtgaagaaggtcgggtcgccggtgtcggtgcaggacgtgtgggtcagcgaccagagctcgccgtcgaccaacggctccatgccgcgatttgcttagctctcgatttgacttgtaattcaaagaggaatctgaatttgatgtgaatttaacatttttttgatgtgtcgaaatgtgtgctacttagcctagttctaagacatggcaaagtatttcatatgccgaattgaaaaaacgtttgctgtatagcc

SEQ ID NO: 26433 - DNA, 3677 bp, Oryza sativa
  ref <308>: DATABASE ACCESSION NUMBER: AK101875
  ref <309>: DATABASE ENTRY DATE: 2002-08-28
gaaacccgcgaccccctctcctcttccccctcgcgcgacgactcttccgaagcacacccccgccgccgcccgcctcctcctcctcctcctcccctccatcccccccaacatccggtggtgactccgacgaggaagcgccccaagaagcgaggtgaggtcggagggagggagggaggaagcagggatcggctcgctcgctcgctcgcttccgcccccaaccttaaaccctagggcccccgcacttcacctgctcatcggctcgaatcttgccgcgctcgggtgtggggaccgggaagatccgggtcttctcttttcgggggattggagatgtcttcggacatcaggaaatggttcatgaaggcgcaggacaagaatggtggcgcagcgaagccggctgggacgacggcgttggcgaagaagcccgtgctcagcattccggagaagccgtcggcggcgccatctatggcggcttgtgatcaagattgttcagctagaaggaagactagcaagtactttgcatccaaaacagaaaaggaggaagacaccagtgcaggaaaaggtaccgggagaggtttgcctaaaagaaaacttcaggaagtcagtgatgagcttgaggatgacatgaagcctttgccagcaaaggaagtccataaagaagaagaagatgatgatgacgacgactttgtggcaccttcaaaaaggaaaactccggtgaagccaccaccatcaaagaagttaaagggtgcatctactgctgaagctcatggaaagactggtcttgatgatgataacgaggacaagatggatgaagacgctaagaccccttccaaggcatctggaagtggaaggggaaggggaagggggagagggaggggaggaagaggagcaggagcagcccatggaaagacaattggtcttgatgacgacggtgaggaggataagatggatgaagatgccaagaccccttccaaagcagctggaaggggaaggggaggagcctctgggggaagagggagaggagggggtgggagaggcttcatgaactttggtgaaaggaaggatcctcctcacaaaggggagaaggaagtcccggagggtgcccctgactgtttaactggtttgacatttgtcataagtggcactcttgacagtcttgaacgtgaggaggcaactgatctaatcaagcgttatggaggccgtgtgaccggctctattagcaaaaagacgaattacctattggctgatgaagacgttggcggagtgaaatcaaataaagcgaaagaactgggcgtcccattcctaactgaagatggtttatttgatatgattcggaaatcaaagcctgcaaaggcctactgtggcaaaacatcaaagcgacaaaaattcagaaaagcagcaaaaatcaccaatgaagagttctccagttaaagttgaaagaagagatggtaatcaaattaccacaggcaaaaatatttcaccaaagagtaataaaggaagtgcctccattgacaaccaaaaggtcaacattgttgaccgtggttctttgcaatggactgaaaagtatcggcccaaagttccaaatgacatagttgggaaccaatcaatggttaaacagcttcatgattggttgagaagttgggaggaccaattccttcattctggccagaagggtaagggaaagaagcaggctgatagtggagctaaaaaggctgtgttgttgagtggacctccaggtattggtaagaccacaactgctaaagttgtcagtcagatgcttggattgcaggctattgaggttaatgcaagtgatagccgtggtaaggcagactctaagattgagaaaggtgttgggggcagtacatcaaattctatcaaagagcttattagtaatgcaactctgaattatagtaacaaccgattaaaacgacccaaggctgtactagtcatggatgcagttgatggtatgtctgctggagatcgtggtggtgttgctgatcttattgctagcattaagatgtccaagattcctataatttgcatttgcaatgaccgtcatagccagaaagttgaagagccttgtaaattactgcttgctactcaacttcagaaaaccaaccaagcaacagatgggtaagagggttgatggaaattgccaagaaggaaggtcttcaagctcaagagaatgcaatggaagaacttgcagaaagagtacacggggatattcgcatggctcttaaccatttgcaatatatgagcctctcccagtccgtggtcaaatatgatgatataagacagcgacttaatagtagcacaaaagatgaagatatttcccccttcacggctgttgacaagctgtttggttttaatggtgggagactacggatggatgagagaattgatttgagcatgaggcgatcctgatttagtccctctgattatccaggaaaactatatcaattatcggcctatcactgttgggaaggatgacagtggagttaaaagaatgaattttcttgctcgtgctgctgaatctatagcagacgctgatattgttaatgtacaaataagaagatatcgacagtggcaattgtcccaagctgcttgtttgtcttcatctatagttcctgctgctttgatgcatgggaatagagagatccttgaagcaggtgagcgaaacttcaataggtttggtggatggttgggaaagtactcgaccacaaataaaaacataaggctactggaagatgcccatagtcatattcttgcctcccagcaagcaaatttggacagggagtcattgaggctggattacctcactcttctcttgagacaattgactgatccactgaagacaatgcccaaggatgaagctgtgcaaaaagtggtggagtttatggatacctactctttaagccaggaagactttgacacaattgttgaattatcaaaatttaagggtcatccaaatcctatggatggtattcaaccagctgttaaaagtgccttaacaaaagcatacaaacaaggaagtagttctcgtgttgttcgagcagcagatctagtaaatatcccaggcatgaaaaagccattaaagaaacgagtggcagcgatccttgagccagtgggagagagtttgcctgaagaaaatggagtagcgtcatctgaaggcgatgaagaggattcctctgatgctgaaaataatgatgaactggtgcctggtgacacaaaaccaaaactggacctgcagagtgataagaagaaagggatccaagtgcagctcgacctgaagagcaatggcaatggcttgaactcgaagaagatgccggctggtagatcaaaagcttctggctctgctgggaaggctgctggaggctcaggtgggaagaggaagaggtaaacgtccgccggccgccgtcatttagtcggtggtgaatctacatgaacatcctctgatattctggggcagaatgcggttcaaattttcttgcttgtacataagtcccaatcatctttgtaggcagtagtaggcaattggtatctgctccagatattttgtttcctcccacttgtatgagcttcatttcgctctactggcatttggccagttttcagctttgcaagacaacgtccattattgttgacttccgttcaatgaaattgtgtcatgtttgttgtcc

SEQ ID NO: 26434 - DNA, 1097 bp, Oryza sativa
  ref <308>: DATABASE ACCESSION NUMBER: AK101876
  ref <309>: DATABASE ENTRY DATE: 2002-08-28
ggccggggcgccgcccctcccctcctcctctctgcccgtcggctgcgccgccgcaccggccgccgcctcgaccagcggttgacggcggcccaggttcggaaaccattcacgtaccccgcatcggccgcacctcccctcgccgcctcgcgcgtcgcaacttcgccgcgcaagcagtcgaccctgcgatccacaaggctgcatcggccgtcaagaccttcgccgttattttgctttctagagacagttattcagacatgcttgaaggaggcaacttttccaaccaggagaccttgtacgaagttctatccgtgaggaaagatgctacatatgatgaaattcgtgcagcatataagtctgctgtactaaatacacatcctgacaaagcacagatggctctcaatccattggtgtcttccagtgagcgaaatgaatttctcagtgtgcaaaaggcatgggaaatcctacgttatcccaaatctagagcagaatatgataagcaactgcaatcttcccgacagaaccttgaaattgttgcaactgaaattgaaattgatgacatgatcgttgaaagtactgctgattctgtggagcttttgtatccttgtaggtgtggtgattatttctcaatcacttcacgtgaacttggtcagattggaatttcagtcagggaggacggagagatggaattgcacacttctgattctgttccatcatctgttgttcttggctgtggctcatgttctcttaaggcacgattggttacaaataaaacttgatggtaatttttttttgtttgcatctatcagtatgcttgccagcaaagatcaatataaagatgctacctcctattcttcgaagaattcggcgtgcacatggaacgtacattgctgtttaaaaatgaaattctggaagaatgtacctctgatcatcctcaatgcagtgtgaccaatgaaattttgtagtactacatgtaagctctgttggttgtagggttataaatgacattttgaccgttgtaatcagctaaccaccttttgtcaattcaggccgcagcgaattaaaggtgcttatctggtgattaatacatgtcttttggt

SEQ ID NO: 26435 - DNA, 1123 bp, Oryza sativa
  ref <308>: DATABASE ACCESSION NUMBER: AK101877
  ref <309>: DATABASE ENTRY DATE: 2002-08-28
gtcaccgcgtcgcagccgcaacttcgcaagggtcggagtcgcacgcgaacccgcccgcctctccacaagccatggccgccgccaccaacgccgccgccgccgccgccgccgctccggccccagctccggcgacgccggtgccgcgcgggcaggtggatctggtcgacttcatcgactggagcggcgtcgagtgcctcaaccaggaccccgcccacagcatcgttaacgccctcaagcagggttacagggacgacgaggggctgtacttggccagcgattcggatgagcagctgcttatccacatccccttcatgcaggtggttaagctgcattccgcgctattcaagggccccgaggaagatggcccgaaaacaattaaactcttctgcaacaaagagcatatgggtttcagcaatgtcaatgactatccaccaagtgacagtcttgacctgtcttccaatcatttatcagagagtaagcctatgcagcttaagtatgtcaagttccagaatgttcgcagcctgactatatttattgaggacaatcaaagtggaagtgatgtctcaaaaattctcaagattgcgctgtacggaacaactgtggacactacaaatatgaaggacctgaagaagatagaagagcattaagaccatacgaagctagcatgttccaatgggtgtatggcacaaaaaacagttaacaattgaatttctagttgatcttggcaactttgcgccccattttatacatgaggaatttgagagccgcaggatctggtggagataccatacatttgcctcttggcctcgggctttaccttgtagtgctaccgatggcttgatgtggcaagcgaattcatatgtttcctctttaagaaattcatatttggagttgtggtggtaccttcttgatcgatcgatcgatctgcttcacagtaaccgttacatgtttcttaagaaattcatatttggagttgtggtggtacttgttagatcgatcgatctgcgtcacagcaactgttgcatatgtttagcttgtgtttgtttgcctgtcttagttaactgggaaccaaacttgtggtcattcggtcaatttgctatgtcatgacaagatgattcaaact

SEQ ID NO: 26436 - DNA, 1998 bp, Oryza sativa
  ref <308>: DATABASE ACCESSION NUMBER: AK101878
  ref <309>: DATABASE ENTRY DATE: 2002-08-28
ggttcctcagttcggtacttcttcttccttcactctccccaccaaattcccccaaatcgcagctgttcgccacccgcattgcgccgccattgcctccaaatccgagtactccttgagtaatctcagatccatctcgggttcctcccgccgttggcagcagccggagcttttttccgcggaagaaatggcgccgtttcggtgagttcttggcagtttgggatgatgcttggtgggtaggaggactaggagtgcggcggctcggggagaggctgcgatggagagcgccgccggggaggaggggaaggctgccccgtcgcttcccctggcgaccctgatcggccgcgagctccgcggcggcggctccgagcggccgctcgtccggtacggccacttcggcttcgccaagcgcggcgaggactacttcctcgtcaagcccgactgcctccgcgtcccgggcgacccttcctccgccttctccgtcttcgccgtgttcgacggacacaatggcgtgtcggcggcggtgttcagcaaggagcacctgctggagcacgtgatgagcgccgtgccgcagggcatcggccgcgacgactggctgcaggcgctgccgcgcgcgctggtcgcgggcttcgtgaagacggacatcgacttccaacgcaagggggaggcatcagggacgacagcgacgctggtcgtcgtcgatgggttcacggtcacggtggcgtctgttggggactccaggtgcatattggacacgcagggcggtgtgatctcgctgctaaccgtggaccatcgtctcgaggagaatgtagaggagcgggagcgcgtcaccgcgagtggaggggaggtcagccggctcaacctgtgtggtggacaggaggtgggacctctcagatgctggccaggtggattgtgcctttcaagatcgattggggatactgacgttggggagttcattgtgccaattccacatgtcaagcaagtgaagctatcaaatgctggagggaggctaataattgcatcagatggaatttgggatgcactgtcctcagaagctgctgctcaggcatgccgaggattgcctgcagagctggctgcaaagcttgtcgtgaagcaagcactgaagacaagtgggctgaaagatgacaccacctgtgtggttgttgatatcatcccatctgatcattcttcaacacctccatcactatctccaaagaaaaaccagaacaagttgagatctcttctttttggtaggaggtcacatagttctgttggaaagcttggaaacaagtctgcttcatttgactctgtggaggaattatttgaagagggttccgcaatgttggatgaaaggttgggtaggaattttccatcaaaagcaaactcgtccccatctcgctgtgcaatctgccaagtggatcaagcaccttttgaagatttagtgacagataatggaggtggttgctgttctgccccatcgacaccatgggttggcccttatctttgttcagattgtaggaaaaagaaggatgcaatggaaggtaaaagatctagtcgctcaacagcgtgcaggtgaaattgccaataggactaactggtccttgttcgtgcaaactggtctcctggttcggttgtctgccacatgtaaaaagaggataataatctgtttgctgctggatccaagtattattggtgaaactaactgcaatctagcctgaactgaacaaattgggctactaacaatcttgggagtctatcaacagcgcagatgaaaatttctgtttgcactgggaagatagctcacaggatttcaaccccgtagttttttttttttttgaaccttagtatgtaaagtgaaatgtctagcttaacaatgtttgtaagagatggcaattggcaaggctccttgttctaccttggaatgtatatgcttgtggagccgaacagactaatttatttatctcatgctatcctaatcaatggtaatgtctttcggtgttc

SEQ ID NO: 26437 - DNA, 1961 bp, Oryza sativa
  ref <308>: DATABASE ACCESSION NUMBER: AK101879
  ref <309>: DATABASE ENTRY DATE: 2002-08-28
gatcgaggacgtgctggggccggccgggatcgccggcggcggggcggctccggggctccgtctcccgctcgccgccgtcgccgtgaagcccaagcgtccgagatcgccagggtcgcgcagacccggccgcagcccgaggcccggatccccgggacgcagacgatatatgtgaagacgttcgggtgctcgcataaccagagtgacagtgagtacatgtcagggcagctgtcagcgtttggatatgcgatcactgaagagcccgaaggagcggatttgtggctaattaacacatgcactgtgaaaaacccaagtcagtctgccatgacaactctcatatcgaagtgcaagagtgcaaacaagcctttggttgtggctggatgtgtaccacaaggaagccgggatctgaaagagcttgaaggtattagcgttattggagtgcaacagattgaccgcgttgttgaagttgttgaagaaaccttaaaaggccatgaggttcggttgttgagtcggaaaacactgccctcacttgatttacctaaggtaaggaagaacaaatttatcgagattcttcctattaatgttgggtgtttgggtgcttgcacatactgcaagacaaagcatgctcgtggtcatcttggaagctatactatagaaagtttggtagatcgtgtgaaaattgttgtctctgaaggtgtccgagaaatatggttgagtagtgaggatactggtgcttatggcagggatatcggtacaaatcttccaaatctattaaatggaattgctgctgagcttcctgcggacagaagcacgatgcttcgcattggcatgaccaatcctcctttcatattggagcatttgaaggagattgctagtgttttgtgccatccctgtgtttattctttcctccacgttcctgtacaatcaggaagtgatgcagttttaacggcaatgaatcgtgaatacactgtgagtgaattcaggagggtagttgacactctttgtgagcttgtccctggaatgcaaattgctacagatattatttgtggattccccggtgagactgatgaggatttctctcaaactgttaaccttgtaaaacaatatctattccctcaggttcacatatcacaattctaccccagaccaggaacacctgctgctaggatgaaaaaggttccaagcgttgaagtgaagaaaaggagccgtgaattgacctcagttttcgagtcattttcaccctaccaaggaatggaaggcaaagtagagaggatatggatcactgaaatagctactgatggtgttcatttggttggacataccaaaggatatatccaggtgcttgtcattgctcctgatagcatgttaggaacatcagcagatgtgaagatcacatctgttgggagatggtctgtgtttggtgaagtgatagaaggatccgttgtagcaaaggaaacacagaagcataatcacagtgaactgcaagaagaatacaggccaagtcaggttgaggaagccacttgctgcggcacggactcttgtggtgcctgcacatgctctgatgcagcacagcgatgcaatcccggtccagagcgatccgaaaattcgacgccccaatcctgtggtgatgctactcatcaggaagctgttcagtctaaacttgtgagaagaaatgttgaaggagcggtgaaaagtagcgaaagtgatacagcgaaacaggtaggggagattcagcgactaaatgtagcagctaggaggttcccagatgttgatacgattctgtggggtggtttggccgtgagctttgccacgacagtaaccctcattgcactgctagcttacaagatttcttccacgccctcctactagtaagtctggtgcatgtgtaactgtagttgagctgtgtgttactgctcagttttgaccatttttctgtatccatcctcgatccttctgtttgccgc

SEQ ID NO: 26438 - DNA, 891 bp, Oryza sativa
  ref <308>: DATABASE ACCESSION NUMBER: AK101880
  ref <309>: DATABASE ENTRY DATE: 2002-08-28
gtgccttccgcctcgctcgaacgcgcggcgccgccatcgcacagaagcagaagcgcgtcacacgcgagcgcggcggcgcacagacgccgtcgaggcatcgccctcggccggttgcagacgacgttctctcgctcggtcggccatctccccttgctcaccgcgcgcggcgcgcccccaccgcccttggcaagctgcctcgccgagtagttctgattcgattcaatcgattgccagaggagccaggaggtgttgaaattggaaacccctgaagtttgatcagctgaaccagttatcaactccagcagaacagtagaatctctagctagccaaagaagccaaggatagcaatggcactccggcgagcactgggatggtcagagggggaggtaatgcgtccagagtctaagccttgctcccggttgatgcgacagactgctggcgtcttctctgttggcggtgccctttctttctgggtgctctgccgccttcactacggtccaagaataacagttccaaggagtctcaggtgggcatcatgcggagcaatctctgtgagctcagcatcggcattgctcgtgcgactcttcagcccagagtgtgaaccacagaatatagcagcttatgacaaacttggacacaagactggatagtattatagaaatattaggtcttgatcatcatctaaagaattagagctaggtagcaaacctctgtatcgtttgctgattcagtctaggagatatattgtatgtctttttctggaagatgtttatgcatgatgtaacttggcctgaagaccttccctccataggagtatccacttcactggctgccgtggacaatgattgttattattttacctgaaacctgatgggtttaataagtttaagg

SEQ ID NO: 26439 - DNA, 4327 bp, Oryza sativa
  ref <308>: DATABASE ACCESSION NUMBER: AK101881
  ref <309>: DATABASE ENTRY DATE: 2002-08-28
ggttgttgtatcttccctggtcttgcttgctccatctataaatccaccttcacctcctttcttctacctcaatccttcacacctttgcactgttcttcacttctactccctgaacatttacatatagctgtatatatgtatctctatctctctagtagccttcttgtcctttgcttcaactgtgtgtatatgcctagtagctagctagcttgtgtatgcatcaatatctggttaagtcatcactagttcactatatttatctacatggagcatatggaaggaaagagagaaacatgtgttgtacctatatctccctttctgttctcttggttattactatcttgcactgtgatgtttgcatgtgtgtttatttacactggatgagatgatgaggtttagaggtttgttcagaagctgtgtagtgtgtgcctggctccctgtatgccacacatgtagaccaacccatggtgtctggttgcctactgggtggcgtgcaaggagccaagcatgcatgcctgcctgcatatggttgcttgacatatccattaattccagcttcttttttaagtgtcatttgatgtagtatacatatatttgtgtatgtatgtgttcatgtgtaagtttttcgtgcctttacatctttgatcttaatttggtgtggttctaattaattgcaggtgcaagaaggatgtgtttcatcttcattcctcactgaccaagtttgattattttggaatacttgtgagcgaggttatatataatatttgaatgtttattttttaagtaatggttatgcatgtttttgttctgggttttatatatggcatgattactgatgctataattctgaagaacatttcctgacttctgttaatttcattgaaacggcttaacttatacatttattccggctagctaaatagatgttccatgtaataatgaaagttgaaggcaaccatgcatgatgttatgtagacaagtaatttgtcctgttaatttttaatcaattattcatttgcttggatgtatctgttgaggaatcttgctatatattccacatatttgatttgatccagctgtgtgcttgctttttcttagagaagggtatttttttacccggcctctacatccaactgaatatatgcaacatttttaacttagcccttaaataatataatctgaaattcgcttctatggagatttaaacctaggaccttaaaatactacttaggtcactgtaatcactaagctatatgccttttcacaacagtgcagtgtgtttactgatatattcctcatcacaaacggctcgctatatatttgttctgcctaaattaatgcttgaattaatgcaagtatgcaaccatgatgcatagaggtttcttcctttaggcagctgaaactatataattaagatgtattattttaggttttaatttaatttgtgcagttctgctacaaattatgatcaagctatacagctagctagttgcacaagcaaggctctcatctggtcaatattttcttgacaaagaaatttagggcctgacgtttgttcgttccgattattttaatttcttgttttagaacaatgtacttcgtatatacgggtacatcacttttggggacagaatccattaattgtgtgattatcatcatatgctcattcttgtctagttgagcaatgcctagtaaattgatcagctgcatcccaaattgttgaacagtatcggattttgctaaaatatttctaagacagaccgtaaactttctacaaactctttcatttgtgtgctttctgggtgtaagtgtaatgattttttttttgaagaaatgagtgtaatgatgtactactatacgcctctctacggttgtgattagttaatttgtcattgtactgatcaatacaaaattcttatgattctctgattgaaaaaatgttgtttgtagaactagctagctagacaataattctttcacttcagtatgaaccaaaactcctgctgctattaattaatttctgctgaataataccgtcataattaacatgaatgcagtcctcatgagctggatgcatataaactagcagctggcattcagttcttctgtaattaatttccttctaaattggttgaattttttagataataaaaatatgttacatctccgatttctgttcgttaggcacgcaaccattgatttttgttggatatattacatgcttatctcgaattggtcaattgtcagtatcgattaacaagttatccttgtcaacggcgaagctccttagacttgactggatgctattttctttctaccctttttttctcagatgctagtattttctagtcaggtacttgtactgcagtttgcacgtgtgctaaacatgaagaacgttgtacaagatattcacagtttgtttagtaattctcattgaatcagacaaagtaaatcaattttgtagtgcatttcaggcctcatcgtttggcttttttcgtaataagccaaaacggcttattagagaatacaaatgaatttcgtagataaaacttttatatatgtgttttcggtgacttaaaagccaatgctgaaaaaaaactacgttgaaaatatctcaaaatcaatgtcaaaattaagtttgaaaattcaaatttttgctttttctttggctgaataggccatccgatgggagccgaagcttgaccccttttattaatcaaagtttcatattgattattgaaccccatctagaccattttgtctgctgaagggcaatatatattttattttctatataactcttttcctgaaaataatattgtgcttcacattgaacaaccaatctacactgttgtacaattagttggtgatgacctccagctcactcatgtgttggtctctgatggaccagccattgttgcatgcttgcatttgcatgcattcatggaccacttcactagctgtagttagtacaaacatacaagaatgcattcaggagctgtgtcactgtgcctatgtggccacaaagcaggaaaggttaagctacagtgatgctgatggtgagtgctgagagtaagtaggacactgccattatatgctgatctgcagccaaagtcaagaatgtccccagtgattgggagaaacacctgggtcccctcttgcacaacagagctttgcattatgactttttttttcctgcagacagcatggcagtggctgcacttgcatattggtgatgaacagtatctgaactatccagatcccagtgaatctgaaatcagtttacagttttcagtgtgcaggaagcagagcaagagattcttcacaacatcacgcgttacagggatagatgatcatcatggaagacaataatatgatctgtcattttacaagttgaaagtggaaaaaacattgttcgtgtagacaggtttctttttggcaatttatctcagaacacaagcagcagacaaggtgtcgtgtacaattaagaactgaagaagtgtccattgcacattcaaaaacaggagacattccatgaacaaacaagatatactatcatgtactttcttcactctagactgcttttcaggctataaatgaagtaaatctatacatcgaaaaaaaaatcaaaccagcaaaaagatttctggaaaacatttctcctacactaccttttgtcgatgcaatcttcgtatctgcattcaacctcgggtcactcacgatctgatatcgcggtgaatgtcatggaggcttctgttgtctcttgcgacaacaaaggagaagagtgtgccatgatggaagatagcaatgtggatgttgaggatgaaactatgtccacttctttcctcatgctcctgaccttaagatccataaagtcactgattattgcgggcttgctgatcttcgccagctcaacatccatttcacctgttagcatgcggacaaccatcgacattgtgggtcgatgtttcgtgacatcttgtgtacacaaaagcccaattttcaggaacatacaggcttgtgcaacatccaagtcatcacccaaagaagcgtctatgattttctccaaatcaccctcttcatagtgcacccatgtctgcaagaggagaaccccatttgtgatctctgggaactgtagcagtaaaagaacaaaagccccaattcagaacatttgctccctagctgagacacgaataacttttacatcatgatgatgatgctttcatgtagaagaaaaagttggcaactgatgtgtttggcagcatgcaactcgcatttcattatgacaattttactccctctattttttaatgatttgacttttacc

SEQ ID NO: 26440 - DNA, 2779 bp, Oryza sativa
  ref <308>: DATABASE ACCESSION NUMBER: AK101882
  ref <309>: DATABASE ENTRY DATE: 2002-08-28
caaggcgagatcgagcctggagcggctcgccatctctgccgccggtccgccgcctcgctcgctcgctcgccgtccgccgcctcgctcgctcgctcgccgtccgccgccgccgccttgctcagttgctcgtcgtcctccgccgccgcggcgccagcacgcctcgtccttcccctctctcggctcagtactttggttttctcccatgtcgacatcattagctgaagcttcgcaaggaggatatatcaaagaggtcattgcagagggctcttcgggaggcttatcatcatcaacacaattgttgtctgcaaaacgaaagttagcagcatcgaatccttcgacagcgaagcgaagacgatcacctattgtattgccaatagtcaggtctccaggagtgcgccaaattatttctcaaaatgctctcatcatggagagatcacaagttcctggtcatatgtccccaagtgcagagtctccaagagctagatctctgtctccagtggcaaggttcgtatcaagtccgtctactatccttgagctggatgttgaaaatcagccaagggaatcaagtcaaccaacacctcatgttgtgactcatcgttctggttagcacctaatacatttgttctaaaggactggaaatttgatcctgatgtagcacgtgcagaacttttaaggatgattgttttgcaagaacttccttccagctttgttgaacaccttggttttagaagattttgtgcaagcttgaacccgtactttagggtggtttctagaactactataaagggtgattgcttggctgcctatcaagaacaaaagttagctttgcttgaggtactgaggaaaacaaattctcgggtttcactgacggctgacatgtggtcatctaatcaaaacctaggttacatgtgcataacttgtcacttcattgacaatgaatggaatatgcaaaagaggatcataagattcactcaagtgcgtaccccacatgatagtatagctctcttcaatgaaattataaagtgcattcaagattggcagatagaaagtaagttgttcagtattacagtagacaatgcatctactaatgattctatggttgtggaattgaaaggaaatctcttgggtaaacttgctatgccttgcaaaggagagctatttcatttctggtgcgcagctcacatctttaatcctattgttcaagatggattgagtactatcagtgctgccatatccaggataagggaaagtgtgaagtatgtaagagcatcagaagcacgggagcaaaaatttgaagaaatcattgcacaagtcggaattgttgaagagaagcgtccttcacttgatgtctccactcgttggaattccacctatttgatgctttcctcatccttattattcaggagggcttttgattcattggatcggtttgatcctaactttaaagatgctccacaatttttcgattgggagaatgcagaagttctttgcaaacatctcaaggtcttctatgatgcaactgttgtggtttccgggacatcatatcccactgttactcgctactttcatgaattttggaaagtgaaggtgatgattctaaatgagtccaacaatgaggatgatcttgttgctagcttggtttctaaaatggatacaaaatttcagaaatattgggatctacagttcctgcagatttgggttcctgttatttttgatcccagatttaagttgaaattccttgagtttaggctgaaagcaggttttggagataaggcaactggtccaaatggatatctccctagaattaagaggacagtccgtacttggtttgctgaatattcttcacaaatttgtggtccaagcacaaccaattctcaagaagcatcaactagtggggtgaatgttggtggcagccaatttgctgactagaggcaatatcttcatgatcaaagcaagagtaaagtaaagactgagttaactagatatctcgaagatattcctcaagaaaatgatttccctgatgatgattttgacatactctagtggtggagggtgaactcttgcaaatatccaatatcatcacgcatggcacttgatttgcttgctgtccctgcatcctcagttgcatcagagtctgcattttctactggataaagaatcattagcgactataggagtaggttggctagtggaactgtggaggcattggtttgccttcaagattggatgcgagccgatggttttggtgatccatattcaattcaaactgatacggctgagggcgatgatgttaatatgcaactattgggacattaaatcatttgacatctcaggcaaattaccatgtgagttctatgcaatctgggttctgagaaattttgctagttctggagcagtggtaagtggagcttgctttgtttcccagctcatatcagtgtttcccacgcatgtcagattacatccaaaatttgtacgatgtattggaaatttagttgagcctgggatttctggacttcttttctgccgttgagcctgaaattcatatttgattttgcctggtgaattctgcatgagtgacaggaatagatgcaaggattaggcggctttgttgctgtcaggatatgcatgtcttttgagtccgtttttttttcccctttatgctgttgttaagctatgaatattttggaaggggatttttttagaacaatttgattaaggatcggtggatttttatgccaaattgtagactctgcttttcgctgcagtcactgtctttcag

SEQ ID NO: 26441 - DNA, 1397 bp, Oryza sativa
  ref <308>: DATABASE ACCESSION NUMBER: AK101883
  ref <309>: DATABASE ENTRY DATE: 2002-08-28
gatcaagagttcattatgcagcgtagcagtagcactcttgcggtgatggtggtgtcgtttgtagtgctgctcgccggtggtgcaggcgcggcggccgccgccgtggcgcagccggtgccgctcttcgtgttcggcgacggcacccttgacgtcggaaacaacaacaacttgcccggagacgaggacgtcggggatcctcctcgcgccaaccacccttattacggcatcgacttccccggcggcaaggccaccggcaggttcagcaacggctacaccatggccgacttcatcgcaaagtacatgggatatgagatgagccctccagcttacctgtctctctccggtccggtcaacatggacggttttactggagtcaactatgcttctgcagatgctggcatacggaactccacaaacgcaggcttgaccatcccactgtcgaagcaaatcagctacttcgccacgacgaggtcacagatggagtccaagctggggcgcctcgccatgagcgacctcctctcgaggtccctcttcctgctcgccgtcggcaccatggacctcctcccggactgcaactacttcctgacgttcccgccgtcgccgccggacaacaagacggaggtgcagcggctcgtggagctctacaacgccagcgtcacgtcgctatacggcatgggcgccaggaggttcgccgtcgtcaacgtcggcctcgtcgggtgcgggccgacggtggacacgcgccgcggtggcggcagcggcggcggcggcgggtgcgacgcgaggatgaacggcctcgccgcggagttcaacgcggctctcggggcactcctcgccggcctccggtccgagaagcgtcgccttcgctactccctcgctgatttctacgccttctccaacgccaccttcgccaacccatcggctgccgggtttgtgaacatcgacagctcgtgctgccccgggccttgcatgcccttcccctacttcaaccaaccaccctgcgacaaccgcgcgcagtactggttttgggacgggggttacaccacggagcaagctgccatggtggctgccgctgcgttctacaatggcaccgcaaagttcaccacgccggttaacttcaagcaactgatccgaaggaaaaagtgataactccacgctcgatctcatgtagcaaggcacggcgcccataaaaaaaatcttacgacattcgatcaataataagttaaatgttctcctttagaatggaagaattttaataagaattgatacaattactgacatttcaatggataagtggtttgtttatatggattttgctatcttcaaacaacattatatgtaaaggcgtggtcaagatccctagtcaaactgtttttttttaactcatacttcacacaccg

SEQ ID NO: 26442 - DNA, 1062 bp, Oryza sativa
  ref <308>: DATABASE ACCESSION NUMBER: AK101884
  ref <309>: DATABASE ENTRY DATE: 2002-08-28
ggggttcttcgcgtcgatgagctcgtcggcggcgagggtgggcggcggcggcggaagggacccgagcaataacccggcggtggggaggctgcgggagctcgtgcagcgcggggacgcggcatatggctgggagaagtcgtgggaggccgccgtaaccccgtgggatttggggaagccaacacctatcatcgaacatctcgttaaatcaggaactctcccgaaggggagagctctggttccaggatgcggcacgggatatgatgtggttgctctggcaagccctgagcgatttgttgttggcttggatatttctagtacagctgtggagaaggctaagcagtggtcatcatctttgccaaatgcagactgttttacttttctggctgacgatttcttcaagtggaaaccaagtgaacaatttgatcttattttcgattatacgttcttttgtgcacttgatccaagcttgaggttggcttgggcagaaacagttagtgggcttctaaaacctcatggagagctaatcacccttatatatttgatcagtgaccaagaaggaggaccaccattcaataatacagtcaccgactatcagaaggttctagaaccattgggtttcaaggctattctcatggaagacaatgaactagctatcaaaccgcgcaagggtcaagagaaactgggaaggtggaagagatttgtacccggatcttctctataaagaagggatgcagcgttcatgtttctttcttgggctcgctttcgttgtcgatattcaattcttcatgttcaagatccaagaacatgtgtgtatgcgtgcagtccaagactcaacaaatgtactccaaataagctcgcgatgctgtcaacttgtcgttgtcaggcgatttcagcattcagaacaagtgaaaaaactagtcttgcagctcaagatgtaactgaatgaattagggacaaaaggaataaaagatcctagaaaaatgaaggcactataactgtatgactgcatgatggatgaaaaataatctgaacagtaaatttcaaactatttgaaattctgat

SEQ ID NO: 26443 - DNA, 1378 bp, Oryza sativa
  ref <308>: DATABASE ACCESSION NUMBER: AK101885
  ref <309>: DATABASE ENTRY DATE: 2002-08-28
gcctttcagcgaccgcacagaaaccttctcttctagaatcctctagaacctcttgacctcccccgcctctgcagttccctccgatgaggtggctgccccggctgctctcccacgccgcggcggctgggagggccacggcgaggaccactggcagccatgccaggggatccaatgggttcgcgagcggccgcgggggcagcgatggtgcggtggtgcctcgggagtggctacggaagctgtggaccgaggagctgaggaggcagagggatgctgcgaggcggtgggggaggcgcgcggtcgcgaccaccgacggcggcggtgcggattcgttcagcgatttcgccagggcgccgtcgaggagctaccagcacgacgaccgggacctcacgcccgtagaggccaaactaaagcctctcctctcaagggccaacctccttatcgctagggacatagaatgggcaaatattgtgttggctttcgagcaggagagtagatatatcataatggatccgctctttcctcaatcacctgttggtttcattcgagagaaaagcaatgtcatatttaggcagctatttcgctcaagaaggccatttgttgcagaaattactgatgctatgggcaatgagatcttcacggttcgacggccattttggcttatcaacagttccatttatgcagaagtgaatggcaaggaggtaggcgtagtccacagacgttggcatctctggcgtagaatttatgacctgtacttagggaataggcaatttgctgtggtcgagaatcctggattttggaactggacctttactctcactgatgaggatgacaatgtactagcccagattgatcgtaattggaggggaatcggttttgagctcttcacagatgctggccagtatgcaattcgatttggtgatgcaggactaaaccgtaaatttggtctcgcttcagatatcgatgaactgcatgttgttcgccagctgagtttacctgaaagggctgttgcacttgctcttgctgtgtctctggattgtgattatttttcaaagagaggtggctggggacttccttttcttattgccacagagtagacgcatatgacctactaccattttcagcacaagaggaaaaccgatgaccttcacattgttgattagtgaagaaacttaatgggtcgactattttgcgcgattgagatcgttaccgaagcacgaaacggttttttgtgtcactgcatgtgctctgctcacttcacctgtcttctagtacgtgtgaatttcgaaagcagatgtcacccgaagaagtttgagcttaacatccaactcgattccgttttgctacagtacaacttgcagcgatgcagtagctcttcatt

SEQ ID NO: 26444 - DNA, 2423 bp, Oryza sativa
  ref <308>: DATABASE ACCESSION NUMBER: AK101886
  ref <309>: DATABASE ENTRY DATE: 2002-08-28
gagctacacacggaaacggccgccgaacaaagcgaacaactactagtcgtctcgtcgtgctgcgcactcgccccatcgacgagagatcgcctccgcctcgcacccgccggcgccggcgccgcctcctcctcctcctcccgccgttccaccgccgcgcctcttccccgccccgatcggctgccgccgccgcagctgctcgccgcctcgtttccgactcccaagggcattcctccatgggtggggcaaatgactcaagtccatcctctaaacttcacacaagactgagactatgggagttcccagaccgctatgtatttgagccgattgatggtcttgctgacttgtatctgtcagctaaccgttctgatggttcaatgaatctagttgaagagttgccaccacgtgactcttctacaaaaccaaaatgtcaaacagtgtatggtgtgataggagttctcaagctttcagttggatcatattttttagtgataacaggccgtgattgtgtgggatcctacttgggacatgcaatttttaaagtgacaggactaaaagttctcccctgcagtaactcacgtagcacttctggcaatcagagtaaaatggaaacagaattttcagaactcctgcatgctgcagagaagactataggcctgtacttctcatatgatatcaacttaacacttactttgcagaggctacataatcttggtgatgagttcaaatcacttccgctttgtagacaggcagaaccaagatttctatggaacagttacttgctggaacctctaattgagaacaagctggaccagtacttgttgccagtcattcaaggcagctttcagaatatccatgcagaagttggatcggagaaggtaaatgtgaccctgattgcacgtaggtgcacacggaggataggtacacgaatgtggagacgtggagctgacccagagggttatgctgccaactttgttgaatcagagcagataatggaatcaaaagggttcacagcatcctatgtacaagttcgagggtccataccattcttgtgggtgcagattgttgatttgacatataaacctagctttgacattgttagacaagaggaggcgccacgcatacttgagcagcactttcatgatttacagaagaaatatggagctgtattggctgttgatcttgtcaatacacacggtggtgaaggtcgcctccatgacagatatgcaaaatctattgaacctattctcagtgaagacataagatatgtgcattttgacttccatcgaatctgtggtcatattcactttgagcgcctttctcagctctacaatcaaattgaagattatctcaagaaacataggtatttccttttgaatggtaaaggtgaaaaaattgaggagcagactggcactatcaggacaaattgtgtcgattgcttagatcgcaccaatgtaactcagagcatgattggaggaaagatactagaaaaccaacttcagcgaataggggttctcggtgttaatgatacgataagcaaccatccagcttttgatgcaaaatacaaagttttatgggccaaccatggagattcaataagcactcagtactctggaactccggcattgaagggcgattttgttcggtatgggaagagaagtacccagggaattctgaatgatctgtggaattcacttgctagatactacttgaataactttgcagatggcactaaacaggatgccatggatctacttcaaggacattacattatatctgttagccgcgacatggcaggtccaagcaaagcaggacttctagagaattatgcgtccttccgccttgcttttgcattggttatgggagctcttatgttcatgatgatgtcactaagacaagccaggaatgatgttcgccatttagtgttgtcacttctatgggctggtctttgcattggcatcacacattttgtcagagccaatggtcgggtgttcaccaacagacctcgtttttatcagtcgcgccattgaagcaaaacaaccactttacacggacactgagctgcctcataggttatcatttttcatcagacagtcagcaccttgtttcatatgaagatatattggtcgcattttttgctgggaatttgaccctcccctatattgtaatgagttttattttccatttttgtaacaagtttttttttccttttccttctcattgttttgatttccagccatcttttggggcatcacgttcacgattctgtttgacttagcagtatataattcaatacacctcctgtacactgtttcatcgacaacaactatatttgacatatttttcttgcaaggattaattatgttcaaattccagaatggattactgatcagtaaaaaatatgttggcacagtttttcaagatcc

SEQ ID NO: 26445 - DNA, 1914 bp, Oryza sativa
  ref <308>: DATABASE ACCESSION NUMBER: AK101887
  ref <309>: DATABASE ENTRY DATE: 2002-08-28
gacgagttaaaaccctcttcctctctctctctcgcttcgtcttcctcctccacacgaagcggcagcgccaccaccacctccgccgctctctccactgcgccgccggcgccatgagcctcctcagcaactccctcctgctccaagggcggttgcggcatgcggcggcttcagcggtggcggcggcggcgatggggcggcgcggggtggcgacgtcgacggaggagtacaatcgccggaactacgccaacaacatctccgagtacaataccgtcttcgggtccctcaccgcgcagcgcaggcactacctattgcgtgatgcttatgatgacatgatgcttgatggggttcagcctgtgcgggacacattccacaatctcatagtcggtgccatgaaaggcagccggctacaagatgcattctactttcgtgatcagatgaaagaaatgggtttgcagcctgatgttaacctttacaacttcttgatctccacttgtgggaaaagcaaaaactcagatgcagcgatcatgcttttagaagaaatgaaggcacatggcgttaagttgaaaggtgaaacatacacttgtcttttgaatgcacttgcagcaacagggcgtacagatcaagtgtatgctatagttcgtgatatgaccgctgctgggcttggattaaacaagttttgttatgctggactaataaccgcattcaagaacaaggcaccaaccactgaggagactatgacaaaaattgtcgagtttgttcagcagtcaaaaggttggaaaaatgttgaaagagtatcaaaagatagctccgaaaatataatgatgaatgtgtcagaggaagagctttataacctgccaacagctgaatatgtacatagacaagcatttgtctataaacagatgacaatttatcatgttgctatccatgcttgtgcagacctgaagagcaaagagacacttgaagtacttcttgacatgcttattaaagatggatttacttatgatgccttcattgcgatccagctatgaggtgttatcttcaatgtggagatattgattccgccgttaagatttttgaagagtacacaagctcaaaatccccgcctgcagagttgtatgtgacacttgctgagggagctatgattgggcatacaccaagaggaatgcaacttgctcaagaaaccatagagaagatgacttcgagaaatttcttcttaaacgcaaggatgggaactgatcttctacttgcagcttcaggtgaaaagactggtggatatacaatagcaaattatgtctgggatctcatgcaaaaccgcagaatcactccatcacttcctgctgttgaagcatactacaagggtttgaaggaacgtgaaattccttctgatgatccacggctcatgaatgttagccgtgtcttggacaatctgagcattcgttttggaccaaggagaaacagtaacgcacaggcataatgtcgtcgtcactaatccaatgcgagttagattttgtgttaataaaactgctggatacatcatcaatatgttagcacttgagaagatcaacgaactgaaattaggatagcacaaagcgaatatgaaaccatcaagagatgaaaccatcaagcatgatgacaaggatcagggtacccaagtccaacctgaaggattttcatccgcatcgcggaaaatctgattctcaagtttcttttaacttttgtaaacttactgttgtcggaatgttacttatcacactggtttagagagtttattctgctgagtaatttgacattagatgtccattccattgctacctttcaggcttcagctgcgagtgtatctgaatggtcatttctcagtttgacaaataattgttgtgagtttaacttcaaagaatcactggaagaattttatgc

SEQ ID NO: 26446 - DNA, 3586 bp, Oryza sativa
  ref <308>: DATABASE ACCESSION NUMBER: AK101888
  ref <309>: DATABASE ENTRY DATE: 2002-08-28
gattctctctggagtcttgctggtcaaaaaatatcctcaaaaaaggaaaagaaaaaagaactagggtttacgctccatggaggtcgaagcccagacctcggccgccgcggcggcggccggcgacgagctccggtcgctcctctccgccaccctgagccccgacaaggcggcggtggacgccgccacggaagggctctccaggatcgccgccgcctccgacccccgcttccccatctccctcctcgccgtcgccgcagctgatggggaccaaggaacaaaagttgctgcagcaacatacttgaagaattacacacgccgaaatattgactgggggttgtcatcacctgagctttataaagagttccgtgatcggctcgcccaggcgttgcttcaagtggaacctttccttcttcgagtattgattgaagttttccgccaagtcatagaaaaagattttgtcaaggaaaatttgtggcctgaacttgtcccccagttgaagcaagtgatccacagcagcaatataataagtccaggccagcatcctgaatggaatactatcaacgcactcagagtacttcaatctgttgttaggcccttccagtacttcttgaaccccaaagtagcaaaagagcctgttccaccacaattggagcaaatcgcatctgagattcttgtaccactacaagtgacattccatcacattgctgacaaggttctgttgtcacgagatgagactaatctggaatacgagcaactcctactcatcacgagcaagtgcatgtatttcactgttaggtcatacatgccatctagggtaaagcagattttgccttccttttgcaaagacatgttccgcatactagaatcactggatttcaacagtcaatatgaagatggagctacaacaaggctcaagactgcaaagagatgcctcatcatactttgcacacttgttactcgtcaccggaaacatgctgacgaccagatggcacatattgtcaacagcgcaaccagaatatcaagtcaaagcattcatttacataaactcgaccctctctctgatcagatcatttcattgtcatttgatgtaatttctcgtgttctggagacaggccctggatggcgacttgtttcaccacatttttcttcacttctggattcagcaatttttccagctttagcattaaacggaaaggatataacagagtgggaagacgatactgatgagtacatgcggaaaaatctaccttgtgaacttgacgacatttcaggatgggctgaggatttattcacagcaagaaaaagtgctatcaatttacttggtgttatagccctatcgaagggccccaccagttgtatctgcagcttctaagcgtaagaaaggtgataaaagtaaaggaaaaggagaaaggagctccattggggagttattggttataccattcctgtcaaaatttcctatacctccccaaggggaagatgtgtcatcaaaggcagtgcagaattatttcggtgttctaatggcatttgggggcctccaagattttctgactgagaagaaagatctgacaaatacaatcattaggaatcgtattcttccactgtattccctggatccatgcagtccatatttgatttctgcagcaaactggattattggacagcttgcgttgtgcctaccagaggccatgagcacaaatatttatcattcattaatgaaggcattgacgatggaggattttgatgagttgagctgttatcctgtccgtgcttctgcttctggtgccattacagaactcattgagaatggttatgctcctcctgattggcttgtccttttacaagtggtgatgaaaaggataagcgttgaagatgaaaatgagtctactcttttgtttcagcttctgggcacaataatcgagtctggccaagaaaaagttatgcctcacattcctgaaattgtatctaacatagccaataccataatgaagctattgccccctgtgccagatccctggcctcaggctgttgaacggggttttgctgcactggtatcgatggctcaagcttgggaaagctctgcaccagatgaaaacaaggacattgaaatgagggtctggcagtcaggccagtttgctatggcccaaacattttcgcatgtgttacaaaaggcttggttgctaccagttgagcaaatggggttatctgtttgctcttcattgccacctctgtcgtgtgtaaatgatgcttctattttacttgagttcattatgaggtctatcacctctatggaagaaactgcaagtatgaaggtgtttgagctagtagctatatgggctgacataattgcttgttgggattcttgggaggaaatggaggatcagggaattttcaatacaatcaaagaagctgttaacttccatcaaaactttgattctaatggtttcttcctgaaaatactcccttcccgatctgaaaatagttcacaaagttcagtcataagttgggtttctagttttataaccagggccattgaagcttacccatctgcaacatggagggcatgttcatgcatgcatacactgctgcacactcctaatttctctcatggagcagaagatactagaatgactcttgctgtatcctttgcgcaagcagcattctcccgtttcaagtctgtatctgacagcccttctgggatatggaaaccactaatactagtcatttcgtcatgctacatatgctaccctgatgctattgagcaagtcttacgcaaatatgacagtaacggttatgcgatatgggcatctgcattagcacaaatctcaagtagctctttcaatcctggcttgtcatctgaatccgagatcaaactagctgtgttaacgttagcaactgtgattgagcatcttttggccctttctatgggtggcaccaaactattgcatgattgctgtgtatcattgatggagtcttgcatccatctgaaggaagttcaagaggatggggatgatggtgatggtgcagaagatcttgatgatgatgatgatgatgaagaggaggaagacaccgatgaagatgatgaggattataatcaggattcggatgatgatgatgtacgagaagagacagaagaggaatttcttcaaagatatgcagcggctgccggtggtgaatcaattgaaattgttgaggacggtgacattgatgatgaaacccaagacattgaattgggttccctggatgaaatggatgtacagcaggtggttctttcgatgatgaagattcgtcctgatctcattcgcgctcaaacatttccggatggcctaatggagagaatggcagaaacgtttcctgaatatgaacagctgttccatgttcatcggcaagcctaggcgataccacaatagacttgtgtgcagccttgttatttattgtttctagtttcttttttttttaaacttgtccgtgtgtttatatatttgtatggaatggtgggccgattattgttgatggttgtggcgattattttgtgatttggatcggactaatctgccggacatgatgttttaaggagttcaagggc

SEQ ID NO: 26447 - DNA, 1802 bp, Oryza sativa
  ref <308>: DATABASE ACCESSION NUMBER: AK101889
  ref <309>: DATABASE ENTRY DATE: 2002-08-28
gacaggtgttcgccatttcgccgcccccaccaccgcgcgccgccgccgccgccatggcctccatctccgccgcctcccccgtcgctgggaaggccgccgccttcgcccacaagaacgagctcgccgccgccgccgtggcgccgtcgcagcagcagctgcagcggagggtgagtgggaggagggcgcgttcggggagggtccgcgccgtcgccacgcccgcccgcgccccccgcgccccgtcctccactggctcggtgaagagcgccatgacgatgacagagaagatcctggcgagggcgtcggagcgcgccagcttggagcccggggagaacgtgtgggtggacgtcgacgtgctgatgacgcacgacgtctgcggccctggcaccatcgggatcttcaagcgggagttcggggaggacgccaaggtttgggaccgagagaaggtggtcatcatcccggaccactacatcttcaccagcgatgagcgagcaaaccgaaatgttgatatcctcagggatttctgtatggagcagaacatcaagtacttctatgacatcaaggacctgagcaatttcaaagcaaatccagactacaagggtgtttgccacgttgctcttgctcaagagggtcattgcagaccaggcgaggttctccttggtactgattctcatacatgcaatgctggagcctttggccaatttgcaactggaattggaaacactgatgctggttttgtgatgggcactgggaaggctcttcttaaggtgcctccaactatcaggtttgtattagatggagaaatgccaccttatttacttgcaaaggatctgattttacaaattattggtgagatttctgtatctggcgcaacatacaaatccatggagtttgttggatcaactgtggaaagtctaaatatggaagagcgaatgacactgtgcaacatggttattgaagctggtggcaagaatggtgttgtgcctgccgatcaaactacatttaactatcttgagggcaagacatcagttgaatacgagcctgtctatagtgatgctcaggccagatttgttagtgactaccggtttgatgtatccaaattggagccagttattgccaagccacattcacctgacaaccgtgctctagcaagagagtgcaaagatgtcaagattgaccgggtctatatcggttcttgtactggaggtaaaactgaggacttctttgctgctgcgaaggtgttcttagcttcggggaagaaggttaaagttcccacttttctcgttccggcgacacaaaaggtgtggatggacatttatagcatccctgtaccaggagccggtggcaaaacttgctcacagatatttgaggaggctggttgtgatacaccagctagccctagttgtggtgcttgtttgggtggtcctcgtgatacatatgctcgcatgaatgaacctatggtgtgtgtgtcgacgacgaacaggaatttccccggcaggatggggcacaaggaagggcagatctacctggcttcgccgttcaccgcggcggcttcagccctcaccggatacgtcactgaccccagggacttcctgatgtaaacagttaaaacacaaaaggagttggatgctcagagccattggcgtcttgtactactgtacaacggctgttttttcttgttcaatttcaggtgtagtgtaggtttgtccccttgggtaataacaaccaataagttattttcctttcattctatttcctaattgtgtactgggatattatatatttggtggacatgattttgcttg

SEQ ID NO: 26448 - DNA, 2755 bp, Oryza sativa
  ref <308>: DATABASE ACCESSION NUMBER: AK101890
  ref <309>: DATABASE ENTRY DATE: 2002-08-28
ggttccctcttctcgctccttaatttaatctttaattaatttatttctcgcctctcttaacttattttgctcctcacttttcttcactagctcaaacacttacacgaactcggattgttaataatcttttactactcctatatacggcaataaaatcttcgatttcatcgattggtcgccactctccgattccccccaactcgtcggtagcaggtagctcgatcgcgcggcggcagaatttccggggtggatttggccgatttggggcatcagggcatggagcgccgcgggctactaaaggcggcgcttttggtgtgcttgattgtgctttgctccgggagagaaattcaggtcattcaacgccatccctctaccaccatatataacccaaagcttgccaagacacttgtggaatatgcttcagctatctatactgctgacctgacacaattgtttacatggacatgtgctagatgtggtgacctgattgaggggtttgaaatgatggatatcatcgtagatgtggagaactgcttgcaggcatatgtaggttttgcaagtgatatcaatgctatagtagttgtatttagaggaactcaagagaacagcattcagaactggatagaggacttgctatggaaacaacttgatcttgactaccctggtatgcctgaagcaatggtacaccgaggattttattctgcttatcataacacaacaatgcgagatggagttgtcagcggtattcagaagactcgaaaagttgtttggagatgttccgatcatggtaacagggcattcaatgggtggagctatggcttcgttttgtgcacttgatcttgttgtgagtactgcatcttaactgaattcaatagtgttcacttttagctcctatatcactttctgtttagaaaattacaccacatattgtttctctgcttagttttgtgcaataaattataaacattttattctccacatctgacttcacataaaagagagaagtgttttattttgttggaatttggaaacaccttcttccatgataatactttatattctggtcaaatggacaaatagtctgcgaagctgtcgagcctttttatcttcttggagccgatctttcatctttcctttgccagcctagtactaattttcagttatgtagtagcaatctacatctatggtcggtttgtaggtttccattccttacttacagtggcggagccaggatttctcgaagcctagggctcaaaactaaatactaagctatggtcatttccgatgttagaatgatatttttagcggtacgagaaacaagaaagcttattagtgtatgattgattaagtattggctattataaacttaaaatatatatttatttatatatttagagaaacttctatattgaaaacttttgtatgagaaacactatttagtaattcaaaaaacatgcacatgataaataagacattttttcagcccaaactcacttgagaactcagcctaaagctacccaaaattcctatataatatctctgttttcaaaatatagcaatttttagttacgaatctaacatagaattgtctggattcaacacttgtccagattcgtaactaaaaatttgttatattataaaatagagggagtacgttaggtgggctattatatattctcaacctcgtaggatagagcacgaggtgttcctacagataggcatatttagcaaatgtatcacctaatgctatcatagaatgaggttttgtttgtagaattgttgggatacatgcctcctttgccggtccaaagaagtatagtagtagtatggactagagagttcggcaattaaaataggcctccaagtaatggtagtgagggatagagtcgatctaagtcccaggctggagtatacgcgtagggctgagacatggaaggatcaaaatatctgttgaattttcaggtataagaccgttaaattttttcccacgcctggggcctccagcccaagcttgccccaggcgtggttccgcccctgcttacttacctccaggttttgcctctacagctaaacaggaattctgttttcttttaggtgaactatgggctagatggtgtgaagctaatgacatttgggcagcctcggattggcaatgctgcttttgcttcctttttcaagaaatacttgcctcacgcaatccgagttacccatggtcatgatatcgtgcctcacctgccaccatacttctcattcttcccacagaagacctaccatcatttcccaagagaggtatgggttcataacgtcggactaggaagcctagtgtactcggtagagcagatctgtgatgattctggtgaagacccatcgtgctgcaggtctgtgagtgggagcagcgtgcaagaccacatatactatctcggcgtcagcatgcacgccgaggcatggagctcctgcaggatcgtcatggactacagcaagctgcgttaccggatggacatcaatggcaacatcgtcttgtcaaagcatctgggtttgtcaggtgacctagaacacagtgaccaatgattcaaaatggaacagatttagtataatggtagcttagatgtgttatattattgtacagtactactacacgtgtgttcctctctctgatgctcatatgtgtcaaaattgttcatgcgtcagaagaggattgggagatgcttgctgtaaatgtggtttggtaatgtgaagcattgttcagttcacaagt

SEQ ID NO: 26449 - DNA, 4168 bp, Oryza sativa
  ref <308>: DATABASE ACCESSION NUMBER: AK101891
  ref <309>: DATABASE ENTRY DATE: 2002-08-28
gtaaggatttagggttaggttttttggtttcttttatttctttttctttggatttctttccccgaaccgatctaatcgctagggtttggctctgataccatcgttagagttcactttaggatcatcgagcttttgatctagtcgggtagtcctcttgggtgtttgaacaaatatagagatggaaagagagggtttaaagactgatgggtagagatggaggaggaggaagtgccggccatcgtcgttgtcatcgctcgcttgtcgtggacggcggcaacagtgggcttgacagcgatggtggtcgtggcagcggcggtcgtaggtgcgacgacgaggcgtggcgcggcggtgatgcttcccgtcactggctgcgccccctcgatcggttagggttttgtgggtggagttggcggcggcagcgaacctcgtatcatgtgccgtcccggcctccaccctctatttatatggcgcagggtgacgggggcccaccagccaatgggctgggcgcccccgatcaggacgcgggtcaaggtccccttgtgccgttgggctcaagaggagggagatctatctaacatgatctggctttctccaagacccaagccaaaaaccgattcaggctctttttccaagtcaaaccacataatctagttctgcttttatattcttttagcgtgcgttctacacatagcatcacaaattttatctaacatacatagtagtatagtactacttaaatagtcggagactcgcattagtaataataaatctctgaacttgctaaacttttatgaaaagcccaactactgatcacatgccagtaatattcataggcataacagtttttttttaattatgcataggaaggagaggaagaagaaaatagctagtactaattaagacgatgcagccgatagagaatcattgtgtataaaactagaaaaccgtagtgtttggtaacctactacgcgttcttctcatcccaccgatcgatcgcgcgagcttgctatgccgcaacatgcaccgtccgatcgaagtgtttcctgcatgcttcactgcgatccggccgtccacgagcacaatcaagcttgattaatttctgctggtttgtttgcggcaatgaggctgacgacgcgttaatcattttgggtgacgttaccagctgacgtatgtgatcttcatcttgtgttccaagtttcaaaagcttcgctcgatcttgagcttttgatatatcgtggctctcaattagctcttgctgactggcagctctaaatcaacgagcacaagcttgttggctatagctcttatcctcttggcctcttggcgagcaaaatatatctaatcttagccgtttagtgataaaatcctttcaaaagtagtagatgtaaatcctcaatcaagaaaaagtaacgaaaattaacccaaaatcaaggcaaatcgatcgatttgtaggcaacgcaaaaacagatactccgctctaagtagtaggagaatcttctagtatagggcgtggagctagcatggaacaattcgaagaaattaatcaagaaaccggaaactaaccaattatgtaattaacaacaaaatccatcacaagaagagcaaaaaaaaaagctgcagaagcagcaaaagtaattcatataattggttgaggaattattagagaatactactcacatattgttgagtacccagctgcgcacggcgtgcctcgcctgatatgatccagcaaacgatccgccgccgccgccatcggaagcgagaacgacgacagagcaagaggtcgagctagcgtgcaaatggccgcagtgttgctggcacgcggcaatagtcgaggcggcggagtcaacctactaggtaggtagtgtggtctcaactctctctagggcagacgatagctgtggttgcagagctggtggtcgtggtgggcgagatagatgactaatttgcagctagccgcgcgtgtgggccgccgcgcgaccaccccgcgttttccatttcggcccaggtgacgccggaccgtgcgcctccactttccgtcttgggttttcttatttcagcccagctcgcgcgatcagttcagcccatctgtctaaattttgtatacatatggatataaactttgaatttataagtatacaaactttgcatatgtctttacattttttatacatcaaaagtatgcgtatacataaaatacactcacacacacatatacacgtatgatatgtgcatctgcttcctccgcacgccaccaccttaatttgctccctgtacagtgtcaccaccgctactcccttcgcacaagcaccgccccttctacctccgcgccgtcgctccctttatctctcgacatgtcagttgctttatctctcgacatgtcagttgctgcttctccctcaacgtgcctccatccttgctccctccgtatgtgtcgtcgctttcgctgctccctctgcgtgccgccacccctgctacctccgcacacactgcctccgcgccgctctctccgctcaccgccaccccttctcgctccgtgcgccaacggcaccgctccctcctcctgacctattcattgctacttctcccttcgcacacatcgttgtcgctcctactctctccacgtgtgccgccgcccccttctccctccacatgcaggtgacgtcgctccctcgttccccgcccgtccgctacaccagcctcccaatatgaaaggggatgagaagaaagttggagataggattgttgtgtactcatgggcattttggtacttttggctaataaatacatgctttttttttttgtttttttatatacaaaaccttaacgtgtaatggaaacacggtcaaatgataacttcaattttaaaaaataggatcaaatgcaaacatgaaaatgtgaggttagattggtagaataaggtcaaataagcaattatcctaatttattattcttcttagagaaaggtacctgaactaatttaatggttcacttagcccactaaagttttttttttgccttatcttacccctaaactgttaaaaatgtttcactttgctccttaataacatgtacattttcttacccgtcatacaagttgcattttaagctaaaatgtaccagcggtattttaagctaaaatttgttaggagccatagatggcaccattaacgaagttcaaaagtattttcaaattttttttcatcgatgtttgcttgaacttaattttgatgtttgaatcactttcaacctaagtaaacagtgagaattctttttttacaaaaaatgttgaaacctaaattgtgaacgcatctatgttctaccaaatttccagagcaaaattgacttagatagagagagtaaaaaatactgctaggggggttcgaggtgtaaaatgagaaaaaaaagtttaggtggttaagtgctatgatgaaatggttacttttttttcttactctttattacgagccacctatcttgtcgtcatctagtccaccactgttctcacaaattaaggattattaaagcctattagaaacatatattgtttgtatggactttgggattaattagttagtaaacaaatgttaaaaaataatgtaaggttatactctctccgtcccaaaatataataagtggctattaaggagagaggtaaaagaataatgcatggttgcctctccttgggatgaatggagtatagccgtataggcctggacaaattggggctataacaaagggataatatggttaatttagtggtaaaagtcacattttataatactgggttgctttatttgggataaggtttaaactattttatgatgcaaggagcagtatttttccaatgccctagctaagctagggcctattctttttagatgacgcagcatattctgataatataagataacttacttataacaatgaattaaatattacattatagagttaacaaatagcttcaaaaagttaccaagcaaggctaatgaataattatttttctggagcattgtactttgaagcatggcaccaataatgatgtattgataatcagccccagttaattagctcattccaacagggcagtcattcagagccacaggcaaatcttcccaaaatataagaccatgaaacgtcaggacaacaacaatgaaggaatagaagt

SEQ ID NO: 26450 - DNA, 1346 bp, Oryza sativa
  ref <308>: DATABASE ACCESSION NUMBER: AK101892
  ref <309>: DATABASE ENTRY DATE: 2002-08-28
gaatctccttcagtcctaccttgtcttccatttttcacaaatcgcaagcaaagccccacaccaaaatccacccacgaaggccgaagacgacgaggcaaggcaacgtcggtgttgtgagggggacacacacaaacactcgaccttcgagagatttccgagcggcagcaatggatctctgggagagggcgcgggccttcgccggggaggcggcgaagcggtcgcaggagctgtcggcggaggcggccaagcgctcgtcggcgctggtgtcggagacggcgaagaagtccaaggagatcttctcggagaccgcgaccaagtcgcgggagatcgcggccgaggccaccaagcaggccgacctcctcgccggccagatcaagcgcctctccaccgacctccccgtcccctccatccccgcgatcccgcccatccccaccgccgtcacgccggagccggacgccgcggagctcgagcgctacggcatcaccgaagacctccgcgagttcgtcaagggcatgactatcagcaccttccgcgacttccccttgcaagatgagccggagatgtcggatgtgcccacggtatcgaacgtgcgtcaggatctgaatgagtggcaggccaggcacgccactctcgtcctctccgccgtcaaggaaatttcaaagttcagatatgagttgtgtccacgatacatgaaagagcgtaaattctggagggtttatttcttgctagtaaacaactacacatccctctatgagaacaaatattttgaggagctgaaagtaaaagcagaggaggaaaaaatggatgccaagaaggaagtaacagagacctcacaagctacaactgcagaacataaagacatgaaggtgcaaagcaagacttcaacttcaacaaatccagagcatgatttggatgttttccttctgggagatctaggcagtgatgatgagggtcctgatggtgatgatgatgggttagatgatgacttcgataagatagatggcacttcaggcttagagagtgatgatgatgatgacaaggaaaaagcagcaggcaaggcagaaagtgcaaaggagtagcttgcagagctggtgatcaatatgatatgaagtgctttcccagatctacacatgcttatcatgacaacgaaggctctagcacgcagcttactgcactagtccagctgctattgtataatagatggttgcatctatccattcatttttctcccactgaagcaatgctgctttcgttgttgcatttttcttgtccaagatttagaaggctctattgtttttccgttttctggagccatctagggtgctttgcatatgccaatatacttc

SEQ ID NO: 26451 - DNA, 2115 bp, Oryza sativa
  ref <308>: DATABASE ACCESSION NUMBER: AK101893
  ref <309>: DATABASE ENTRY DATE: 2002-08-28
gtctacattctccacctctccaccattccaaactgccaagtggcaacaaacctactactaaaccctaaaaatcccaattcccacccgacccgacaccactcctctcctcctccgccgccgccgccgcctcctcccaaaccctcccctcccccatggccgaagacgccgcggcggccgccatggccgcggcctccctctccgacgacctggagcccgccaccgaccgcacccgcatccgatccatcctggccgacggcgccgcgcgcgccggcgagcgcgtcgtcgtgggcgggtgggtcaagaccgggcgggagcaggggaaaggcaccttcgccttcctcgagctcaacgatggctcctgcgcctccaacctgcaggtcctcgtcgacgccgccgtccacccgctcgcgccgctcaccgccacgggcacgtccgtgctcgtcgagggcgagctcaagaagccgccggagggcgccaagcagcgcgtcgagctccgcgtcgaccgcgtcatcgaggtcggcgaggtcgaccccgccgcctacccgctgcccaagaccaagctcacgctcgagaatctcaggggcgtcgtccatctccgctcccgcaccaacacgattggtgctgttgcgcgtattagacaccagctagcctgtgcaacacacaggttttttgatgagaatggttttctttatgtgcacacaccaataataactacaagtgattgtgagggtgctggtgagatgtttcaagtgacgactttgttcagccatgctgaaaaggtggagaaggaattgaaagagaaccctgcaccatcagagtctgatattgaggcagctagagttgttgtcaaggaaaaaggtgatgcggttgcacagcttaaagctgcaaaagctagcaaacaagaaatcacagctgctgttgctgagcttaacaaggcaaaagaaaatgtctcaaggctggaggaaagatctaagttgaagcccggaattccgtacagagatgatgggacagtagcttatgagaatgacttcttcaaacgccaggcttttctgactgtgtctggacagcttcaagttgagacctatgcatgtgctcttagcagtgtttatacctttggaccaacattccgtgcagaaaactcccatacatcacgacatttggcagagttttggatggttgaaccagaaatcgcatttgctaacttgcaggatgatatgaactgtgcagaaagatatgtacagtacctttgcaagtggcttcttgagcattgccgggaagacatggaattcatggtgaaaaattacgataagactgcaattgagcgtctggagcttgtttcctcgacaccttttcagcgcatttcatatacaaaagctgttgagctattgaaaaatgtcactgataagaaattcgaaaacaaggttgaatggggaattgatttagcttcagagcatgaaaggtatttaaccgaggtgatatttaagaagccggtgattgtttataactatcccaaagaaataaaggcattttatatgagactcaatgatgatcagaagactgtagctgctatggatgttcttgtgcccaaggttggtgagttggttggtggaagccaaagggaggaacgtctggaccttctcaaaacaaggatacaagacgccgggttgcctttggagccatatgaatggtacttggacctccgccgctttggatctgtcaagcacagtggttttggtttgggttttgaaagaatgattctttttgccactggtttggagaacatcagagatgtcatccccttccctagatacccagggagggctgatctctaaaataaccagagaaagctggattctaaagttcttctcgctgtcctgttagctcctcaatttcaggtctacaaatgtgcactgatatatttcgtgtcagcttggttgtaatagatgctcaccatgtatttagttatttgccactacagcatatgaacgaccaatttactcatttttgcgatagttgaacattttagaagttttgttcaaagcaagatctatttgtactcgttaattgttacaaaacgtggttttgcaggtttgaagtcataaccgctacattttc

SEQ ID NO: 26452 - DNA, 930 bp, Oryza sativa
  ref <308>: DATABASE ACCESSION NUMBER: AK101894
  ref <309>: DATABASE ENTRY DATE: 2002-08-28
gctcttctcccaactctccactcccgcaccgcacgcacacgaaaccgatttccctccgccgcaaccggagctcacctcacctcgccggagaagatccgccatgcctcgcgtgcctctccccctcctcctcctcgtagccctcctcgtcgccggcggcggcggcgccgcggcggagacgaagccgacggcgtacgaggcgctggcgacgttcgacttcccgccggggattctccccaagggggtggtctcctacaccctcgacgacgccaccggcgacttcaccgccacgctcaacaccacctccacctgcgccttctccatccagggctcctactccctccggtaccagcgccggctctccggccgcatcgccgccgaccgcctcaccaacctccagggcgtctccgtcaagatcctcttcctgtgggtcaacatcgtcgaggtcacccgccacggcgacgagctcggcttctccgtcggcatcgcctccgccgacttcggcatcgacaacttcctcgagtccccgcagtgcggctgcggcttcgactgccacgaccaccgcgatctgtcgctgccgcttccgctgccggagcccagcctgcggctgcgaggtgcgttctagaatcctcctcctcctcgatccttggaggttgctgctctaaagcaattcttggataaatgctgttggtgtgagctgcaagatccaaatctatctttagatgggttaataaacaagaattggtagatccccaactttttgatgggataggaaattcagagctcgatttcgtatgtttctgcactgtttcagacagtttagagagaatcacaggagaaagtaagatcagctgaattttcttgtatgcaaattctttgggaactataccgagaaaaaaaaataactcaatggaattatgttctttagcttgt

SEQ ID NO: 26453 - DNA, 1688 bp, Oryza sativa
  ref <308>: DATABASE ACCESSION NUMBER: AK101895
  ref <309>: DATABASE ENTRY DATE: 2002-08-28
gtctctttcgctgcgttgcgtcatcagctctgaaactctgaaaccaaaacccacccaccctcgcggtcgccggcgctcgaatggcccccaacgccgccgtcctggtgcggccccacatcgccggcgtccaccatctgcccaccggccggcgactgccccgtctggctcctccccaggcggtctcgccgccgttttcacggcagaagggatctgtagtggctgcgagtggacgtgtctgggcgagtgcgagtggttcgtttgagaaagatcgcattggagatgacgatgtgttagcttcgccgcagatagtggaggagagcaaagtcgatttgctgaagattctgaagagtgccaacaccattattccccacgtagtgctggggagcacaattcttgctctggtgtacccaccttcttttacatggttcacaactagatattatgcaccagcattgggattcttgatgtttgcagtgggtgtaaactcaagtgttaaggatttcattgaggctatacaaagaccagatgctatagctgctggctatgttggacaatttattatcaagcctttcttaggattcctttttggcactcttgcagttacaattttcaatcttcctactgctttaggtgctggtatcatgttggtttcatgtgtgagtggagcacaactatcaaactatgcaacgtttctgacagatccacatatggcccccctcagcattgttatgacatcattgtcaacagctactgccgtttttgtcaccccaactttatcctactttcttattggcaagaaattaccggtggatgtgaaagggatgatgtccagtattgttcaaatagtggttgctccaattgctgccggattgcttctgaatagatatcttccgcggctctgttcagctattcagccatttctccctccactatcggtatttgtgactgctttatgtgttggttcaccattggccataaatattaaggctgttttgtccccatttggactagccacagtgcttctcctttttgcattccatacatcatcttttatagctggatatcatcttgctggtacttggtttcgcgagtcagcagatgtaaaggcactacaaagaacagtatcttttgagacaggaatgcaaagtagccttcttgctcttgctttagcaaacaggttcttcccagacccactagtgggagtgcccccggctatatcagttgtgctgatgtccctaatggggtttgctcttgttatggtgtggtccaagagaacaaaagaatagctcatattgaactattaaagtcagtcagctacagagcagtgttcagtattaacagtgatgtacgctcttctaaaatcaccatgaagaacagccaatcacaaaattggaggtgaggacggcagatgtttgatggctaagatacaaactcttccagtgccaataaaccatgtacaccattgctctgaatccttctcgctttctttcgccgtggtactcttttcttgttcctgttctgaacttaaccaagacctcaagttgtccaagtgcagctaggattataaagttgtccaagtgcagctaggattataagcatttatgtgaaaggatctctgtaacatttattcagtataaggagaaaaagtggaggaagaagtaggaaacaacaggtctttgaatttcctc

SEQ ID NO: 26454 - DNA, 3363 bp, Oryza sativa
  misc_feature (3351)..(3351): "n"=any one base of a, t, c, or g
  ref <308>: DATABASE ACCESSION NUMBER: AK101896
  ref <309>: DATABASE ENTRY DATE: 2002-08-28
ggtgtgtactcctccactgtgcagggcaccaccaccaccaccaccagtggacgctccccttcgccggcgtcgggcaggtggccgccaccgcggcgaggcagcagcaggagtggaaggggcgagtcgggggaggcgggttcatggactctggctccagatccagtggcggcgccgggttcgacgacgacgatggcgtggccgcgcggcgtgaggtctcgtcctcgctcaaagagaggaggagggagggtaggggggaagaagggaggaggaggtcgcgtgagctcatggagatggagatggagatgtactcgcggtgcgcgcggccatcccacatccaccagctgcatgcgcgcctcgtggtctccggccgcctccgctgcacctcgccgtcgctcgcgctcgcgctgctccgcgccgcgtgccgcgtgcgcgcgtcgccgtgcctgcgtcccctcgcccaccacctgctcgaccatatcccgcgcccgcacccgcatctgctccacgcggccgctcgcctcgcgtaccgtctgcgcctgccttccctcgcgctccgccactatgtcgccctccgcacgcaccacccggtgttcctccctcccgcagcggccatcgcggacatgctcaagtctgtccgtggccgcgccgcgcatgcccacgcgctacgcgtcaccgcccacgcaggggacactaggttcctggataacacacttgtcgcgatgtactttgcctgtggagatgtccagcgcgcacggcttgtgtttgagggaatgtgtgaccgggatgtcatctcatggacatcgctaatctcaggactagtgcaaaatggcagccccttgcaaggtatacagcagtttgcaacgatgatgcactgtgatgtacgccctgactttgtggtgctagtgaccgtcgccaaggcgttcatggagcttgataacctgccaggtgctgaatcagctcattccttagttgtcaagggcggtttccatgatgaacaagatgtgatgatcacattgacagccatgtatgccagctttgggtgcttagtagctgcgagggcgctttttgacatggtcccaccccagcaggtgaatgtgatcctgtggaatgccatgatatcaggttactccaagaatggatttgccagtgaggcagtgcatttatacaagcatatgcagctggttgctaggaacttggctcccgattctatcactttgcgatcagtaatatttgcatgtgctcagcttggctccactgagcttgcggcatggatggaggattgtgtatgccgcagtgagtacagggaggatgtgcttgtgaacacagctttgattgacatgtatgccaaatcagggagcatctctcatgcacgtgcagtctttgaacggatgcatgtggatgaccgtgatgtggtagtctggagtgctttaatcacgggttatggtgtgcaaggccttgtcaatgaggcttgcactttgtttcaggacatgaagcttgctggagtaagaccaaatgacgtgacattccttggacttctatcagcatgcaaccatgcaggtgctgttgagaaaggatggagctactttcactctatgaaacctgactatggaattgagccccagcaccagcactatgcttgcgtggtagacctgctttctcgtgctggacagcttgatagagcctaccaatttatactgaatatgcccatcaaaccagagatgactgtctggggcgctttactccatggttgcaagatgcacgggcactcaaacatggccatggctgaatgcgcagcacagcacatttttgagttggagcagtccaatgcagggcactatgttcagcttgcaaacatgtatgcatctgcagggatgtggagccaagtcgctggcatgcgagtcaccatgagagagaggggtgtcaccaaggcaacggggtttagcttcatcgaggttgatggagagatgcactcattccatgcttgggatcactcgcacccgagggccaccgagatattcgccatgctgtgccttctttctccaactccaaccggagttggagggtgaaagttagttgacagtgagggtggatgggaagggtgggagctgcagtggaagtggtactgatcagcggcccagctcaccacgttcaaagcactctgctaccgagcagcgtcggcgcagcaagatcaatgacaggtttcagatacttagggagctgttacctcatagcgaccaaaagagagacaaagcaacatttctgttagaggttattgaatacatacgctttttgcaagagaaagtgcagaagtttgaagcttcagtccctgaatggaaccaagaaaatgcaaagatacttccatggtcaaacatatattttagatcgttctggaaaaattcacaaagtaaaggtcagaaccctggagatgatttgcctgatccttcacagttcatccggaatgggtcctcttctgggtataatttcactggcaaacctgatgataaccacaacatggtgacatcagcagctgcctcaggggcacaagagctggtggaaactgaccatgcagctagcgtgtcctacagatcagcagaaactccgacaaacattaccaacaatgttacatcccaagcccaagcccagtgggctagtccggctggtgtggatgactgtgcaatgaacagcgaaatgttaaataaccaacagttggcaattgatgaaggaacaataagcttgtcaagccaatattcccaacagctacttggtacgttgactcatgcccttgaaagctcaggtgttgatctgtcccaatccagcatatctgtgcagatcaaccttggcaagcgagctgttaagagacctggtgctgatggatcctccagttctaaggagctccccagtacatcagcgaacaacgaaaacatgggtcaccagctgacgatgttagggggtggtactgaagaacttccacacccaacgaagcgccataaatcgggcaacagctgatggcggttctcactctgttgcatcatccagaccgattgatcattctttcctccctaccaaccagccaggacattccagaattggatgtacattatgttagcagtgacggcatcgcgttgaacaaggcagaccttggtgtaattctttcattcaatcacttggccaacctgttttaagaaaaaaaaaagaccaaagaaaggcgcttctcattgtggattgtgaagctgctcttgtacacaggcttccattcctatgagaagctcccccctgacaagacagtcagtcctacgttgtaacctgtatgataactcagctggcaccctgttagctaatgtgaagtagtanattcgttgaagt

SEQ ID NO: 26455 - DNA, 1450 bp, Oryza sativa
  ref <308>: DATABASE ACCESSION NUMBER: AK101897
  ref <309>: DATABASE ENTRY DATE: 2002-08-28
gactcactcacacacactcaagccagctccagccacacgagcctagttcaggtagatacaatggcgtccaccgcctctttcatgctcgccgtcttgctggcggtggccgtcgcggcggcgccggcgagggcggtgcgatgcccgccgagcgacaagcaggcgctgatgagagtgaagcagtcgctgggaaacccggcgacgctgtcgacgtggtccctggcgtcggcggactgctgcgagtgggaccacgtccggtgcgacgaggccgggcgcgtgaacaacgtcttcatcgacggcgccaacgacgtccgcggccagatcccgtccgccgtggcggggctgacggcgctcatgtcgctgtcgctgttccgcctcccgggcctctccggccccatcccggcgtgcctcaccgcgctctccaacctccagttcctcaccatctcccacaccaacgtctccggcgtcatcccggactcgctcgcgcggatccgcagcctcgactccgtcgacctctcccacaacagcctgaccggccccatcccgaactccttctccgacctcccgaacctccggtcgcttgacctccgcagcaacaagctgacgggttgcatcccggcggggctcgtgcaggggcagttcaggtcgctgatcctctcctacaaccagctcaccggcccgatcccgcgcgacgacgcgcaggacgagatcaacaccgtcgacctctcgcacaaccgcctcaccggcgacgcctccttcctcttcgccgccggccggcccatcggcaaggtggacctctcgtggaacgacctcgacttcgacctcagcaagctcgtcttcccgccggagctcacctacctggacctcagccacaaccgcatcaggggcaccgtgccacgctccctcgccgcgctctccacgctgcagacgctggacctcagctacaaccgcctctgcggcccgctcccgaggctgcacggcgtcatccgccacggctgcaagccgtacgagcacaaccagtgcgccggcggcgccccgctcggcgggtgccaccaatcgtgagcatccatccatccatcaccgccggcgagctgatgctgccacgtaaggtggagcccggggtgcgtaacggtatacgtgtttggtgttttttcgcgtacggggacgtggccgtgtagtacacggtacgacgggtgcagccgtgcagggtactgggcgggtttacgttagtacaaattgtaaccaaggtagagtgcctgcacgcgtgcgtggtcgactctccttcagattgtacgaaacgagggagccgtgtgtacgtgtgcgtacgtgtaccgtgtatggagtacgatgatgatgatgatgcaagtgtgtgtattgtgaatgtacgttatggatcgccctaatgtatcatcgaaatgataagtgtttgatataatttgcctttcgttcttgt

SEQ ID NO: 26456 - DNA, 1995 bp, Oryza sativa
  ref <308>: DATABASE ACCESSION NUMBER: AK101898
  ref <309>: DATABASE ENTRY DATE: 2002-08-28
ggagagagagagaaacaacaccaccaccaccatcaccaacgacaccgagacggaaggaagaaggagaagaaggcgagagagagagtagttcacttccctcctctcctctccctctcttcccactctcacgtctcctctcttcccctccgcgaagcaacggggggcgaggcgacggcagcggaggaggaggaggaggcggcggcggcagccgaaaccccaagaaaacgccgcccctttttctttctttcttgccttgcacagcctcctcctcgatccgtcgcgcgttcgtcgggcgagatccctcctcctcctcctcctcctcctcctcctccggtttcccccgcgtgcgagattgagcctggaagcccattcagcggcggggttggggcggcaggcggctgtgaggttcttgatttgatctgtggttgttgttgaggttgtggttgggcgccatggcggcggcgggagggctggagcagtggcagaaggacgggttcttccaggccgccgaggaggtgcaggagtcggcggacttgatggaatctatttatagaacttggatgcgggaacgcgatagcggagctaatttagaggagctgagcgatttgcaaagggagctgaagacagcattaggaactgcaaagtggcagttggagcagtttgagagagctataagcatgagcaatgataagtattctttggaagagggtacattggccaggcgtcggcagttcgttgtagcaatggaggaccagatttctcaagtagagaaacaaataaatgattactcgattgacaatgataggcgagggctcaactgggtaaagttagatgatgaggaacgagatgatcttgtggctttcctttcagcacctgcacagttatctcaagatacaaagaaaagagacaacacttaccatagtccatcaaaacaaaagaatgcgttgattggcgcgaatgatcccagggacatggctgcaatcagtaaagaccgacataaaactgaagcattatgcagagaaatttcaaatggtcagagtgaagcttgttgtctagccgagcagttaaatggtcacagtacaagcccgagttctggtggtgaacactggaagatcgatatttctgatgataaagacgatgatagaaaattgtcccctaacaaggtcgaggcatcaagtcaggcaactgcattttctggtatcatgaaaaccaccgaatctttcacaagagtaagatggttgaggaatagcttgtggaaagccaagagtgatgaacatcttccgttaagatatgatatgccaaatcacttagactggagggttataaccttattagcacagaggtttaacgggcttactaaaagaagcaggagttgtttcagcggttggaaggaaaactctagagtatctggaaggatgggtggacttcatatacaagggccgcaatacaacactcagtttggtcgttccattcgaataacccttttactggtgttgagcatctttctgattgtgccatttctcgtgtactcagcttgacaatgctcatattggtggctgctggtgaaggaaaaagtatccgttattgtacttgcaaaccgtggttggtgttattcacatgctcagatgaaacaaacgagcgggtaattacagatggagctgtacataggaggggaaaaagaaacaaaacgggaacgacttcatttgtggagaggaaaaagaaacaaaacgggaacgacttcatttgtgcaatgcaaaatttccaagatcagaaaacgtgttgtcaccagcagaaaatcatcctgagatggatccatagttaatggctatttggagtctgttgtgatggatgattcattgattcctgccaatttctccttgctgctgtaccctcaccaaggcaattgtaaaaaaaaaatgtagagctgttgggaaatggatttgaacgactattgtgaatgatttatacaatttgtggaagtgaacagtttcggtg

SEQ ID NO: 26457 - DNA, 2454 bp, Oryza sativa
  ref <308>: DATABASE ACCESSION NUMBER: AK101899
  ref <309>: DATABASE ENTRY DATE: 2002-08-28
gaggcgccgccgcaaaaaaccccaccggatccgccgcttcctccgccgcggtggcgctcgccgctcgccgctagctctcgcgtcgccaccgtttaatcctcgcttccccccacccaccaccgcggccgccgctttgctgcagaatctcaatccccatggctcttccacgaggcgtccgctcccccaagccgatggccgccgccgccgcctccgcctcgccgccgcagccgaggcccgggcacatgctcgtgctcggcaccggcttcgtcggccgctacgtctcccagcgcctcctcgcgcaaggatggagggtgtccgggacgtgcaccagccctgccaagaagacggagctcgagatgctgggcatggatgcttcgatcttcgatgccacaagcagcagtctgacaaatctccggtctttgcaagatgcaactcatttgctcatctccattccacccatcccgggaattggtgatcctttgctttcttcacattccaacctgcaaactacactaagcaatagtaaccttcaatggctatgttacctttcttcaacaagtaagtgcacatatgctcatctgatcatctctagtatgacctgcataatttcaattcgtccttcaactgtagcaacatcttttttatgttagttttctaaacacgcataatatctgcttctcgttccattaacatagaagagaagttggtggtgtgggcttttttggtggtatgggcacaacacagcaaccaaactacatggctagtggactgctgtttctagggaagaaaacaaacaaccgttacctagctaacacagaaaggactacttgagtaaactagataagcaaccatatcctgcctagttcactacctaagagatattgagctagtaaaatgttgcacgtttgctgccaaacatacggctattctctccttccttggtcaccaggatgacacaggtgctggaaccttttatgtaccaagcataccaatgaccaatgtggaatcaagaatgagtttatccagactgggattcctccctggacttgtgaactgacccctgcattgcaccaaggtgtgagtaattgtcacctgcaatggcttgcagaaattgttttttccttggttcaatgctcgattcgatctgaggtacatcaggcaacaacaccattttcatggcaaacaatgcatcatactcacatctcttataaaatcctagctagcattcaaaagtcgataccaacttttcaggttaactgaacgtatcataaatgtgcaaactagccctgaaaaatttttctgccatacaataacttgtaattattattatcatttttcaggtgtgtatggtgattgtggtggtgcatgggttgatgaggagtaagataagtggctttctgtaagtgcttctgcaataattgtttaactgaaagctgaagaatctgctattcatgcagtcatacggtgaatccgaagaccgagtctgtgaaattaagatatgctgccgaaaaaggatggttgaatgttatagatgacttagatctatcagcctttgtatttcgtttaggtggaatatatgggccaggaagaaggtttcagtctgctaaaatttcaatccattttattttgtagtctttgaaccaaaagttatatttactccagaactgcatgacttggctactgaaattctgaattccaccaataaaatcaaccttttaaaattaaagatttggagcactttttatctgatttcaaccaatacggtgtacaacttgtgctacaaacttgtcaagtatgtaatggatgaaaatgagaactttttcatgggaggcttttgttacagttcccaatacttgctttctaaaagtgccactattatgaccctttgtgttgattattgcagtgcagtggacacaatagccaagagcaaatctttgtcacgaagacagaaatcgagggaatccaaacagtacactgcacgaattcatgtggctgacatttgtcaggctatcctggctagcatgagcatcagaagtgcaaggaggatatacaacgtagtggatgacgaccctgccccaagatctgaggttttcgcatttgctcggagcttggttgagaggaagcatcctggcctgataatggattctgtagtactaccagctactcaggacagaatcgtagctgctgagaagcgggtctctaatgctcggctaaaagaggaacttggtgtaaagcttcttcacccaacctataaatcaggcctgcagagtattttggattcttggagtgtcgaatcttctttttcaaataggaatgttgacgtttagcatgtgtatataactatgtgaattgttttgattttgtgctttgctggaactatgaacccaaaaaattatatattccattatgtcctcttccattcgagtgactggttctgggcatatactctatatt

SEQ ID NO: 26458 - DNA, 1707 bp, Oryza sativa
  ref <308>: DATABASE ACCESSION NUMBER: AK101900
  ref <309>: DATABASE ENTRY DATE: 2002-08-28
gacacacagaaattcacacccaagccgctgtcacaagcaaggcatccacacacacacagagaggtagagagggcgagatgaaggtggaggtggtggagacgacgctggtggcgccgagcgaggcgacgccgcagcacgcgctgtggctctccaacctcgacctcgccgtgcccaagacgcacaccccgctggtctactactaccccgcgccctcgccgccgccggcggatgcgggggcggaggcggaggcggaggggttcttcgcaccggagaggctgcgggaggcgctggcgagggcgctggtgccgttctacccgctggcggggcggctggcggcggggcccggcggccggctcgagatcgactgcaacggcgagggggcgctgttcgtcgtcgccagggccgacttcaccggcgacgagatgttcaccgacttcgagccctcccccgaggcccgccgcctcctcgtccccttcgccgcctccggcgagcccccctgcgtcctcgccatggtccaggtgacgttcctgaagtgtggaggcgtggccgtcggcacgggcatgcaccatgtcacgatggacggcgcgggcgcgttccagttcatccggacgtggacggggctgtcgcgtgggctcgacgccgcggccgcgtcgccgtcgccgccgtcgcacgaccgcaccctcctccgggcgcgctcgccgccgcacgtcccgttcgagcacccggtgtactccccgagctacctcaacgggctgccgcggccgttcgtgacccgcgtctactccgtcccgcccaagctcctcgccgacatcaaggccgcctgcgcccccggcgtgtccacgtacggcgcggtgaccgcgcacctgtggcgcgccatgtgcgtcgcccgggggctcccccacgacgccgagtcgcggctgcgcgtcccggccaacatccggcagcgcgtccgcccgccgctcccgtcgccctacttcggcaacgccatcgtgcgcgacctcgtcacggtgcccgtccgcgacatcctgtcgcagccgctggggttcgtggcggagcggatcaagcacgcggtggcgcgcgtggacgacgcgttcgtccgctcggtgatcgacttcctggagctggagtccgagaaggggaaccaggcggcgcgcgggcagttcatgccggagacggacctgtgggtggtgagctggctcgggatgcccatctacgacgccgacttcgggtgggggcgcccggcgttcgtggcgccggcgcagatgttcggcagcggcacggcgtacgtgacgcaggcgccggacaaggacgacggcagcggcggcggcgtgtccgtgctgttcgcgctcgaaccggagtacatccagtgctttgagaaggccttctacggcacagagtgatatgatgcggcggcggcggcggtggccggagtttagagctggaggacatcgagcgacctgggatgcatgatgacgccgaggtggtgtcgacgtctgctgactctgtgtcatgctcaatacataacataatatgcgttatttgatttgcggtagaagtatttagtgtatgctggtactgtgcaacagtgcaagtgtaatgagctgctgccttgttggttgcagctctctctacacagacactttggtctgtcttaagttcgtatgtacaaaaaaaaaatcaaatggaaatgaaaatgactatggaagc

SEQ ID NO: 26459 - DNA, 623 bp, Oryza sativa
  ref <308>: DATABASE ACCESSION NUMBER: AK101901
  ref <309>: DATABASE ENTRY DATE: 2002-08-28
gaatctccaatctctcgcctcccctcgacgcagccggcgctgtgcgccgccgccgtcctttcgcggccgtcgccaccgttcctcccgtggccaccggccttgcgctcccatccccgccgtcgattcggcgccagcggtcctgtcgccctcgagctctcgtcggcggcagcggcggcggcttcggctcccatcggttccggcgacggtggcttcggctcccttcggtcctagcgacggcagccaatcgacgctgcaggtgctgtcctggttgctcaagatctcggcagcagtggcccaggcagcagccgccttgttgagaggtctcagcggcggctgctgctggctcccgagctctatcccctactgctcccatccaactaggttgatttcattcatatgtagatgtgtatgatttcttctcttcttcttgacagttgatattgagaagggaatgcaagatgtgcaggtataaatcactgttatgttcgctttttcagacatttagtgcgatgtgccatgggtactgtttatattactgtgtaatttggccatgtgatggcatttacttagtgtgtgcctttctccattatcatgagaaaattagcataatgacaaccttggtt

SEQ ID NO: 26460 - DNA, 2721 bp, Oryza sativa
  ref <308>: DATABASE ACCESSION NUMBER: AK101902
  ref <309>: DATABASE ENTRY DATE: 2002-08-28
gggttttccttctccaccactcttcccccgtgttcatcttctgcttccccatgcttctcccttgtcatgtccttcttggcctcctgctcctctccctgcacactccggcgagctccgccgccgccacggataccgtgtcacccggccattcacttgccggcagtgacaggcttgtctccaataacagtaagttcgccctcggcttcttcaagccaggtaatgagtcctcctacaccaaccacaactcctaccttggcatatggttcaacaaggtctccaagctaaccccgttgtggaccgccaatggcgagaatccagtggtggaccccacttcaccggagctcgcaatctccggtgatggaaacctggccatcctggatcatgccaccaaatccatcatatggtctacccgtgccaacatcacaaccaatgacaccattgccgtgcttctgaacaatggcaaccttgtcctacgaagctcctcaaactcatccaacattttctggcagagcttcgactacccaacagatacacttttcgctggtgcaaagattggctgggacaaggtcaccggcatgaaccgccgtcttgtttccaggaaaagttcggttgatcaggctcctggtatattttccttggagttagggctcaatggggagggtcatctgctatggaactcaactgtggcgtattggtccagtggggactggaacggtcgatacttcggcctagcgccagagatgataggcgatgtcatgccaaatttcacatttgtccacaatgacaaagaggcctacttcacatacaccttgtatgatgacacggctatcgtgcacgctggactagatgtctttgggataggttttgtgggtatgtggttggaaggaaaccaagaatggttcaagaattacaggcagcctgtagttcactgtgatgtgtatgcagtttgtggacctttcacaatctgtgacgacaataaggatctgttctgtgactgtatgaagggcttctccgtaagatcaccgaaggattgggagcttgacgatcaaacaggaggttgcatcaggaatactccattaagttgtggaagtagcaaggacaggacaagcctcacagataagttctaccctatgcaaagtattaggttaccccacaatgcagaaaatgtgcaggctgcaaccagtggagatgaatgctcacaggtttgcttgagcaactgctcctgtactgcatattcctatgggaaagatggctgctccatttggcatgatgagttgtataacgtgaagcaactatctgatgcttcttcagacagaaatgggggagttctttacattcgccttgctgcaaaagagttgccaggttcagaaaagaagaagaatagaaatataagtggttttgccattggtgcaagcactgccactttgtttttgatgatccttctactgatactttggaggagaaaagggaaatggtttactcgcacattgcaaaagcctgagggtggcattggggtcgttgcatttcgatatattaatttgcaacgggcaactaaagcctttttcagagaagttggggggaggaagttttggttctgtatttaaggggtacctaggcaactctaccatagccgtgaaaaggctcgatggagcctatcaaggagagaagcaattcagggctgaagtgaattcaattggaatcatccagcatattaacttagttaaactgattgggttttgttgtgaaggtgataacaggttacttgtgtatgaatacatgccaaaccgctcccttgatgtgtgcttgttcgaggctaatgatatagttttggattggactactaggtaccaagtagctactggagttgcaagaggtcttgcttacttgcataatagttgtcgggattgcatcatacattgtgatatcaagccagagaatatacttctcgatgcatcttatgtgcctaaaattgcagattttggaatggcaaagattttggggagggaatttagccgtgcaatgacaacaatgagaggaactattggatatatggctcctgaatggattagtggaacagttgttacatcaaaagtagatgtttacagctatggaatggttttgtttgagatcatatcaggaaggaggaactcaagtcatgaatgtttcagggatggtgattattcattcttttttcccatgcaagttgcacgcaaacttctcaatggagacatcggaagtcttgtggatgccagtttgaaaggtgacatgaacctagtggaggttgaaagagcttgcaattgcatgttggtgcattcaagacaacgaatttgatcgaccaacaatggctgaggtggtacaggcccttgagggtctacttgaactcgacatgcctccattgccaagactactaagtgctatcacaggagactcacattcagtgacaccacaatattttgattcagtgtaaatctatatgctgattcacaattaaaagtagtctaccaggacattataattcatcttgcctttttagaaaattagggataacatctaaggtctttaagagatcatgttaaataaactcgtagttattaagatctctgtgcccaagcaggagatcgtgccagccttccagacaaaatatattttgtgtctatgtaagatctgtaggtattagtgtaccgtatacatttttcatgttgccaattgagatgtttccgg

SEQ ID NO: 26461 - DNA, 4524 bp, Oryza sativa
  ref <308>: DATABASE ACCESSION NUMBER: AK101903
  ref <309>: DATABASE ENTRY DATE: 2002-08-28
gtccttgcgccatctcgcggctgaaccggggaggggcgccgatctctatccgacgagcagaccaagggaggggaggggatcctgggttcacccaaatatttgaagacccaagcgtttggtgattggcaaagatgggttgggggatatcccggttgattggactgaaagcagctgtgttcctctctgtggcttatttcttccatagattggacatgacactgctttcttttcccctcatatatgcctctgtgattgcgatgcttgtttctattgcttcacatccatcaattgaccttcctttgctccttggcaaggggtcgaatggaagctttcctgtgtggtcatggatcatgttctcaccatttcttcttttcatccatctgtttgttctgttacgaagatttgtgaaaaatgagcccttgtacactgagattgctgatggagtgtatgttggagggtggccctcttcagttgagcgcctgccccctggtgaacctgcagtcatagactgtacgtgcgagctcccaagaagctctactatatccgagaattcatatttgtgtgttgccacctgggatacaagggctcctcaaccatcgcagattgagtctgccgtgagatgggcactgagaaagcgttcgcagaacaaagctgtatatgtccactgtgcctatggccatggaagaagcgtctgcgtgatgtgtgcacttcttgttgcattgggattagctgaggattggaaagctgctgagcaaatgattcgtgagaagcgaccttctattagcatgaattctcttcatcgtaaaagtttagaggaatgggcaaaacacttgctcactccctcaaaaagaagtggggaatcagatgtgagttatgcgattctttcggatcatacccgaaaaaggcattgatctcgcaagaaaactaacttgctcagtggctgtgataattgagatgaagtttaaatgctctggcattatctactgttatcctagtcatgtccaaggcatttcattctctaagttaattgtttgggagtatgttgtaaaacttctactactgtggcttacaacgccagctcttttaggcgctctgttggctgcgtttgttgccctgacttgggattagggttcacagatggaatttcgcgaaaaccaattcggatttcttgaaactgctaggtctcggtttatgaaaaccggaccagttttgtaccgcattgaccgaaagtcatcggtttttaccggtttttggtccggaattttcccggggtaaaaccccgtgaaggaccgggtttttacttcgaaattgaaaagtaaaacccttgttgggaccctttccttccccttcggcacaaaaaatagaccaactcattagcgcttgaccaattaagttagcctcaaagctaacttaaaaaatggatttaatatgatttttgaaacaactttgctatagaagagttttgcaaacaccatttagcattttgaaaaacgtgtgtgtggaaaattgagaggtataagttgggaaagctcgttgccgaacgcagcctaagaacaagttttataatagagccaactttaagtttatagcttatattagaattaacatgtatagtgatgagctataaggttatctctgtatttttctcctctctctatctctctcatgcatatgcatttaatgtatttatcttgaagtatgtgaatagctatctcttgcataataagagccaatctttttcattttctaaattctctttcctccacataagtttatttgccttatagtgtactattaaacttgctctaatgatcttccctgtcattgaatgcttgccagagacgtggtattgtcggatctctctttctgaaaaagaggggcctctgctagcctgctagattctcatttatagcgaaatgtggtatgtttttcatttttggtagtttgcatctatctctctgttaggttcttttcatctggcctgaaataaatgctcaactattcaccactttgctgtacccctgtattctgtggacatttcatacttgactcatgaaaattttcatgtttgtatctcatgttttgtgtgtaatgatcgtggctaagctgtagtgtactcatcccatcatgctatcttgtgtggagtatgctcttctggccttttcataatttttgccatttttctgcccttgtctcaagcaccagtttgccagttgatggatcaaaatcaagagctgcactattggaacaatctacatcctacggaaagtcgcatgcctggcaagaaatatctcaaatggtcttggtagatgtcacatgacaaaagggttgcttttcacctttctagttctttgatcttcttatcagttgaattcactgatctgccctttcttccatttatttggtctttgaaaaaagggacttccatctatttgtttcttgttttactaataagcattgtgacattccttgtgacttgcgttgtttttctgtgtcctgttttttacatgtatttcagatgtacctcttagtgacaactattttgtctgtcaattgatggtattagatttgtcctccgtgatttcagagttcagacagttatcatctctcttccatcagtgccattagtgccaggttgggaaagccttatttgctggcacgttttcttttttcttttttttttttggtagtgttgatctgcgtcatgttctgttgttatctgtagatgtctattttcaaagtaagcttgggaacatcctacctttaaaaaaaatggcttgttcagcagaaatattagaggttgttttatgcatcgtcttttgggaggattttgtctgctcaagtcatgagcagccacgcatctcctgcctttgcattgctctggtctgcaacaattatttctgtgctaactcttcagcctgttcaagagccattggaagtttggaacaagtgagccagtgaccagcattgcattgcacctcaacaaatttttgcctcttccttttcctagtgatgttgctttctcaatactttaataatagaacattacaacccctctccctctcccaccctctctttctaacatcacttttggccggagtttacatcctccaggagaagctctcaaaatcctgagtactgattctgctgaggctgattatgcatcggttgcagctcggttcctgtgggactgacgctctcggtgccaatgaagttcctgttgcaagagaaaaaagagtcaatgccagccatgttcatctgtttctccgactagaagagatattgcacgaatatctgtcctcgatataacacatcaaatgatcaaatcaaccatccaccctatgaacactagtataattcatcgcttatctaatgactcgctggagataagcagttctgagtcttactcgcgaggacgtgaagaccagaggttgctgagagcacggaggcggcggtaatactccccaatggagaggaaacaccgagccgcctgccgggttgttagaatccgccgcagctgatgcaacgtttgttgcctcagattgtcagcctgcacatttgccaggaatgaagaagaaaaaaaaagtaagttctgcatgaatgatcaacggaacgggatgacaatgctaagctgttgacgtacctgctggtagaagctttcgaggctggcgagcttgtccagggcgatggccatgaggctcatgtagttgggcacgccggggccgtcgttgagcgtgccggcggcgacggtgtcggcgagcgactggtgcagctgctgcagcccctgcgcgagcgcctcctccgcctgctccgacgactgctgcaggctgtagatccccagcatctgctgctccgtcagcgggtccagctgctgtatcagtatctgcatatatagtcgacgatgagtatatattcgtgacacgcccatgcaggcaacgccggcgatgcaggcggcggcggcggcggaggcgaaccttgagaaggtcggaggggcggaagccgcccatccagaggaagcagcgctcggcgggggtagcccacgtgccggtgaggaggtggaagacgtcggagcgcgcgagcgccgccttgagctggaacagctcgtcgtagtgctgcatgcactcctccacgatgaggccaaggttggtgtccagcaggtgcgcctgcaggccgccacggaggtcggtcagccgcttgctgtcgtcgtccagccagcgcgcgtactccatgtcgaacatggccgcgcctgcaaacgattttactgcgccgtggtgagaactccgaggcacaccctcgtctgcaagctgcaggcttgcaggctgcagctgctgctgctcaacgcatcgaaaaaagaaacggacggctctgattaccagaactcatgtcgcctgctgctctgcaccccccaagaaacaggccctgacgatcaatcaagcaatgcgggtaccatattaaattcctgctaatttatttcatttctggatagtagaaaaaaaatagtactagtactagcatcagaaattc

SEQ ID NO: 26462 - DNA, 1768 bp, Oryza sativa
  ref <308>: DATABASE ACCESSION NUMBER: AK101904
  ref <309>: DATABASE ENTRY DATE: 2002-08-28
ggtcgtctccaacctcctcgccttcgcctccacccagccatggcgacgagcgccgccgcgcgcttcctcgctgccctcgcgggcgccgccgtcctcctcgtcctgctcggcggagctgctggcgcggtggtggggcacgacgacgacgcggcggcggcgcggcggacgatggaggagttcgccggattccccgcgtccgactaccgcggcgatggcggtggcggcagcggcggctcctccccgttctacgtcgactccgatgggctccagcgccagattgatgagctggcttcgttctccgactcgccggtgccgtcggtgacccgcgttctgtacagcgacaaggacgtgcaagctcgaaggtatataaagggaataatgaatcagcttggcctgtccattcgtgaagacgctgttggcaacatttttgggcgctgggagggttctgaggcaggactaggagcggttgcaactggttctcatgttgacgcaatcccattctcaggcaaatatgatggggtggttggtgtcctgggtgctcttgaggcaattagaatgctgaaaaggtctggtttccagccaaaaagatctttggaggttattatgtttacatcggaggagcctacaagatttggaattagctgcttgggaagccgcctaatggcagggagtgaagaactggctcgatccctcaaagaaacagttgacaatcagaatgtgtcattttttgatgctgcagactctgctggctacaagatgcatcctgaggagctacataatgtgtttttgaagaaagacgactattttgcttttgtagaattgcacattgagcagggccccattttggaaaaagaaggtatcaaaattggcgttgtcactgctattgctgctcctgcaagtattaaggtggagtttgaagggaatgggggccatgctggagcagtgctcatgcctgcaagaaatgatgctggactggcggcagctgagttggcattagcagttgagaaacacgttttggaatcaggatcaattgatactgttgggacagttggtattctgcagctacatccaggagcaatcaatagcatcccaagtaaatcgcatgtggaaattgatgtgagagacattgatgagaagaggaggaataatgtcattgagaaggttcacaaatccgcaattgagatatcaaagaaccgtggcgtgctattatcagagttcaagatcataaatcaggatccacctgctctatctgacaaatcagtcatcagcgcaatggaatttgctgcaaaacagttgaacctcgaatataagctgatgattagcagagcttatcatgattcactcttcatggccagaatatcaccaatgggtatgatcttcattccatgttacaaaggttacagccacaagcccgaagaatatgcgtcaccagaggacatggcgaacggtgtgaaggtgcttgccttggcaatggccagattatccctgcagtgagcttagacatggaggaaggaaggaatcaatgagttcagatcacccaacaccttcgtgttcctgcaatggaaacacgatgtacagcaattcctcgcgtggcaaaacaaagccatggtgattcttcaggaataataaattaataacatttggaagccatggtgattcttcaggaataatagattgataacatttggatgggcagcagaaaactagtccgtatgttttcagcgagggaataaataaataaatttctgatggcatcatcatgaatctg

SEQ ID NO: 26463 - DNA, 1004 bp, Oryza sativa
  ref <308>: DATABASE ACCESSION NUMBER: AK101905
  ref <309>: DATABASE ENTRY DATE: 2002-08-28
gagtctccctccggacccaagccccgctcgagcgagcgcgatggcctcggcgagggacctcgccgtagcgtccatctccgccgccgtgggcgccgcagccgccgcggccgcgctgcgctttttttcatcctacggggccagctctgccaagcagcggagcccgcccacgccgtgcgccgagcacctcgcggtcaacggatgcgccgccgagcgcccgccggtgcagtcccccttcgatcccgccaagagggaagggtatatctcctgggacgactacttcatggcgatcgcgttcctttcggccaagcggtccaaggatcctaatcggcaggttggagcatgcttggttagccaagaggggataatcctaggaataatgtataatggatttcctagaggttgttctgacaataagctaccctgggcaaagaaatctgccaagggagatccattggagacaaaatacccctatgttgttcatgctgaggttaatgctattttaaatacaaaccatgcttcagcggctggacagaaattatatgttaccatgttcccctgcaatgagtgtgctaagattattatccagtcaggtgtatctgaagtcatatattttgtagagaaaaggattgacaactctgattatgtttacgtagcctcgcacaagttgttatcaatggctggtgtaaaggttaggaaacaccaaccacagatgtcacaaataccaatcaagtttcaggagcctcgaaacggtgagccttcaatgaacgcagcaagtatatttagctgatcttatctttgtttgttgtctccttatctacatatacctttactgtgcggttatgtgtaagatttctgttgatcatggcatcaaagaacaaatgcttgtcagtcattcaacgtcatcgattgccatatcctccggggtgctgttgaccgtcttgttgtaaacttgtaatccgtgagactactagatcatcaaaacaaattatggctgtgtttagttc

SEQ ID NO: 26464 - DNA, 989 bp, Oryza sativa
  ref <308>: DATABASE ACCESSION NUMBER: AK101906
  ref <309>: DATABASE ENTRY DATE: 2002-08-28
gcctgctgaagcggaactgaagaagaagaaccaccgccgtggagacgtaggcgcagcgctcccgattccgccgccgccgtcgccgtagccgtcgccgccgctgccgcgccgcggtgtcgacgaaggagccctccgcttgcggccgcttgggtggtcggatctaacatctagggggtgagcaaatcaaccaggagatggaaaccatccaggcgctagaattgggagttgaacagaaaaagtcagaaccagaggttgatgagatgccaggatccatggaggatcaaaagcctgcggaaataagccaggacaaagtcgcggaaactgatattaaaccagcagtacaaactgagctggagacaagtccagtggctaatccaaaccctgcagaaacaaaccagtacacagatggggtaacttatggtgacctagaaaccactgatccaggcactacttaccgctgcaaaagatgtcgcacactcgtcgctactgaaggctatgttgttacccacaaagttggtcgtggtgagaagtgcttcgcgacgcgcaaaaagtatcatgtggatgagaaggaacccgaatgtacctgcctctttgtggagcccttgaagtggatgcaacctgtggtggaaggatatatttcagggaagatcgcgtgcaggaaatgcaacagccgattgggacaattccactgggcaggaatgcagtgcagctgcggagcctgggtgaatccagctttccagctggtcaagagcaagattgatcagtgtgagatgtgatcagtcgggtgactcaacttcaacttcattatcagtgacatcgcaatcatacccagctgtaggaaacattattatttccttctgaagcttctataggcactctggtagtaagttttgctgtctactaaatgtaagtctttgcagtccgcaccattcagattcagtgtttccttagttgcatcatcttgatgaaaataatgggaacatatcagg

SEQ ID NO: 26465 - DNA, 1871 bp, Oryza sativa
  ref <308>: DATABASE ACCESSION NUMBER: AK101907
  ref <309>: DATABASE ENTRY DATE: 2002-08-28
gaggttttgccgctgtccgcctgcctgcctactttctccacttttttctcctcctcctcctcttcttcttccttcgtttcgcctcctctactcttctaagttccaacttccaactagctcgactcaagtgaagagtccgccgcctttccctcctcgccgccgctcggatggggatggcccccgccggtcgcctcctcctcatctcctgcctcctctgtgtgcccaattcatttggatttgcatttgctgtggaggaggaggaggacggcagcgggctgatgccacagctctcacccaccggctctcccaaccccttggttcccttcctcgcgcccgcccctctcgcgccattcttcaacaccacccctcctaacttgtcaggcaagtgctcattgaattttactgctgtcggtgacctcatcaccaccactgctgtcgactgctttgcgtccttcgccccgttcctcgccaatgtcatctgctgcccccagctccaggccatgctcaccatcctcattgggcagtccagcaagcagactggctcccttgctttggatcccaccgtcgctacctactgcctctccgatgttcagcagctattgttgagccagggcgctagtgatgagctccacaacatttgctcccttcacctctccaatgtcaccgagggatcatgccccgttagcaccgtcgatgcctttgaagctgtcatcgactcctcaaagctcctcgaggcctgtcacaagattgatcctgtcaacgagtgctgcagccgcacctgccagaatgctatcaacgatgcctcccagaagatctctttcaaagacggcggtttgacaagctacgctggtagccccaaagttgatagctgcaggaatgtcgtgctcagatggctatccagtaggcttggcccatcatctgcaaagcaaatgctcaggcagatatctaactgcaatgtcaatggagtttgtccactaagctttccagacacgagtaaagtggcaaaagagtgcagtggaactgtcaagaatggtacttcatgttgcaaggctatggacagttatgtatctcacttgcaaaagcaaagcttcataacaaatttgcaagctttagattgtgcccaattccttggtgacaagttgcaaaagatgaatgtcagtatgaatgtttatagctcatgtcagataactctcaaggacttttctcttcaagttggatctcaagaatctggatgccttcttccaagtatgccctcggatgcatcttttgacccagctactgggattagtttcacatgcgatctgaatgataatattgctgccccatggccatcttctatgcaagcatcgtcttcttcatgcaataaatctgttaatattccagagagacctgctgcgacatcggcacaaaatggtgtcaaccagaacagactggagcttagcctacttatttatctgggcacccttgttgttgctatttggctacaagtctagtccagttagcgaattattaatttcagattcaggagagctgattggaattgtcaactgcggagtttttgtgcttgatgatcacatcaaagtgttgtaggttacatgtgctttttagttcctgatagctgttagtgtaatttcttgtaagccatataatagtagtaataatttattatgcctttgtatagagagaaagaagggaaaaaaattaaagggtgtgaaatgcgcaggacaatttagcaagaccactgttgtctgatgggagtacatcatattgggatggactacactccattattgtttagaatttatattattcaattgttcattttctgatgtatgaattaatcatgacagagaatcatataatctcatccg

SEQ ID NO: 26466 - DNA, 1409 bp, Oryza sativa
  ref <308>: DATABASE ACCESSION NUMBER: AK101908
  ref <309>: DATABASE ENTRY DATE: 2002-08-28
gggggaaggaaagggagagagagggaggggaggcagccctgctcctctgcctgccgccgactgttcgtccgtcccggcggcatgggcgcgaacggcaacgacgtggtggcggcggcggcggcgggggagagcccgatgggggccgcgagggtcgtcgcggagggcggggcgacggtgttccgcggcgcggactactctctgccccgcacgacggtggcgctcgcgctgtggctgggcggcatccacttcaacgtcttcctcgtcctcgcctcgctcttcctcttccccctccgcgtcgccgccatggttgtggcgttccagctcctcttcatgctcatccccctcaacgacaaggacaaattgggccgcaagatcgccaggttcatatgcaggtacgcgatgggctacttcccgattagtctgcatgtggaggactacaagtgcttcgatcccaacagggcatatgtgttcggctttgagccacattctgtgctgcccatcggagtcgcggcgctcgctgatcttgtcgggttcatgcctctacccaaaattaaggtcctcgcgagcagcgcggtgttctacacaccgttcctgaggcaaatatggacgtggttaggactaattcctgcaacgaggaagaattttcagtcatatctcggagctggttatagctgtatcatagtgcctggaggtgtacaagagattcttcatatggatcatgattcagagattgcctttttgaaatcaaggaaagggtttgtcaagatagctatgcagtctggctgccctttagttcccgttttctgtttcggacagagctacgcgtacaagtggtggagaccgaagggcaaattgtttgtgaaaattgctagagcaattaaatttactcccattgtcttttggggaagatacgggacaccaatccctttcccaacgcccatgcatgtagttgttggcagacccattgaggttgagaaaaattctcagcctaccattgatgagataaatgaagtccatgaacaatttactgtggccttgcaagatcttttcgacaaatacaagacagaaactggatatcctggcctccatctaagagtcctatgatataattccagcactaaactcaggttaggcttcaggaataacatggctctactgtaggagtaaccagtaatctagtagcacttcgcactcaggtcgcagtatggtcatcttcagaatctgcagtctgtagctaaggcacgtggttcgtacagcaccgctgatgtaaaaattgtcactgcaggccgctcataaagccttataaaagatgacctttctcataaattttatttccttgtttcgaactttcgatgagtgaatgcatgtgtaaatatacactgtgaatatcaaaatgcaactttggattg

SEQ ID NO: 26467 - DNA, 3072 bp, Oryza sativa
  ref <308>: DATABASE ACCESSION NUMBER: AK101909
  ref <309>: DATABASE ENTRY DATE: 2002-08-28
gatccccgcacatctgcccttctgcacaccaagcctggcattggatggctgctcgccggcagcacctacagtcccagctgtggagattggtcgatacggcatacggtatcaagaaattgttgaatcatagatcaaacttgggtactcgacgctcacaaagtgtgaatgaaatctggaaaccagtgattgagaatttgagataaaagtaatgcgagattcaccaagaaaacccacaacaaacatcactaattgaccatagtgtactcaacgagagaggggaactctggtcagggaaggccggaagactagggagaggagagaagggggagggggggaagttgggctagaggtagatggcgattgcttcaagattcgtgctcatacacgtgtcaactagaaaaagcacggtctttctgatgtttggaggacttcgtctcctacgcaattttcttcacactcacgccggcgcccctcatctccttccccaattccctctccggcgacaaggtcagggcggcgccgatcggcgagcttcgcactagggcgggcatggcgcgccgcgccgcttcccgcgcccttcgctcggagggctcgatccaagggcgagggggccgcgcggggggcggtggcggtggcgccgaggacgcacgccacgtgttcgacgaattgctccggcgtggaaggggcgcctcgatctacggcttgaaccgctccctcgccgacgtcgcgcgtggcagccccgcggccgccgtgtcccgctacaaccgcatggcccgagccggcgccgacgaggtaactcccgacttgtgcacctacggcattctcatcggttgctgctgccgcgcgggccgcttggacctcggtttcgcggccttgggcaatgtcattaagaagggatttagagtggaagccatcaccttcacacctctgctcaagggcctctgtgccgacaagaggacgagcgacgcaatggacatagtgctccgcagaatgaccgagctcggctgcatacctcctgagatgaaacaacaattaacctttcttcataagcatttttgccaacttctttaacctgaacgcaagcacctgtctgcaattaaaatattggatgcaggttcaaattgaatgaacaggttttataaaatttagaagcgcagaaatgcagcatgccacacaccacacaacttttattcaggaacaagattggattgtataaaatggtttcgatctgattatcttatctcaacgtattaatatgcacatatactaatcatgaaatatctgatggaatgatgtttctatttacctgtgtgaggcagcaaggagtgagatggataacaccacatacattattattctagaacaattttgtaaaatactgttgtgctcatgaagcgttccaaagatgtttcacaacctgtgctccacgggttttgagcttaatcctgggacattcagtctcatgaactgtcccattcttaaacatggaataaaggatgacagcatgatttctttgtctctataatcttttggctacccacagataatagctgtaaatctatactactttaaaaggagtagtggtggtggtgagtggtgaatctgccaccaccccacaccaccaactctcacaattctgacatgtgggatcactgtctatcccttctccaaaccaattgtatgatacaacagctgaaaatagcgaggtatgtcagtgacccagagaggaggggacggcgcgtggtgagctacaaggcatactcagtggagggcaagatcaaggcctcccgtccgtagtggactccgctgcatcaaggccaactgctccgaactgatcaatttatggtgcagacaggtgcttgcgttcaggttaaagaagttggcaaaaatgcttctgaagaaagggtaaattgttgtttcatctcaggagattccagatgatccagtgtctccaacaatggaggcgcttattttgctccatagtaaagtaagtacacttgctgagaaccaccagttgacaacacggcttgttgtaccatcaaacaaagttggttgtattcttggggaaggtggaaaggtaattactgaaatgagaagatggactgggggctgaaatcccagtctactcaaaagcagataaacctaagtacctgtcttttgatgaggagcttgtgcaggttgctgggcttccagctattgcaagaggagccctgacagagattgcttcgaggctttgaactaggacactcagagatggaagttcttccaataatccgacaccttttgccccttttgatggtcctcctgttgacatcttgcctaacagggaattcatgctatatggacgatctgccaatagtcccccatatggagggcctgctaatgatccaccatatggaagacctgccattgatccaccatatggaagaccaatatccacaatatggaagaccttccaatgatccaccatatagaagacctgccaatgatacatcatacggacggttgaacaatgatgggcctcgtgatccttacaccgtgtatcctgtagagtacttctctaaaagagagtaccgtagtggaagtagcaaagtcaccatctgcttcatacgacagatatgcagcaactactcgcttgcctagtagagaactgccctcatctattagtcctggtgccgattatatgtcccgccgttcttatcttgaccaagtacctactgataggtactctagtagggtacactacaattaggcctctcgagagctgggaatagtaatgtgcaacaattaggaatcaccagagctggaaattccaatgcttatgattatactgaggctgcggagcagatccatggacgtgaggattaccgaagactgtcaggtctcactgggtatccaggtggctctgtcgaattgcggattccaaatagttatctggagtctgtgactgtctgtcattggtgttggtggtgtcaatctagctgagatccgtctggtatagcgtatgcgaaacatcatgcactatccccagtcttaaccatgccccaatggccaccaatagttttcctcatg

SEQ ID NO: 26468 - DNA, 3289 bp, Oryza sativa
  ref <308>: DATABASE ACCESSION NUMBER: AK101910
  ref <309>: DATABASE ENTRY DATE: 2002-08-28
gaactccctccccctccaagaagcgaacaagccaagaactcctccaactccgccctccaatggagctcctgagcggggcggcgctggcgtggcagcagtaccgcgccctcctccgcaagaacgccacgctcacctggcgccaccgccgctccgcctccctccagctcctctcctcgctcgtcttcatcttcctcatcttctgcatcgaccgcgccatccgctcccgcttctcctacaccaccgcctaccgcaacgtccccgacccggccgccctcgtcgccccgcccatcccgccctgcgaggacaagtacttcgtcagggagccctgctacgacttcctctggagcggcggcggcggcgccgggagcgcacgcgtcgccgggatcgtcgaggccatccggaggaacaaccccggcaggccgatccccgccgagaaggtcttgggttttaatactccagatgaagttgatgcttggcttttccaaaatccaatgcgctgccctggcgccttacattttcaagttataaacgacactcagataaagtatggtattcagacgaactccactccggtagctcggagaggaacatatgaggatcctaccttcaagttccagataccacttcaaattgcagctgagagggaaatggcgaggctgctgattggagacccaaattttagctggactgtggggttcaaggagttcgctcacccagctacagaaaccttctctactattgcccaagctgggccaactttcttccttgctattgctatgttcggattcgtttttcaaatcagtgcgttggtgacagagaaagagcttaagcttcgtcaggctatgtctatcatggggctctacgagtcagcgtattggttgtcttggttaacctgggaggctttcgtcacattactttcagcacttcttactgtgctctttgggatgatgttccagtttgacttctttctgcacaataactttgggatcctattcctcctcttctttctcttccaactgaacatgcttagttttgccttcatgatatccacatttgtaacaaaagcagcatcagctactactgttggatttgcaatattcattattggcttcttgacacaacttgttacaacctttgggttcccatattcaacttcctaccagaagtactaccggacaatatggtccttgtttccacctgatgtttttgcccaagccctcaatattctgggcaaggcaacggccactcctgaagacaaaggaatcagctggaatcagcggggacaatgccaatcttttgagacagattgcgtcattactattgatgatatctacaaatggctcatctccacatttttcttgtggtttgtcctggcgatctactttgacaacataattccaaatgtcaatggtgttcgaaagtcagtgttctactttctgatgccttcatactggacaggaaaaggaggaggaaagttgcaagagggaggactctttagcttttttggttcgaaccgcccagctgatgatgcttctcctactgatgaggatgttattgctgaggaaaatctagtaaaacaacaagctgcaaacaatgaagtagatcctggtgttgcagttcaaatatgtggtttgcggaaaacatatccagggagttttagtatgggttgctgcagatgcaggacaactaaaccgtttcattctgtcaaaggtttatgggtgaaccttgagaaggaccagttattttgccttcttgggcccaatggagctggtaaaacaacaacaatcagttgcttgactggaatcacaccaattacaggcggcgatgcgatgatttatgggcattctgttcgaagcactgctgggatgtcgaatattcggaggatgataggagtctgtccgcagtttgacatcttgtgggatgcgctaacagctaaagagcacatggagctgtttgctagcattaagggactgcctccatcaacaatcaagtcggtagcagaacaatccttaatccaagtgaagctcagccaggcagctaatgttagagcaggtagctacagtgggggaatgaaacgccggctaagtgttgcaatagctctaattggtgatccaaaattggtctttcttgatgaaccgactactggcatggatccaataacaaggaggcatgtctgggacatcatagaggaagcaaagaaaggaagagctattgtcttgaccacccattccatggaggaagctgacattctgagtgacaggatcgcaatcatggctaaagggaaattgcggtgcattgggacttcaattaggctgaagtcgaaatttggaacaggatatattgctaatgtgaatttctctggaaatggtcacacacaaagccctaacatcaacggcaacactgaagtcccggttaaccctaacatagaatctgtcaaatggttcttcaaggaacggcttgatgtggacccaaaagaggagagcaggacattcttaacgttcgtcatcccccatgagaaagaaccacttctgacgaggttctttggggaactccaagacagggaacgggaattcggtatctcagacattcaactcggcctcacgacgctcgaagaagtattcctgaacatcgcaaagcaggcagaactggagagctctactgctgaaggcaccctggttactctgaacctatcatcaggttcatctattcagataccaaagggggctcgttttgtcggaattcccggaaccgagtcggaggatcacccaagaggcgtgatggttgaagtttactgggatcaagatgacaatggatcactctgcatttctggtcactctgatgaaatccctgtcccagccaatgttcagctgggtcggcccccttcgctgtctcgtagggcctcagtgggccgtggaaaccctgttgggtacatcattgatccgaatgaggtcacagcagcaagatgagtgccaaagaaagaagaatattctgagagtggatgaatttagatttgtcttcatgtaaattatctctaggtgtaatgcaactatagatatgtttgtactagaacagtgtattttttctgttttgtggtaaaggaagtgcttgatgatagatacaacatgcttacatcttccatttggtggctgacaaagagcttgacgattacagatgcaagaatgacaggaatttttacagtgatttaatttgttgcattcaggacggtaggatgtctggggtccttgttttgtcgctcataatttattttttttgttcatgggtgaagtat

SEQ ID NO: 26469 - DNA, 1350 bp, Oryza sativa
  ref <308>: DATABASE ACCESSION NUMBER: AK101911
  ref <309>: DATABASE ENTRY DATE: 2002-08-28
gctcctccgctgagccgcaacggcctccctctccgctgctccccccatcggcggcgtcgctttcccaccggcaacccttcccctccccagaagagaagagaagagaagagaagaggtgggatctggattgtggagaggatggtgaagacagtggtcggcgaggaggcgcagctcaaggcattggaggaaaccctctccgcctccgcctctccagctcaggtggggctcgtcgtcggcaagctcagcgcctcttccgaccgtgcccttgcctactccctcatccccacgccgcccaccgattccggcgctcccgcttgctccctcctccgcgcggcccccaaccccaaggccgccaaagctgcctcttccgacgcctcctcgtcgctcgacttcgatgtcgactgggtcgccgagcacgcgcgccaggtctcgaggatgcttcttggaggaatgaccgtcataggtatttacatatgggcgtcagaagcttcgttcaaagcgacttcccctgctgttttatcacaggttcttagagctgtttctcaggttgctcctttgtatggcactggtgttgatgagagactgctcattcatatttcttacagcccaagaaggtgggcctgtcgtatatgtgatatgagctcaggacgtttaaggccatgtgacttcaagtatactaaactattagcttctcttcaaactttcagatgcacatataattttgagataagactgccagttgttcaagctgagccttttaagaaggttatttcgaaggcaatcagtcatctcacgaagcaagtgcagaatgccaaagctttgattgatggagtcctgggagatcactaccgccaatggctccactgggagtaacatggattgcccattctcaatggagaagacattgtccaacatatgcaagagaactttttatgatatctttgattaagcatgtgacatttacttattcgcatgctcatattctaaactttatatcaaacatgattgcattggtttccagtagtccatttgtgtgttggttaataggtggaatacggcgggggagggcggacggcagtcccgcggcagcggccccaccctctacctttgacactggctagtttgccatcttccccagcggtcgacggtcgtggaacattttcactctcaacaggtggagaaactgaatagaataggtttgatttggattagagatttttaaccacctgtaaagaggtttattgagccacgctgcattcagtcacatttgctgtttgtccaatattatctgctgaatgtttattttggtgaagctactagcttgaatcttagtaattcaacaaaattttg

SEQ ID NO: 26470 - DNA, 1644 bp, Oryza sativa
  ref <308>: DATABASE ACCESSION NUMBER: AK101912
  ref <309>: DATABASE ENTRY DATE: 2002-08-28
ggccaaatttcatctgttttttttttcaagttctttaagaagtccaaatcaaactctccaagtcacaagtagaagtatgaatcttaagaaaaaaagagttttaagcatacaaatataagcatcaatctgatctgcattcgacactttggtcactagttgagttgagttgagagttgctgacaaagcaagcggctttccatgtctatcacctccgcttcccgccgcgccggcgccgccgcgctccccatcctccgacgaatcggcggcgcgttccgccgccccttctcgtcggagccggacccggcatcctccccggggtaccacgtcgccggcgggcccagcttcatgcgcggcgcggtgttctgggagcccggccgccctctcaccctcgaggacttccgcatgccgcgccccaaggccggcgagctcctcatcaagaccaaagcttgtggagtttgccactccgatctccatgttctcaagggtgagctcccattctccagcccctgcgttgttgggcatgagatcactggggaggttgttgaccatggtactcacacccctgctgagatcatcaacaggttcccagttggcagtcatgttgtgggtgccttcataatgccctgtgggaattgcttctactgtgttaagggccaagaagatctgtgtgagtctttctttgcatacaaccgtgctaaaggaacgctatacgatggtcaaacccgattattccttcgtagcaatggaaagccagtgtacatgtatagtatgggtgggcttgcagaatattgcgttgtgccagccaacgcactagcagttcttcccaactctttgccatacacagagtcggcgattctaggatgtgccgtgttcactgcatacggcgccctgaggcatgctgctgaaatgcgtgctggggattcagtagctgtgattggagtcggaggggttgggtcaagctgtttacagatagccaaagcctttggagcttccgaagtcattgcagtggatgttcttgatgagaaactccagaatgctagaacacttggagcaacccatactgtaaatgctgcaaaagaagatgcagttgaaaagattaaggaaattactgatgggaggggtgtggatgtagctgtggaagcacttggtaaggcattgacattttctcagtgcgccaaaagtgtacgagatggaggcaaagctgttatgattggccttgctgccacaaatgtgatgggggaggtggatataacccgtcttgttcgccgacaggtgaagatcattgggtcgtatggtgcaagggccaggcaagatcttcctcagatagtcaagcttgcagagagtggggccttcaatcttaagaacaccatatcaaggaaatgcaagtttgaagaggcgaacagcgcctacgaggatcttgaccgtggcaagatcgttgggcgagccgtagttgagatcatgtcgtagtgatgagataattctgtggttcatagcctgggatcccactctgggtcaatgaaataagtaggctgtgacactacatattccatgaacaacctcactccctgatttgtgttaagatgtctgaaattgttgatgttgaactgcagggagatgattaaatcaagtgtgatttcaggtgtc

SEQ ID NO: 26471 - DNA, 1494 bp, Oryza sativa
  ref <308>: DATABASE ACCESSION NUMBER: AK101913
  ref <309>: DATABASE ENTRY DATE: 2002-08-28
gatcaagccttcaagcaaagcaaactcaagtagtagctgattaccagctcttctctcttctcattgagaagagggaattaagttttgatctctgctttattgcctgatcatcctcttgttacttgcaagcaagaacagtagtgtactgtgcctcattgatctcctcccaccaaactctctctctctctctcatattccgagctagctagttaatcaagatcttgctgcaatggctggcatgtctcttcagcatccctgggccttcgcctttggtctcctaggcaacatcatctccttcatgacctacctggccccactgccgacgttctacaggatctacaagagcaagtcgacgcaggggttccagtcggtaccctacgtggtggcgctgttcagcgcgatgctgtggatctactacgcgctgctcaagtccgacgagtgcctcctcatcaccatcaactccgctggctgcgtcatcgagaccatctacatcgccgtctacctcgtctacgcccccaagaaggccaagatgttcaccgccaagctcctcctcctcgtcaacgtcggcgtcttcggcctcatcctcctcctcaccctcctcctctccgccggcgaccgccgcatcgtggttcttggttgggtctgcgttggcttctccgtcagcgtcttcgtcgccccccttagcatcatcaggctggtggtgcgcaccaagagcgtggagttcatgccgttctcgctctccttctccctcaccatcagcgccgtcgtctggttcctctacggcctcctcatcaaggacaaatatgtcgctcttcccaacgtgctgggcttctccttcggcgtcatccagatggggctgtacgccatgtacaggaactcgacgcccaaggccgtgctgaccaaggaggtcgaggcggcgacggccaccggcgacgacgaccactccgccgccggcgtcaaggagcacgtcgtcaacatcgccaagctctctgccgccgtcgacgtcgtcaagacccgcgaggtgcaccccgtcgacgtcgagtccccgccggcagaggcgccgcctgaggaggacgacaaggccgccgccgccaccgccgccgccgtcgccggcgccggcgagaagaaggtagctgcatgagtgcgtgcatgcgtacatgggtcgccgtaagaaggaagaaggcgtgacgtgtccagcccgtacgcgcgccacgtggccaagctagcttcagagctagtgaagctgcagacatgctagctggctagctagcagtgagagagtgcgacgactaaaaaaaaagtagtgattaattaagggcttgtaatttaatcgttgtttttttttttctctgtttcgttgagatcgatatcgttgtcaccatgcatgtatttcgtttttgattctcagtaattaattagatgggctttctgtaattcaacctgtaagggttccttccatgattaattaattagcgtgttaataattgtcccacc

SEQ ID NO: 26472 - DNA, 2279 bp, Oryza sativa
  ref <308>: DATABASE ACCESSION NUMBER: AK101914
  ref <309>: DATABASE ENTRY DATE: 2002-08-28
gtatggccggcggcgaccaagcagcggccaaacccccaacaaccttgacctccgccccactgccgccgttcgccgcggctcggtgctcgccggcggtgatggcggcttggcccagcccgtggctgcctctcctcctcgtcggcgccctgctcgccttcgaggactggctcgccacgcccacctgctccggcggctcgaccgcccccgcccccgcccccgcccccgcccccggcgacctgagggtcatgatggtttccgacctgatgctgctcgggtcggacgccacctacgccgaccgcttcttccggaaccacgtcatgtccaagctcttcgccaaatctattgaaacacttaggccagatatgattgtagtccttggggacatctcggcaatgggttttcagctgaaggaaagcaaatggatagacgttattgaccaattcaaagggatattggggcaatactctgaccttcctcttcatattgccttaggcgataaagatgtaggaggatgtgccaacttggatgacagttttgtccaccatatggctaagcatttaccaggattggattcaagtggttgcggtacttttgaaattggtaatgtcagttttgtgtcacttaattcagttgcgctgctctgtggaaacaatcccctgcggatcagcgttgagaaggttatagagaaggaaaacaaccattttcaacagaaaatggtgaatgaagcaggacatttttctttggggagtatagaaagagagggttttaattggaggcaaaacagcatggaatcagggtcaggccctgtagttttgctccactttccactatataagttttcagagggaactatttcagaacctccggtctcctcaagtttgaaagaaagaggagctgatggcaggaggtctgatcaactacatgccctccctgcaaattcaactcaatatgttcttcaagcgcttaaaccaaggattgtatttagtgcccatgattgcagtttctcagattatactcactatgatgggacacgggaggtagcagtgccagctatgacatggaaaaccacaggagtgcctggctttgtcatttctacatttggaaggaaaggaatcatgactgtgaggtattgtttgatagttccagaatggtatgtgatggcaggatattcagtattcttgttcctaacagctctgtctgtaagattgtcacattggatgtgaaatgaaatatcaaatcttattttcaaggccactccaagttcaccgttaaaaaactgagaagataaagtttatctcaagctcttttctgacaatgaactgagatccttgatctgtgtcatgctagtgactgctttacacaagtcgaggacaggaacttcagaatcttgccagggctagttgtgctataagatcttgatttcaagctcccagctcaatctgggagaccagccataggtgactaccatcagctatccagctgtggaaagtactgcttgctggcccagagaaacccctacactaaaggaggtcacaacactgttggtacgggtactaagaagacagccttcttgctcttgctgcatatgaactctggaactgtgagatgcttgggttgactctgccctgctgctttcctgggcagcaaggcagcctctccacctattctgcttctgataaactttagttcctttgacacatttgcatgaacatacgatgccatttggatgcccatctccaatgtaggtctgatgcgttgtcaacaactcaggcattgcattgagttacaggtgaacatagcccagcccatatggtgtgtttggtaactttggaatatatgcaccaagtgaattagaaacatgggaatatttcaatcatacatcgcagatcaaaacaaggagaaaacttgaggtcttacctcaggttggttttatctctaaaattgcctagatgtagaatttgtgagggctagatgtttttttctctataatcagttgaaggttttggaggtttgcttcatgtcctttcttttgttttttatgcattatgtgcgtgttgcatttgtcatgtgcatccttgatacagacaccttccattatctaacaagcaacaggccttagatgacaggctctatgtggaaagcttttttctgctgtgtgtaaagtgaactgattttctcaaaattttgctaagtttttttttttttacttcaaaacaggcctaatggccaggcacacaaacttagaaaagatcattgttcccagcaaaaactggtattcc

SEQ ID NO: 26473 - DNA, 1394 bp, Oryza sativa
  ref <308>: DATABASE ACCESSION NUMBER: AK101915
  ref <309>: DATABASE ENTRY DATE: 2002-08-28
gagcgcgacgccagggagcgcgtagggagagaaaagttcggttcttgagaaagaaaggggaatataagtgaggaggcgagagccagagatagagagagagagagagagagagatcggagcagctagctagagcatcaaaagcggccagccatggcgttggaggccaggttctttttggcggccgtgttcgccgtcgccgcgacgtgcttgtgcttatcggcggtggcctctgctttcgccgtgccgagcgtcgccttcgacgaagggtactcgccgctgttcggcgacgacaacctcgtccgctcgtcggatgataagagcgtccgcctcttgctcgaccggcgctccggttctgggttcatctcctcggattactacctccacggcttcttcagcgcgtccatcaagttgcccaaggcttacacggccggcgtcgtcgttgccttctacctgtcaaacggggacgtgtacgagaagacgcacgacgagctggacttcgagttcctgggcagccgttggggcggccagtggcgtgtgcagaccaacgcctacggcaacggcagcaccgcgcgcggccgcgaggagcgctacctcctccccttcgaccccaccctcgaggcccatcgctactccgtcctctgggcccccacccacatcatattctacatcgatgacacaccgatcagggaggtgatcaggcacccgggcatgggcggggatttcccgtcgaagccgatggcggtatacgcgacgatctgggacggttcgacctgggccacggacggcggcaagtacaaggtgaactacaagtacgcgccgttcgcctccgagttctccgacctggcgctgctcggctgccgcgccgacccggtgctccgcgccccgcgcgacggcggcggcgccgggtgcgccgagcccgacctgctcggcctcctcacggccgactacgccgtcatgaccccgcggaagcgcgccgcgatgcgcgcgttccgcgcgcggcacatgacctacaccgtgtgctacgacgcggtgcggtacgcggccgggccgttcccggagtgcgacgtctctgacgtggagaaggagtccttctcggcgtggggcgagtccaagaacgtcgtcatgaaggcgcgtggccgcgggcgccgccgaggacgcaaggccggcgccggagccatgtcgcgcctcgacgtgtccagcagctgaagtgtcaacttgggaagctaatggcatatgatggttactattacactactagattctattaattttgcggtattgattgattaattgtagtatggttttccatgtatgtatagtttgtaaaggtagtaggtgctagggattaagttcggtaccaatttcgactattattctttgattcgttggatggc

SEQ ID NO: 26474 - DNA, 2290 bp, Oryza sativa
  ref <308>: DATABASE ACCESSION NUMBER: AK101916
  ref <309>: DATABASE ENTRY DATE: 2002-08-28
gaccctcgccttgtcggcgactcctcccactcccagatccccacctcgctctcactcccccactcttcccccctcgccgcggcggccagatccgggcggcggaatgctgggccgggcgggggcgctgtccgcggcgcggtggcgcggcggcgccgggaccgggaccgggatcgggatcgacctgcgcgccgcgctgcgctccgggggcaacctcctcttcgcgctcttcgtggcggccgtcctcgccttcaccctcctcgccgcggtccacagccccgacgacccgctcctccacccctcatcgcaccagctcaccgcgttcctcacctccgccacctccaactccaccttcctcgccgacgactccgtcctccgcaccggcgaggacttcgccgccgccatcggcgccaactcctccgatgccgccgccgccgcggaggccaccgtcgtcgccgaggccgtcccgttcatcaagctcgaggacgtcgcgaccaaggaggagtcgtcgggggcggagcgggccgtcaccgttgacaccgacgccagctcggacgcgggcgccgcggcggaggagaaccccatcgtcgaggcggtctcctgcgacacggaggcgccggtggactgcacgggggacaaggatctcttcaacctgctcatgcgcacggcgatcgagaagttctccgacctccacttctaccgcttcggccgccccgtcgccgtgccggggagccccatggagtgcgacctcgcatggcgcttccgccccgccgaggacaccaacggccgcaccacctactacaaggactaccgccgcttcacgctcacccgcgacgtcaacacctgcaacctcgtcgtcggcaatgtgggcgagtaccactccggcaccggcgccaagcgcagcggccgccgcaagggcaagaaggggaagaagggcaagcgcgaggcaccggtcaccgactttgtgccggccaagacgcagatgaggctcgatgagaacgctgccaatgcagacaccacggccgcctccgagccggagctagttgtcggtgaagctgtcaatgacaatttaccggtggtcgaatctgagtctgaattcagccgcggaaagtatctcatctacatgggcggtggtgagagatgcaagagcatgaaccactacgtttggggattcttgtgtgcacttggtgaggcacagtacttgaaccggacacttgttatggaccttaatgtgtgcctcaattcacggtatacttcaagtggcaaggatgaagagagagattttaggctctactttgattttgagcacttgaagcaatcagcatcggtcattgaccagagccagttctggacagattgggggaagtggcacaagaaggatagactgaagaatcactacactgaagacatcaaggtgaccccgatgcaacttcgtgacgtcaaggacacactgatcatgaggaagtttgggaatgttgagcctgataacttctggtctcgtgtatgtgagggtgagacggaggcagtgatcaagcgcccatggtatttattgtggaaatcgcgtcgattgatggagatcgtgtctgccatttcctcccggatggattgggactttgattcagtccatgttgtgaggggggagaaagcccagaacaaacagttgtggccaaatcttgatagagatacttctccagatagtctccttacgacacttaatgataaggtcggtgctggccggcatttgtacattgcaaccaatgaacccgataaatcattctttgacccaatgaagggtaagtatcgaacacacttcctggatgacttcaaggatttatgggatgagaacagcgagtggtacactgaaacaaaggagctgagcaatggtaatgctgttgaattcgatggatacatgagggttgcagttgacactgaggtgttccttcgggggaagaggaaattggagacattcagtgatcttactcgtgattgcaagaatggtgtcaatacatgccctgcttcctcatgaacatctcgtgaattatgtgcgctgagtctcaaatgttgtgcttgatataatatttttgaactaccgtgtatcttaagcacatatggctttgttgtagctagctagttcatatgagtgtttctgcaggacactgttgttgtattttatcacccagaacacattagtttgttgaattcatgcatcggcactttgtagtttgtactaattgcttaaacaagaaatttgctcaatgttaccatgttaagcctctattctgaggtattcacc

SEQ ID NO: 26475 - DNA, 1695 bp, Oryza sativa
  ref <308>: DATABASE ACCESSION NUMBER: AK101917
  ref <309>: DATABASE ENTRY DATE: 2002-08-28
ggtgcttcttcttcttctctctctaaatttctccattccgctcgcgatctccactcgcttcgtccagatctccgcatcaacccacagttagcgagcatgtcgtcttcgtcggagaaccccacggtgacggagcgtggcggcgggaaggaccgccgggacgacgacggcggcgaaaagaaggaaggaggcgggggattcatggagaaggtgaaggacttcatccacgacatcggggagaagatcgagggggccgtcggcttcggcaagcccactgccgacgtctccggcgtccacatcccgcacatcagcctccaccgcgccgacctcgtcgtcgacgtgctcatcaagaaccctaacccggtccctatcccgctcgtcgacatcgactacctcatcgagagcgacggccgcaagctcgtctccggcctcatcccggacgccggcacaatccacgcccatggcgaggagaccgtcaagatccccatctcactcatctacgacgacatcaagagcacctacaacgacatcaagcccgggagcatcatcccctacctcgtcagggtcgtcctcctcatcgacgtccccatcatcggcaggatcaagctccccctcgagaagtccggcgagatccccatcccctacaagcccgacgtcgacgtcgagaagatcaagttccacaggttctccttcgaggagaccaccgccacgctgcatctcaagctcgagaacaagaatgacttcgacctgggcctcaacatgctcgagtatgagatgtggctcggcgacgacagcgtcgccagtgccgagctcaccgagtcggcaacgatcgagaagcaagggatcaccaccatgcaggtcccattcagcttcaggcccaaggatttcgactctgctgtctgggacatgatcagggggaggggcactggctacaccatcaagggcaagatcgatgtcgatactccgttcgggaacatgaagctgcccattagcaaagagggtggaaccactcgcatcaagaaggatgacgatgatgacgatgaggattgaagttgtgctgataaaacatacagggtagggaagcagagatggtgatgccctgtgctctgaagcatatggtgctattgttggctgccttatctgagctgagccgctgtgttgtgttgttactcatctagctgcctcccgttattttgttcatgtttattagactcgggacaacttaatttgtggtggaaaccttgataataaaatcaacaggcccttgttctttgtggggtcagttgatatttttcgttatgttttccccaaatactggttgtgagggcgaatgctgttcaggaacctgttccaatggtaaactgaagaatggttgtcaattttgctgattaaatgatggttctggaggtagccaccttgcattcatccatcgatatcagtgtgaatgtgatgaatggtttgtgtttagctactccattacggatgatttggatagattttgactaattggacaggacaagccagtgctctgtctgcaactctgcattgctggctaccgtcttcgctatgtataatcgtagagagtttcatgacagacagtagcattcctggaaaaccagaatcatatacgcatacatgtattcttcctttcttgcatccttcgaagaaacaaaaagaataaagtaaacagagtacact

SEQ ID NO: 26476 - DNA, 1876 bp, Oryza sativa
  ref <308>: DATABASE ACCESSION NUMBER: AK101918
  ref <309>: DATABASE ENTRY DATE: 2002-08-28
ggcagccgacgattccctcccctccaccgactcctccgccgtctcctccacgccgccaccctcgccccctgcgcttccgccgccgcgcggtgggccaccccgccctccatcgccggcgggccaccccgcgcttcgttggttcgggccgcgccacgacgctgcctcggctcccttctccctccaggctgcacgacttgaaattctgtgtatgaagtagcatttactggagaaagctcaagggaaactatcatggatgccaactccagtttaaatgagcaaaagtctgaagaactcaagcttaaagcaaatgatgcctttaaagcaaacaagttctccctggctatagagctctatagtcaagccattgagctaaacagttcaaatgcagtttactgggcaaaccgtgcatttgctcatacaaagttagaggaatatggaagtgcagtgcaagatgcttcaaaagcaattgaaattgatgctagatactcaaaaggttactaccgacgtggagcggcatatcttgccatgggtaagttcaaggaagctctgaaggattttcaacaggtgaaaagaatcagccctaatgatccagatgctactaggaaattgaaagagtgtgagaaagctgtccagaaaatccgttttgaagaggcaatttctgtaggggatgaagagaagcgctctgtagctgattctattgactaccgtatcatagaagtagagccacaatatacaggaccaagagttgatggagacacaataacattagattttgtcaaggctatgttggatgagtttgagaaacagaaatgcatacacaaaaggtacgcctaccagattgtgttacaaaccgtgcagctattgcgttctgtaccttcgcttgttgatgtgaacgttcctgatggaagtcattttacggtttgtggtgatgtgcatggtcagtattttgacttgctcaatatatttaagctcaatgggcttccctcggaagagaatccttacctcttcaatggagactttgtagacagaggatctttttctgttgaagtcatactcactctttttgctttcaagtgcctctatccgacaggtatgtaccttgcaagaggaaaccatgagagcaagagcatgaataagatatatggttttgagggagaagtgaggtcgaagttgggagaagcatttattgaactatttgcggaagcattctgttgcctaccccttgctcatgtcatcaacaacaaggtctttgttgttcatggaggtctctttagtgttgatggtgttaagctttcagatattagagccatcgatcgattccgtgagcctcctgaagaaggtctaatgtgtgaagtattatggagtgatcctcagcctcaacttggtagaggtccaagcaaacgcggtgttggtctttcgtttggtgcagatgtgactaagaaatttctacaagaaaataatctggaccttgttgttcgatcccatgaagtgaaagatgaaggctatgaaattgaacatgatggaaagcttataacggtgttctctgctcccaattattgcgaccagatgggtaacaagggtgcatacattcggttcacagctccagaactaaaaccaaatatttcctctttctcagcggtgccacaccctgacgtcaagccgatggcctacgcgaacaacttcctcaggatgttccagtaacaacatatatccatatccgccttctttcgccatattttttttttgtgacgaggctgaagcctaaaaagcttgctagcatacgatgtttgtacaacagatctggtggtgtaagcaggaatgcaatttttctatatactgccatggcactctgttacaatttttttgtggagaactg

SEQ ID NO: 26477 - DNA, 2571 bp, Oryza sativa
  ref <308>: DATABASE ACCESSION NUMBER: AK101919
  ref <309>: DATABASE ENTRY DATE: 2002-08-28
gtcctctctccttccccctcgttctccgcttccacccaaaccaaacccaaacccaacttgcgaaaccccaacgaatcccccccaaaacacccacccagtcaaacactccccaactccgatccccacccccatggcgtcggagatcgaggtgctcgaggacaccaccaccacgatggccgcctccgccgcccccgtggcgcccgcgtccccatccccatcccccgccgccgctgccgacggcgaggagggggaggggccggcccctgcggcggaggacgactcgctgaagaacgacgtgtacacggcggcggcgtacggcgatctggagaagctgcagcggctagtggagggggagggccacccggtcacggagcccgacggcctcggctaccacgcgctccagtgggccgccctcaacaaccgcgtcgccgccgcgcagtacatcctcgagcatggagcagatgtaaatgctgtggaccacactgggcaaacagcacttcactggagtgctgtacgtggacacatccaagttgctgagcttcttctgaaagaaggagctaaggtggatgttgctgatttatacggttatcaggcaacacatgttgcagcgcagtatggccagacagcatttatttatcatattgttgcgaagtgggatgctgatccagatgtccctgataatgatggaagaagcccactgcactgggctgcttacaagggatttgcggattctatacgtctccttttgtatttggatgcttatagggggcggcaggataaagaaggttgtacccctttacattgggctgctattagggggaacctggaggcatgcactgtgctagttcaggctggcaaaaaggatgacttgatggtgaaggataagactggtctaactccagcacagcttgctgctgataagagtcatcggcaagttgcattttttcttgacaatgctaaaagggtatatgatagaggatgtgatgggaataccaattttggaaagctatcgaaactggggctagctcctgtactttggtgtattattgttggcttgcttgctacatatatacactctgttatatcaggtcaatatatcatggatatgacagcaccatttgggctgtttgcatggtcaggagttttccttgcaactgctggcctagtcatgttctataaatgtagcaggaaagatcctggctacatcaaagcaaatatacgagattcacaaaatcaaagggatgatgaacctttgttgaagttggagttagacaatcccgcacttctgtctggtaactggtcacagctttgtataacatgcaaaattgtgagacctgttcgttcgaagcattgttctacatgtgatcgctgtgttgagcagtttgaccatcactgtccttgggtatctaattgcattggcaagaagaacaaatgggaattcttcatgttcatcactctagaagtttttgcaatgatcattactggttctgctgccattataaggatggtaagagatccggcttctccagcatcctttattccttggctcagctattctgcttttaaccatactggggcactttcccttttcataatggacctcttccttttcttcggtgttgcagttctagcagtagtccaggcatctcagatagcgaagaacattacaacaaacgagatggcaaattccatgagatacagttatctaagaggtccaggtggaagattcagaaacccatttgaccatggagcgcgcaagaactgctcagaattcttgttaaatggatacaatgaggacattgaacgtcttgatcatacgtcacacactgatgaggaaatgggaatgatacagatgacaaacgcagtctctcagaatggcgagggcccttcccaccatggtaacggcactggccattcttgtgctgaatcacatgctcactcaaaatctcacagtcaagtaagttcatctcagtgttgtgaccacagtaagaagaccgatagaacaccattgggcctagggctgggccttggacgaaacagtgcttcccggcagtatgtccggtctcttctcccattgtgatttgttatatgcagatcatgtgtgtgctctctgtagattgtatgtgttcatgctgaggctccattatttatttagctgcttgtgacataccacataggtttcgctagcttacgttaatattgttggggtgctagctgtgtgaaaattcagatctattagatccagtattttttgtggtgaatacataggagatgaaggtagcaaggtgctcatgaatatccgctgatccgcagttcagaaatgtcttgtcgctcctgaaaagagggcaacaattttgtgcagatgcagcagcatgaaacatcttcattgctgtgtcccttggtgtcaatataactccagcattttagcttctggatcttacatctgtgggaaaatgtagttgtaaactaagataattgtaaatttattagcaaattctgaatttagatactcttgttgtgatctatagctgtactgacagtccagaaagttgtaataacaaaacaaatatc

SEQ ID NO: 26478 - DNA, 2419 bp, Oryza sativa
  ref <308>: DATABASE ACCESSION NUMBER: AK101920
  ref <309>: DATABASE ENTRY DATE: 2002-08-28
ggcctcctccccaccccccacccccgcgcgacgccacgccacgccaccactcgccgcagcgccgcgcccaaatcccccaaaaccctagcgcggcgagcggagggagagagagaggaggcgcgccatggcggctgcggcgacagcggcgaacctggccggcaagcagggcgtgcgggtcgtcgtcatcggcgaccctggcaccggcaagtccagcctcgtcgtctccgtcgccaccgaggccttcccggagaacgtcccccgcgtcatgccgcccacccgcctccccgccgactacttccccgaccgcgtcccaatcaccatcgtcgacacctcctccagcccggagcacagggcgaagctgatcgccgagtgccaggcggcggacgcggtggtgctcacgtacgcctgcgataggcccgccacgctggagcggctcagcacattctggctccccgagctccgccgcctccagttaaaggcacctgtgattgtcgtggggtgtaagctggaccttagggacgagcagcaggtcagccttgagcaggtgatggcgcccatcatgcagacattcagagagatcgagacctgcattgagtgctctgcgcttcgccagatccaggttcccgaggtcttctactatgcccagaaggcggtgcttcacccaacagcacctctatttgatcaagaggcgcaatctctaaagccacggtgtgtgagggctttgaagcggatttttattctatgtgaccatgacagggatggagcactcagtgatgtggagctcaatgactttcaggtcaaatgcttcaatgctcctctccagcctactgaaattgcaggcgtgaagagagtggttcaagagaagatgcctgaaggcgtgaatgacaatggccttaccttgactggattcctttttcttcatgctctttttattgagaaaggacgactagaaactacatggactgtcctaaggaagtttggttatgataatgaaatcaagcttagagatgaccttattccaacaattaaacgagcgcccgatcaaaccctggagttgacaggtcaagccattgatttcttgagaggaattttcaatatgtttgacacagataatgatgatgctttgctacctgctgagctggatgatcttttttccactgcacctgaaaacccatggtctaataatccatatgtggactgtgctgaaaggaatgtcttgggtgggttgtcccttgaaggatttctctccaagtgggctcttatgacacttctagatccagcaaatagttttgccaaccttatatatgttggctattcgggtgattttggctcagcatttaccactatgaggaaaagacgagttgatcgtaaaaagcagcaaacgcaacggaatgttttccagtgctatgtttttggtcccaggggctgctggaaagacagcattgctacaatcattccttggaaggcaaccttctgatgctctgcctatgaatggtgaacggtttgcagcaaatactgttgaactatctgggtccagaaagacacttgtatttcgagagattcctgaagatgatgtcagaccattactggctgatagggaatccttggcaccctgtgatgtagcagtattcgtttatgatagctgtgatgaattttcttggcaaagaacaagggatttgcttgtggaagtggctacacatggagaaaatactggctatgaagttccttgtctgattgttgctgctaaggatgatcttgaccaatctccattggctctgcaggaatcaacgagagtgagccaagacatgggaatcgaaatgccaattcctattagcgtgaggttgagagatttgaacaatattttctgtagaatagtccatgctgcgcagcagcctcatctgagcattccagagactgaagctgggaaaacacgcagacaataccgtcaacttctgaaccgttcccttatggttgtctcagttggagctgccgttgcagttgtgggaatagctgcttaccgagtctatgcagctaggaagaacacatcgtcttgaagctctcctggacagtgctgaaataaagtgctttcctcctttcactgcccatcaaccggatcttttcagataattttttacttctgagcttcataacgtgaaactttgtccagagaacccttttatgtacagatgtgttttcagcaatcaatcgttctgcgtattggatttcgcattttgcggctataattatgtagctgataaactgctatgactaaactagctctggcaaaacattagtactgccgtacaattttgttcttttagcaaatgtgctgttactatatcatgtctcggttctttttttaattaatggccctggattcttttggcattgagaatgatatgtcagattgtctttttac

SEQ ID NO: 26479 - DNA, 1747 bp, Oryza sativa
  ref <308>: DATABASE ACCESSION NUMBER: AK101921
  ref <309>: DATABASE ENTRY DATE: 2002-08-28
gctcctgtcctgtctcccctctccactccaccgccgccgccgcctccgcgaaatggcgaatctgccgccgtcgctctccatcggcgccgcctccttcgccgcgccctcgcccccgccgccctcgcctggcgcctcctcgtcgtcgtcggcggcggcggcggcggctccgggggccgccaaggaccggaagatggcgtccgcggagcagctcgtgctcgacctctgcgaccccgagctgcgggagaacgccctcctcgacctctccaagaagcgagagatttttcaggatcttgctccactcctgtggcactcttatggaacaattgctgcactactccaggagattgtgtcaatctatccatcactttcacccccaacattatctccaggggcttcaaaccgtgtctgcaatgcacttgcacttcttcagtgtgttgcctcacacagtgacacaaggattcctttcttgaatgctcacatcccactgtatctgtaccctttcttgaatactactagcaagacaaggccttttgagtacttgaggcttaccagcttgggtgtcattggcgcacttgtgaaggttgatgattctgaagtcattgggtttctgctgcaaactgaaataattcctctgtgtctccgtactatggagatgggcagtgaactttcgaaaacggttgccacctttattgttcaaaagattctgcttgatgatgttgggcttcgctacatatgtgctactgctgaacgtttctttgccgtagccagtgttctatcacagatgttcaggcacttgctgatcaaccttctccaagactgctgaagcacataattcgctgctacctcaggctgtcagaaaattccagggcatgtaccgcgctgaacagctgcctccccaacgcgctgaaagatggaaccctcaacaacttcctccaggatgatcatggcaatgttctggtcctccagtgacgactttgtggagaatgaattctcagtcagggagggtgatgcaatctccatgagtcatgtacaagagactctccaaaggttggctccagatctttaccagaatgtgtttggcgccctcaatgaggtacactatacagaggatggaaggccaccgaagagtgtagttgtttcgctcaagaggctaattacagagatcacatccgagatgacacctactgagttcgtagcattctcactggagacgagtcgcagggacttgattcaccagctaagtgatgtgtcccaccaggaatttcgcttgaaggtcttgaggtctcttcagtctgtggcatctgctttaatccacctccacatgctggataaagagatgttggagccccacctctcacggccaacactcttggggtgcaaagattattcaccgctaaaccaggatccatattggccccattttcaagttttatcagatgaggaattaagtgttgaagtccgtcgaggctccctgccaatgttctgaggtttgatttttgtgcaaaaggaggtgaagaactagaggaaagtgaagaggagagaaaagtcggtgttgtttgaaagcttcatgccatattgcgccccttccttctaaggcggatgaaggtggatgtagagcaaatgcttccatgaaagaaagagataatcatttatgctaacatgactgacaatcagaaacaaatccaaaatcacttggttgaacaaacatttgatgaatacctgcatgaaaaatcagaaattggtacgg

SEQ ID NO: 26480 - DNA, 1158 bp, Oryza sativa
  ref <308>: DATABASE ACCESSION NUMBER: AK101922
  ref <309>: DATABASE ENTRY DATE: 2002-08-28
gagccttaagctcgaacgcgggttggtggttgtaccagcagcagcagggaatcatggactcggagcactggatctcgagcctcgccgccgccaagcggttctacgcggcgcagctcggtcacgtcgacgatatggcggggattggaatggaggaggtggagatggagatggaggatgatggcgagggcatggagctggagctggagatgcagctggaggaggcgacgtggccggacgtggcctgcccctactgctacgaggaccacgacatcgcgtccctctgcgcccacctcgaggaggaccacccctacgagccccacacctcgccctgtcccatctgcttcgaaaagattacaagagatatgttaaatcatatcaccatgcaacatggttacttgttcaagagtggtcgcaggatgcgcagattcgatattcccgagagccaggcactttctttactgagccgagatctgcgggatgctcagttacaggcacttctaggaggtggtcatcgtcagcgaagaagcaacactactgccacaaacatttctgctgatcctctgctttcttcgtttggcctgggcttctcaacattggattcagaggaacgatcaaaagcaccagttcctattcctgatgatacatcaattcataaggatactcctgctcagccatgggaatcaaggatcgactcatcgctcacgagtgaggaaagggaacaaaagcggaaacaagccactgacagagcaacctttgtgcaaggcctggtgctctccactttatttgaagactgactgttcaagtagccctagtttttcttgctagatgcatgtttcctctcgctggttcccataaaagcgcaatgttccacctgatttggtgaatctgatttcgtcaacagtgagatggatgtgcttctggtgccccgttgttctttcgcttcagtaaagcgcgaagttgatttgggcatgatacacaccttaatttatgtcagctgccctgtaccattgctttttatgaattaacgggtagccacaccttgactgtaactcgttgttgtacctctccatactgtctaggaacattggtttgtacaaacataaaagctgttacatgttgtacaatgcaaaggcaaatgcagaagcaccgtttatatcg

SEQ ID NO: 26481 - DNA, 1220 bp, Oryza sativa
  ref <308>: DATABASE ACCESSION NUMBER: AK101923
  ref <309>: DATABASE ENTRY DATE: 2002-08-28
gggagccagcagcaaaagcccattattaacgggacgcacgcgcgcgcgcgcaggggacaagtcgagggagagctagctagcttagcttgcttggttgctttggaggtgtggcttgccatggcgagagcgttccgcgcggcctcgccgctgccgctgccgtcctccagctccagggcggccgcggcgagcggtggcaccggcggaggcggaggcgggaacttcccgtggctgagcaggaagcggctgggcgccaagccgccgtcgccgcagcggcgaggtggacaggagagggagggaggtggagatgaggcggcggggatggggacgacgacgggccgcgcggttctccgcgacgtcgtccgcggagcctgctgaggtgcagtcgtcgtcgtcgtcgaggaagcgcgcggacgcgctggcgaggctgcgggcggcgttcctggcggcgatcacgcaccggcggcggcggcggcagctggggtcgagcctgacgggcaccatcttcgggcggcgccgcggccgcgttcacgtcgcgctgcagacggacacccgctcgccgccggtgctgctggtggagatggccgcctactccaccggcgcgctcgtcagggagatgtcctccggcctcgtccgcctcgcgctggagtgcgagaagcaaccaatcaacccaggcgagaagcggcgggcgctgctgtaggagccgacgtggcgggcctactgcaacggccgaaagtgcggcttcgcggtgcgcagggagtgcggcgccgacgagtggagggttcttggcgccgtcgagccggtgtccgtcggcgccggcgttctccccgacgacgccgccgccgccgccgccgccgaggagggcgacctgatgtacatgcgcgcgaggttcgagcgggtggtcgggtcgagggactcggaggcgttctacatgatgaaccctgacggcagcggaggcccggagctcagcatctacctgctcagagtctgaccatggatcatactatcatggagcaaaatcgaaaagaaaaaatgagagaagaaatcatcttgatgtttgcaattaattgtacgtaatccatccatccatgcatgcatagtttggcttgtgttaattactttcttgggtttcatgtaatttgaagggtgtcaaggtgtgtacagtattactgatcacttggggggggcttaatatatcaatctggtaaacattggtgtgatgc

SEQ ID NO: 26482 - DNA, 2181 bp, Oryza sativa
  ref <308>: DATABASE ACCESSION NUMBER: AK101924
  ref <309>: DATABASE ENTRY DATE: 2002-08-28
gtcgggaaaaaaaatgggtcgtatgattgccaaattttctgcacacttcgttcttctcctcgtgttcagcttgagcaacgacgtggtggtggcctcggccgccggcggcgatggccagttcacgtaccaggggttcgcggcggcgaaccttaccgtggacggcctcgccaccgtcacggcgagcgggctcctcgtgctcaccaacttcacgtaccaggcgaaagcgcacgcgtttcacccggcgcctctccgcttcctcggcgagtcctccacggcggcggcgggggcgaacgccagcggtggcgccggagccgacgtggcgcggtccttctccacggctttcgtgttcgccatcgtgtccgggtacgacggcctgagcgaccacgggctcgcgttcgtggtcgcgccgacggcgaacctctcggcggcgaacgccgggcagtacctgggcttcctcaacgcgacgaacggcacggcgagcggccaaatcctggccgtcgagctggacaccatcatgaaccccgagttccacgacatcagcagcaaccacgtcggcatcgacgccaacagcctcatgtcgacgcaggcacggccggccggctactacggcgacggcgacggcgccttccgtgagctcaggctgaacagccgccagccgatgcaggtgtgggtggactacgacggccaggccaagcagctcaacgtgacgctgtctcccgtgcaagtgcctaagcccaagaagcctctgctctcccaggccatcgacctctccacggtcatggccgaggagatgtacgtcggcttctcgtcggcgacgggcgtcgtgaacacccaccactacgtgctcggctggagcttcggcttcgacgggccagctcctcccctcgatctctccaagcttccccggctgccacgcttcggtccgaagcctcggtccaaggtcctggacattgtgcttccgctggccaccgcatttctcgtcgctgcggtgctagctgccgtcttcttcgtcgtgcggcggcggcgccgcttcgccgaggtgcgggaagattgggaggatgagtttggtccgcaccggttcgcatacaaggatttgttccgcgcgacggatgggttcaaggatagaaatttgctgggtgttggagggtttgggagagtttacagaggggtgctaccggagtccaatttggagattgcggtgaagagggtttcacatgattcaaggcaaggtataagggagttcgtcgcggaagtggtgagcattggccgacttcgacatcggaatctcgtgcagttactaggctattgccgccgcaagaatgaactcctgttggtgtacgattacatggcgaatggtagtcttgacaagtacttgcatgagagaaatgttacaactctattttggcccgagcggctctggatcatcaaaggcgtcgcatcaggtttgttgtacctacacgaggattgggagcaagtagtcatccatcgagacataaaagcgagcaacgtgctcttagacagtgcaatgaacgggcggctaggtgattttggcctggcaaggctgtacgaccatggcaccgaccccaaaacaacacatgtggttggcaccatgggctacctagcaccagagctcgtccgtacagggaaggcgtcacccttaaccgacgtgttcgcattcggggtgttcttattggaggtgacatgcgggcggaggccgatcgagaccgacgagcacaacaaacgggtggtgctagtcgacttggtgcttgagcaccaccgcaatggctcgatcgttggtgcggcggatccacggctcacggggaagttcgatgtggaggaggtggccctcgttctgaagctgggtttgttgtgttcgcacccgctacccggtgcgaggcccagcatgcggaatgtcatgcaatacctggagcgtggcggtaagtcggctcctgacctatcgccgagctacgtgagctatagcatgatggcgataatgcaaaacgaagggttcgattcattcatcatgtcgggcggcccccggtcggcggcaagcattggcaccgtgtctggtgcatcatctatgactattatgtcggagggaagataaaattcagtgcttgcaataagtcttttgattcctactgactcaagttcttaagtgactttctttcttgttcctcg

SEQ ID NO: 26483 - DNA, 2313 bp, Oryza sativa
  ref <308>: DATABASE ACCESSION NUMBER: AK101925
  ref <309>: DATABASE ENTRY DATE: 2002-08-28
gtaaaacggaagaaaagaaaagaaacagcaatgcccaactcgagctagtcttgttactatcttatactagctacttcagaagttttcaggctcatccgagtaagaagagatcggtgatgggttataagtgtagtagctgcctgcaggcggtggtgctgtggcagttgctcctgccgtggacgcacattgcggtggcggctggcgcgaagagctcgtcgccggcggggaagccgaaggccgcggcgccgccggtggtggccgggccggtgtccaaggtggaggacgccaccaggttccagatatactacggccagagcttcaaagtcgtcaagaacaactggaacggcaagagctaccttctaatgcagaacacatccaagatggccaccaagaccaagtattgcacggggaggattaagtcgttcgttatccctcttgccaattactccgtcgacaccacggcttctccagtgtcattcttcgaggtgagcaatgcgggacaaattaagtactgttcaatgcggaatctgtacaatcgtagataatgaagcaaaagcaacagctgaaactgaacaggaaaaacatatcatctgtagaagcaaatgttttatgcctctgactctcatattaattgatccctgcagcactttttgacactctatgcagctacttggagtattacaaaacttgaaggggataacatctgatcaaattgcctcccagtgtgtgctccaatcatatgcaagtggaaatgtccagctttttaacaagaccgatgcacagatgctcacacaatttagtgcacatttcttgagcactacagatgaaggctgcaatttcgcagcttatgtaccctctgaagaggggacaccattgcaaagggctgagtggatcaagtacttgggagctttcacaaattcagaagatagggctaacacagtttatgacgcaataaaggcaaactacttatgcttaagcaaagcagctgcgaatcttagcacaagattcaaacctatagtggcatggattgaattcacacagggtatgtggacatttgttagtgatggttggattgtacaggtaatgtcatttgtttattgcagcactttgaacataaagctgtcaactaaacaaatgaaatggagacaactcatgcgcatttggtatttatgccataagcagtatgtcacagatgcaggagcagaggttgttgatgcaactattactaataagagattcaacaattctgatccagaggatatggataacttccatgctattctttgtgtgagtatcgataatacataactgtcagagtaatcatctgtctcactatttctcatgatgcactaaagatccatcgtttctttttggagagctggagaactgttacttagttaaaataatgtcagaatgctaatactagacaagggcaaaattggacatttctatgaaacaccaaaggttttagtacttcacaaaagttttaaatgaccctcacttgttaagcatctaacattaagctttggtttatgtatttttcagacagttgatgtggtcatagatcagacatatgcttcagatcctgcagagtacaaactatccacattcttggagagcattaatgtggaccgtgactcttgttttagttttgtagccaaccgtagcatatggagatttgataaaagaataggatattcgaagaaacttgattggttcgatggagctatctcccagccccagttggttcttgctgatctaatagaaattttctttccaacggggaattacacaacaatttacttcaggaatctaatgaaggatgaaggggtcactgaagttgtccccgaaatgtgtagtagaagcatatcaacacccatggagccaacaatcttgccctgccagtgatgaccttagatgaatatgaagacagaggaccttacagctactgtacccacaaaactatggcaattaaccactgagaccattacaggttgccgatgaagtgatttgaagttttaaacaaagcagactagattgcatatttgagaaagaatcatggtgacaaaggacaatgatgtctaaggaatactatgtatctatctcatcatttgacaatgaaagaattgttctcaatatatgatatttcaatatcttcttgaataatctcctaaatatagtataagattgaggtactaactgttgtaatttcagttactgttggttacagtatttgggttatctttgtgtgatacagacaggaaactgtgaaaagagcactgaaataatgagtactatagttgaactctgggc

SEQ ID NO: 26484 - DNA, 1398 bp, Oryza sativa
  ref <308>: DATABASE ACCESSION NUMBER: AK101926
  ref <309>: DATABASE ENTRY DATE: 2002-08-28
tgagcctccttccccaactgttccacgcagaagcaaagcaacgccggtaatctctctccgccgcccccgccgccgccgcaccgttcgccggggatctagggaaggatggagagcggaagctacgagggcgtcctcctgggcatgggaaaccccctcctcgacatctccgccgtcgtcgacgaggccttcctcgcaaaatatgatatcaagccagggaatgcaattctagcagaggagaagcatttgcctatgtacaatgaattggctagcaaggtcaatgttgaatatatcgctggaggatccactcaaaattctattagggttgctcagtggatgctccagattcctggtgcaacaagttacatgggttgcattgggaaggacaagttcggtgaggagatgaagaaagacgcacaaaccgctggtgttaatgcccattattatgaggatgataatgctcctactggcacatgtgctgtctgcattgttggtggtgaaaggtcacttgttgcaaacttgtctgcagcgaactgctacaggtctgaacatctgaagaggccagagaactggacacttgttgagaaggcaaaatatatttacattgctggctttttcctcacggtatccccggattccattcaacttgttgctgagcatgctgctgcaactaacaaggtgtttatgatgaacctttctgctccctttatatgtgaattcttccgtgatgcccaagagaaggctcttccgtatgctgactatatttttggaaatgaaactgaagcaaggacctttgctaaagttcgtggttgggagactgagaatactgaggagattgctttgaagatctcgcaattgcctaaggcttcaggagcacacaagaggattactgtcattactcaaggctgtgacccagtagttgtggctgatgatggaaaggtcaaaacattccctgttatcgttttgcccgaggaaaagcttgttgacaccaatggtgcaggcgatgcctttgttgggggttttctctctcaattggttcaggagaagagcattgatgaatgtgtcagagctgcttgttatgctgcaaacgttatcatccaacgctcaggctgcacttaccctgagaagcctgacttcaactagagccatttcagcatattgagaaaggaataactataggcgacgagtgctttttgacatttccaccactactcaaggcacatttctagtgcaccctaggcatgtttggatagatgagtatagtgccttatctctttggcatggcaggaaagtgaactaaaaattcctaccgatatgaaaggatcatgccactcagtcaatacagagcaagacccttcagttgcaattccaccgtgccatctctttctgcatttacaaatc

SEQ ID NO: 26485 - DNA, 843 bp, Oryza sativa
  ref <308>: DATABASE ACCESSION NUMBER: AK101927
  ref <309>: DATABASE ENTRY DATE: 2002-08-28
gactcccaccccccgccgccgccgccaccaccgcagctgcgccgcttcaaggcaggacattgtgaaagtttcccaagtctgaaaagatggttctgaagactgaactttgccgttttagtgggcagaagatatacccaggcaagggtatcaggttcattcgtgctgattcccaggtttttctgtttgccaactcgaaatgcaagcgctacttccacaaccgcctgaagcctgccaagcttacctggacagctatgtacaggaagcagcacaagaaggacattcatgctgaagctgtcaagaagaggcgtcgcaccaccaagaagccatactcacggtcaattgttggtgctacactggaagttatccaaaagaagaggagtgagaaacctgaagtccgtgatgcagccagagaagcggctctccgtgagatcaaggagcgcatcaagaaaaccaaggatgagaaaaaggcaaagaaggcagaggtggcaaaatctcagaagacacagtcgaagggtggtgctacccagaggggtgctaaaggtcctaagattggcggcggtggtgggaagcgctgaaagtctcttgcatcatagggagagttcttctggcttagccttctctccggccatatcgtagaaacagtaccttggtcaagttagcctgccgtcttgaattttcacctttttctgtgagatgacttgtcctgaatgcttcgggtattttgttagtcaatttacaattgcacttatgtttggctattataaaattatcaagttttctgcattgacaattgcgcagtgagtttgatggccttaatttatttgccatctgttttgatgtttc

SEQ ID NO: 26486 - DNA, 2203 bp, Oryza sativa
  ref <308>: DATABASE ACCESSION NUMBER: AK101928
  ref <309>: DATABASE ENTRY DATE: 2002-08-28
gatcagctcacctcttcatcctcctgcacgcgagaatggccatggcgacgccaatggctccccgctccacgttcgccatcttcctcatcctcctgctccgttccggccactctccggcggccgcgttctatctcccgggcagctacccgcaccgctaccgccccggcgaggcgctggccgcgaaggtgaactccctcacctcgccgtcgtccaagctcctcttcccctactactccctcccgttctgcgcgccgcagggcggcgtcaacagcgccgccgagagcctcggcgagctcctcctcggcgaccgcatcgagacctcgccgtaccgcttctccatgctcaagaatgccaccgccttcctctgccgcaccgacccgcttccccccgccaccgccgacctcctcatgttccgcatcgacgacgcctaccacgtcaacctcctcctcgacacgctccccgtcgtccggtatgtcaagaacatggccgcgccaggggtgttcgtccggtctaccggcttccccgtcggcgtgcgcgccgacgacggcgagtactacgtgtacaaccacctcaagctcaccgtgctggtcaacaagccgcggaacggcaccaccagggcggaggccctgatggcgaccgccgacgccgtcgagctcatcagcttcgccggcgggagcaaggacggcggcgggtacaccgtcgtcgggttcgaggtcgttccgtgcagcgtggagcacgatgcggcggcgatcaagggcaagaagatgtacgacgagctgccggcgagggcggccgccgggtgcgacccttcggtggtcggcatgcgcgtgcgggccaaccggccgctcgtcttctcctacgaggtggcgttcgtggagagcggcgtcgagtggccgtcgcggtgggacgcgtacctggagatgggcggcgccaaggtgcactggttctccatcctcaactccatcgtggtggtggcgttcctcgccgccatcctgctcgtcatcctgctgcgcaccgtgcggcgcgacctcgcgcagtacgacgagcacggcggcgaggcggggttggcgccgcaggcggacgagctcgccgggtggaagctcgtcgccggggacgtgttccgggagcccgcccaccatcctcttcgcggcgctcgggttcatgtcgccggcgtcgcgcggcgcgctcgtgacgggcatgctcggcatctacctcctcctcggcttcgcggcggggtacgccgccgtgcggctctggaagacggtgcggcacggggacagcgccgggtggaagcgcgtggcgtggcgcgcctcctgcgccttccccggcgcgggcttcgccgtcttcaccgcgctcaactgcgtgctctggtacaacggcagcacgggcgccgtgccgttcctgctcttcgccgtgatcctcctcctctgggcgttcgtctccgtgccgctcaccctcgccggcgggctggtggcatcccgcgtcgggcacctcgagtacccggtgaagacgaacaagatcgcgaggcaggtgccggcggcgcagtgctcgccgtgggtgttcgtggcggtggcggggacgctgccgttcgggacgctgttcatcgagctgctgttcatcatgtcgagcctgtggctggggagggtgtactacgtgttcgggttcctgctggtggtgatggcgctgctggtggccgtgtgcggcgaggtgtcggtggtgctcacctacatggggctctgcgtggaggactggaggtggtggtggcgcgccttcttcgcctcgggctccgtcgcggcctacaccctcggctacgccgtctactacctcgtcttcgacctgcacagcctcagcggcccggtctccgccgcgctctacgtcggctactcgctgctcatggcgctcgccgtcatgctcgccaccggcgccgtcgggctcgccgcctccttcgccttcgtctactacctcttctccgccgtcaagctcgactgatccatggcgtcatcgtccgcactgtccacgtcatttcattatgtaggtgatctatgcgttttattactacatgataataagattattattttttgttcctcgttttggtgttttccattttgtacttcatgagtatacaccgtagtagtactagatagaaacgagtttgagtttggtttaaaggagcactattacaagatttcactttgtattt

SEQ ID NO: 26487 - DNA, 2717 bp, Oryza sativa
  ref <308>: DATABASE ACCESSION NUMBER: AK101929
  ref <309>: DATABASE ENTRY DATE: 2002-08-28
ggcgaaatccctaaaccctagccgccgccgccgcccccgccccggcatcggcgacgactccgacctccagaaggacctggacgagccgcgccgctcctgcatcctctccgggaacgaccccgacgccgcggtcgcgcaggtctccgccagcctcgccgccggcacatcaggggcggggggcggcgaagaatggctttgtccgatgatgacgaggaggaggaggacgatggctttggcgctcgtccgtagcatccgtgagaatctcctcaacaaggcctcttgccctcctcacccgatctgcgtctggccgccctccgacttggaggaggacgacgacaacgacctcgagacgctccgtgcgatacagcacccacttctcgcactaccattccggtacctccagtgggtcagagacaaatacaaaaactgaggaaatctttttcgaaatagacttgatgaagaatttgatgtggataagcaaaataaagaggcaattaccccaattgggtttcctaaagctgcctgctgttagtggatgctcttaagaagaacagagcatgccagaagttcattagaaggtagattacaattcaagcgaaattgaagaaaataagaatcttaatcttaaggatcatgtaaaatgccttttggattatcagttaagccgcagaaaagaatttggcaaaattttgtgccaaaatgaggatcattatgttagattgttttcctctcaaaagccatgtgcacaatcagcgaaggacacaattctaaggatctatgttgcccaccggaaaacattaaggggcgcaccctggggcgatggagggaggtgccacgtcggcgatttgctacagtcctacagtgctcggggtggtcgttttgcaaaaataaccctccggtttgctggtaattcgaagatgcaactaggaacaattttcatcagtatgctcaagatccaaatgaccgaaatactggacagatgtaccatggatccaattatcatcagtatgccaaagttttgtttaagagatacttggaaatagtagctgctacccctctaattattttgaagaaaataatggtcctagagaagtaagattacacgactcacagttctataggcaggataatcaagagtattcaactgatgatgatcctttgcctggtattgaggggtttcaaattgttggggagcctagatcatgatttacattaacagcatgtggttaccctaccaatggtactaccctttgtaatttccaggtgctacgatgtatgactacgtggttactgctgatgatgttgacactcttttggctgtagactgcacgcctatggatgataatacctgtcagggtgaattggttacagagtatactaacaatgggagcaagataacttgcggccaagaagaagatggtgaggctgatacagaggatcatctgggacaagagggcaaggagggccaccacgggacgccatcgacgttctcttcagagacaccagcgatgagctcaccgacgagctcatctccgacaccatgatcgacctcatgatacccgccggggactccgtcccggttctcatcacgctcaccgtcaagttcctcagcgagtgccttctcgcccttcaccaactggaagaggagaacatgcagctcaaagaggcgaaaaaccagcatgggtgagaccttgcaatggacagacatgtcattgtcattcacacatgtgataacagagacgctgtggttgggcaacatcatcggtgggatcatgcacaaggcggtgcgcggcgtcgaggtgaatgggtacctcattcccaaggggtggtgtgatcggtccacctcgatgatatgctctacgatgagccctacaagttcaacccatgaaggtcgaaggagaaggacatgagcaatggcagcttcactccatttggtggtgggcagaggctgtgcccaggcctggatctggccaggctggaagcttccatcttttttcaccacttggtcaccagcttcaggttagaacaaggtagcaaggactgaggctaatggtaagaggaggcagaagaggaaatgagctaggactgcggattccaaaaattgattctgtggagtgaccaagttgcagctagagaacaagctccatacctcctcttccattgggtgcctcctcccccttgtctccctcctgtttgctgcctctatggcaatgcctaacggagtagtggctggtggacgagagaaaatggagttgggggcaagtgaggactgtgatggtatgaactattcctcatcatttttcaggtggctaaagtgtgtcgatccattcattaatcataatatgtggactgctcgggaggagaagacgacttttaccaaccgtccaacaacaaggaatgtttaactggattaacattgcagttgcattgggtactcacaggacacctttccagtgcctcgctcgttatcagcaaagttttaatcattgtatattgagtaaggactgcgctaaagaagaagatcttcaacttaaagctgctgtcaacacctttggtatcaactggtaacttgtatcagctagtatggatggttgcactggcaatcagtgctctaataggtgaaaagtatttttgtgcctttacccttctcttgccgttgacttaattcatgtatcgttttgttctctgttattggttactttctgtggtcatgtctt

SEQ ID NO: 26488 - DNA, 2520 bp, Oryza sativa
  ref <308>: DATABASE ACCESSION NUMBER: AK101930
  ref <309>: DATABASE ENTRY DATE: 2002-08-28
gtgtgttccccccattctctctcccattccccaaatcctccgcggcggcggcgcctcctcctcccatgccttccgagcactagcgcggcagatccgatccgagccccctccgccctatctccgatggactccaaggctgccggctcgtcggagatcgagcgggcgtggtacctcctcaccgtggtcatccgcctcggccggcccgccgccgcctccgacgtcgcgcgcttcgcgaccgccgacgacgtcgagcggctgtgccgcatccccgggtcgccgcttcggctctccgggggcgtcgtggcggcttccgagacggccttcgtggcgttcctgaggtacgtggggttggatgttccgccgccgagggtgagcccgagggcgcccgatgatgtgatgaggtggttgcggaggcgggtgcccgttacgtacgagcgcaagcggaaggcgtcagatgcggggcgcttcgtcgcgaggaagcgtctcctggcggctcccgatgcagatttgccggaacacgagctgcggcagtcgcagcaactgatcgtgcaaagctgtgctccagttgctactggagaggtacatcaggaggctacccaagaattgcaagacaggcttcctagtctcaacatatttactgctcagcgttcctttgaagtttcaattggctctaatgtattttcagacattgaaattagcatgccttctcttccgtccaagattgaccagtttataggaggcaatgatggcagtgttcttgtgagcatggcttctgcactagtgccaaaggaggtgacagacatgtctggctgtatcaatatcttccatgctacagttgacagagagagtactaggattggtgaacctgaaggatcagcttcactttgttgttctagagtagaggaccgtgaggaactagaaaaggagtccaccctccttactatggcagttggcttagctgtgggaaagaaaaatgggattgagcaggatctgaatcttagacctagcagtcctagaaattgtagcacaaaggcaacagatgatatggaaacgttcgatgtgatttcgaaagaagctgaagctctacaatattgcagcccaaatgctcaatacccacagaagatcctaacttgtggtcaggacagtgatgctctagtagttaatgctcatgtggcaattcatgagaataagatagaagacattacattccagcctcctgaaggcaccaaaacagaagctattgtacatgaaatggtccatgaaactatgggaagtttgtgtcaaccttcttcaaacacaaaggttgaacatgcagtgttgccactacaagccccaacttatggttgcattagcaatgagaacttgaacattgctgctgaaaacagagcaagcacacatcaaaatcatgtggagccatcaacacagaacgaagtggctgtcagattatctaagaaagagcaagatagaaagattatgaagcaaagggataagggcaagaaaaaagaagcactgcccaaagaagataaggatcaagttgcagcaaaggttcaaaagggtcatacagaaccaaaaccactgcctaacttcaaaaattttgaaattgaagaagaggaaggttcagggggttacgggactgtttatagggctcgaagaaaatcagatggaagactgtttgccataaaatgtcctcatgcaaatgctcattcacatcatgtttacaatgaacagaagatgttggaacgctttggaggcaagaatttcgtgattaaatatgagtgctctcttaggagtggtgatctagaatgctttgttctagaacatgttgagcacgatagaccagagaatctgagaaaagaaataggtttgtttgatttaaggtggtatgggttttgtctgttcaaagctctggcaagcttacataagcaggggatagtgcatagagatgtcaaacctggaaatttcctgttctcccgtaaactggcaaaggggtatcttattgacttcaacttggcaaatgaccttcaccagaagttctttcgaaacagtaaatctgagacaatctcacgtgggaaggataccatatctcagcctgcactgaagtctaccccagtggttcaggccaaagaaccagttgccgattcaaagcagctccttggatccaagaggaaaagatccaacagaagcccagtgggtagtgcacctaagaatgataataaaagtaggcatggtatccaagctgctgatgtgtctggtgtaacctctgccaaggatcctacaagcacgaaaacatcattagacaggttgaagcagccaatgccctacaaagggcggaaggaattaatgaacttcttgcatgatgcaatgcaaagtcctgacaaaaatacttcgacagcacctgtttcccaaaggaagagggttgctgctcctctcggaaatgtggatcagaagctctttatactcaccccgatgcccctgtgttcgggtggtagtgctattgctggttctggcatgcttaacagc

SEQ ID NO: 26489 - DNA, 1875 bp, Oryza sativa
  ref <308>: DATABASE ACCESSION NUMBER: AK101931
  ref <309>: DATABASE ENTRY DATE: 2002-08-28
ggcggcgcggcggcgacgtccaccgccgcctagggttcgccggggagggcgccgccctcgtcgccgtcgcaggtcgcccgccgccgggtatgccactccgatctgccacccgccagctctccttcgagctcctgggggagggcggcctcgccgcggccgacgacgccgacgacgacctctccccgcgctccttccccgacaccacctccgatgggcagcggcgccggaggcggcgctccaagcgcaagcgcgggctccggagccccccgatcgaggaggaggagaaggaggggacgccgcgccgcggcggcgtcgtcggggtgtcggatctggtgtccgtgtccgtggtggagcgcgagagctccgacgcggagaggtccgcggcgagctgcgtgacgtacgtgggcgtcggggtggagctgcggcagaggagcgtctccgggagcgggagggtggtgtcccgggaggacgcgaccagcagctgcggcagcagcgcgcgggagagcgccgcggcggctgccgcggtgccggaggcggcgcccgcggcgtggcggcctgaggcgaacggtggcgggaagaagctggagaaggaggattcgctagactgggagaggtacatgaaggagaatggcaacgttcttggagaagttgagcgccttgacaactcaccattcagatacttccttggagaactatatggtggaaattcacttagaggcacaatttcagcgggcaatgataagaaacgacagcgggtctacaacactatgtttcatgtgccgtggagatgtgaacggctgattgtcgcaggattctttgtctgcttggattcatttctatctctactcaccattatgcctgcaagaattgccattacagtctggcgggtgcttaaaaccaggcagtttctgaggcctaatgctgctgatttatcagattatggatgctttgtagttctagctttaggagttgcttctttgcaaatgatagatattagtttgatttaccatgtcattcgtggccagggcacaatcaaattatatgttgtatacaacgtgctagagatctttgacaaactctgtcaatcatttggtgaggatgtcttacaagttttgttcaactctgctgagggactgtcaacatgctcgacagataatgcaacatttgagctgatgcggttcattttggatgaggctattgcagttcttgcctttgttgtccattcatttgtcctgttagctcaggcgatcaccctgtcaacatgtattattgcccacaacaatgcactattggctcttttggtgtccaataattttgctgagataaaaagcaatgtatttaagcgtgttagcaaagagaaccttcacaatttggtatactatgacatcattgagaggtttcacatcacatcctttctattgtttgtactagctcagaatatcttagaagcagagggaccatggtttgacagttttcttattaatgcctccttggtatttatgtgtgaagtacttattgatgctatcaagcactctttccttgcaaagttcaatgagataaagccagttgcttattcagagtttttggaagacctatgcaagcagtactcatgcaactttgacacttgaagttgtaattctgaagttattccaactgtccaactctacgagacacctacatgcctgcaaaacaatccaaatatgaaatgacattggttttagaacttttttttgtcagctattcttggacagtttatctttcaacagtatattgactgtctttaccctgatagtaccatttagagaattccatctatatgttagtgacagattcagtttgccgttatgataaatgattggcctgcattgaaaattt

SEQ ID NO: 26490 - DNA, 2167 bp, Oryza sativa
  ref <308>: DATABASE ACCESSION NUMBER: AK101932
  ref <309>: DATABASE ENTRY DATE: 2002-08-28
ttggagacagcaagcctagttcacttcactgatcacaagctcagctaagccaagcactccctagctactactacacgacacgcgtgccatgccggaggcggtagcggccgcggtgtcgccggcggcggcggcggcgacggcgatgtgcgcggagcaccgggagaagctcgagcacatcgagcgcgtgacgaggaacgcggggcaggagcagcgccgcgtgctggaggagatcctggcgcagaacgcgcaggccgagtacctgcgccgcctcggcgtgccgggcgacgcgccgggcgccgacgaggcgttccgccgtctggcgccgctcgtcacgtacgaggacatcctccccgacgtcctccgcatcgccaacggcgacacctcgcccatcctctccggcaagcccgtcagcgagttcctcaccagctccggcacgtcgggtggggagaggaagctgatgccgacgatagaggaggagatggagcggcggtcggggctgtacagcttgctgatgccggtgatgagccggcaggtgcccgggctggacaagggcaaggccatgtacctctacttcgtcaagtcggagtggcgcacgccgggcgggctgccggcgaggcccgtgctgacgagcttctaccggagccgctacttcctcgagcggcctcacgacccgtacacggtgtacacgagccccgacgaggcggtgctgtgcgaggacgcgtaccagagcatgtacgcgcagctcatctgcggcctcgtccaccgcgccgacgtgctccgcgtcggcgcggtgttcgcgtcgggcttcctccgcgcgatccgcttcctggagaagcactggccgagcctgtgccgcgacatccgcgcgggggagctcgacggcggggtcaccgaccccgccgtgcgcggcgccgtcgggagggtgctccgcggcgccgacccggcgctcgccgacgcgatcgaggcggagtgcgcgaggccgtcgtggcagggcatcatccggagggtgtggcccagcaccaagtacatcgacgtcatcgtcaccggcgccatggcgcagtacatcccgacactggagttctacggcggcgggctgccgctcgcctgcaccatgtacgcctcctccgagtgctacttcggcctcaacctcaaccccatgtgcaagcccagcgaggtcgcctacaccctcatcccaacaatgtgctacttcgagttcctccccgtcaactccggcgccaacgacgtcgccgccccggagcccgaccaccgcggcctcgtcgacctcgtcgacgtcaagctcggacacgagtacgagctcgtcgtcaccacctactccggcctgtaccgctaccgcgtgggcgacgtgctgcgcgtggccgggttcaagaacgcggcgcccatgttcgccttcgtgcggcggaagaacgcggccctcagcatcgactccgacaagacggacgaggcggagctgcacgcggcggtgaccgaggcggtgcagcacctggcgccgttcggggcgtcgctggtggagtacacgagctacgccgacacggcgaccaccatcccgggccactacgtgctgttctgggagctcaggtcgccggcgggcgggacgccggtgccggcgtcggtgttcgaggactgctgcctcgccgtcgaggaagggctcaacagcgtgtaccgccagtgccgcgccgccgaccggtcgatcgggccgctggagatccgcgtcgtggcggacggcacgttcgacaagctcatggactacgcgctcagccgcggcgcgtccatcaaccagtacaaggcgccgcgctgcgtgcgcccgggccccgtcgtcgagctgctcgacggcagggtgcaggccacctacttcagccccaagtgccccaaatggtgcgccggcggcaacaagcagtggatcagcagcggcgccgccgcgaagaagacgacgacgacctgtgatagcttggctgtgtgagagagaatttgctagctatggtgattaattaaggagctaattaagcatggatggttgattaatcggttagctaatcaacgagtgttagttcagggtagtagtacgtacgtatgatcatctagctattgggcttttgttttcttttcttttctcctctctcacttttgtaataaagtactaaaattttcc

SEQ ID NO: 26491 - DNA, 1587 bp, Oryza sativa
  ref <308>: DATABASE ACCESSION NUMBER: AK101933
  ref <309>: DATABASE ENTRY DATE: 2002-08-28
gtcacgagggctccttttcttttcgccgctacctgcgcagcgccacattcgcctgcattttccatgagccagtcttccccgcgtttgctctcatcgtaggccgcgaccgacggacgcggcgagaggatagagaccaggggcggccgggcggacggacagagcaaccagcgccggctgccggcttagctagctcgcggcggagcatgccgagatccagggggtccgagctgccgcagcgagcgtcgccgcgggcgccgctgcacctcaagacgacggcctgctcggatgcgaatggcgcgcaccaccgtacagtcgtcgaccggagcagccccaagctcgccgaccgccactcgccgcgcagcccgctgcatgagaagaagcgcgcggggacgcgggtggctgagctggagacgaagctgggcaaggtgcaggacgagctcaagaagctgcgggagcagctcgccaccgccgaggccgccaagaaggacgcgcaggtcgcgctcgaggaggctaagaagcgcgttggcaccaaggggagccccgcttccgccgccgcggcgtctccgcgctccccatctccggttgcggtcgaaacccccaagaagactgagctgcagctgaaggtgacggagccgccggccgaggaggagagcagcataaactcccccgcgacggatgtgttcgaggtcgtccggaccgaatcgggggataaggagaaccagagcgcggccggcgccgaggacggcgaggaggtgagctgtggcataaaggccgctttggctgagaaggaactggaggaggaagagacaaagaagatgatcgaagaggagagcattgacgcaacggccattgactccggcgagaaggagaacccggaggtcgcggaactaaaggccaagctgatggcgaaggacatggaggtcgccatactcacggccgacaatgccgagctcaagaagcaggttggtgaagccgcggaggcggccaagaaagctgaggaggaggcggcggccaaggcgtccttggtcgagcaggacctgaaggagagagcggcgcgggaggcccgcatgggcgagcagctgagggcgtcggaagccgctcgggagacgctggaggccgagatgcggcgcctgcgcgtgcagaccgagcaatggcgaaaggccgcggaggcggccgccgcggtgattggcggggatgcccacttcgtcggccacaatggcaacggctggggctcccccgcgacgatgccggacgactgcgacgacgaggggttcggtggcaagaggaagggagccggtatccggatgcttggcgacctgtggaagaagaaggggagcaagtgaaggtgacatggcatggccaaggcttgtatccgatcactgttcacggtggtgagctgcctcagctcgctggctccagcacccataaacaactagcaccgtcgtttactgcattttggttcggatttcacttatgtttgtatgatcatgagatgatgttcgtgagattaaactatgtttgaagtgccggacagccggagcattacattgactatggagcaaccaagatggtttggtgttttcctgt

SEQ ID NO: 26492 - DNA, 1807 bp, Oryza sativa
  ref <308>: DATABASE ACCESSION NUMBER: AK101934
  ref <309>: DATABASE ENTRY DATE: 2002-08-28
ggcccgtcgccctcgcacagtatgtcggtttcgaacccgaagcctataaattccgcgccaccaccacctcctcctccacaatggaccacaacaccgaccctcctccgaccaccatggtggacgccgcggcggcgctgctgctggagcccaagctggaggggtacgacgacgacggcggcggcgagccgctgcagccggccccgttcgtctctccgctggaccagctgatgcagccgccgcggccgctggaggcgctgctgcaggggccgcagctgccgccgttcctgtccaagacgtacgacctggtgtgcgagccggagctggacggggtcatctcctggggccacgccggcaacagcttcgtcgtctgggacccctccgccttcgcgcgcgacgtgctcccccaccacttcaagcacaacaacttctccagcttcgtccggcagctcaacacctatggttttcgcaaggttcatgctgatagatgggagtttgctcatgaggatttcctacgacatagcaaacatttgttgaagaagattgtccggcgcaggtcctcaccaacacaacaaagtggtcttcagcctggctcttctggtgaatccggtttagaccctgaactcaacacactgagaagggagaagagtgcattgcttcaggaggtgaccaggctgaagcaagagcaccttcagacaattgaacaaatgagcacgctgaatcagaggctagaatcagcggaagatcggcagaaacagatggtctctttcttggccaagctcctccagaacccaactttcctgaggcaacttaagatgcacagacagcaaaaggaaatcgactccaccagagtgaaaaggaaattcctcaagcatgtaccacatggcaacattgactcaggtgagtccagctcacaacacactggagagagcaatttagatttctcccctacgtccctggaccttccagccacgcacagtgacatcttagaccttcagaattttcttttggaagatggggacctcaatcttgccatgctgccagagaacataggacttgatggaatcgaagcaccagacgacatcggggcgttggttcagggatttgacacacaggaggaacttgagcttggtagcggagttgagctactggaaatacctccagcttctggtcctcgtggccaagatcccacgattggcagatccaagggaaagaatgtattgtctccaggattggatgctacctcttctgaagctgattgcctcggatcattttctgacaatatggggatgctttctgactccatgttacaaacagcgggtaaattgatggatgcagatgatgacgagcgaatttggggcgtcgatgcttcgtcggctttacaaagttcttgcagtggcactagtcagcaagcatatggtagtcttgttagtgatccctatctgatggagatggctaataagcctgaaaaattctgggagctcgattttcaggcactggatgatggagatctgcagctggacaagtgtgttatcgatgaccctgctcttcagcaacagagaggaaatatgaattcgtagatcaaacgcagcttgggagagtaggacctgatgttttatctacctaaaaactatagttcactatgaacattgctatagttatttgatattcaggaggcttgttaactcctgaatatgcgcactatggcattaagaagtagcagtagcagcagtagtatggttatgctttttgttttccattcattcaccctgctgtttttgaatggaaattgttgttgtgtggttttctc

SEQ ID NO: 26493 - DNA, 3634 bp, Oryza sativa
  ref <308>: DATABASE ACCESSION NUMBER: AK101935
  ref <309>: DATABASE ENTRY DATE: 2002-08-28
ggctactccgctagtaatcgcaacgcgagcgttcctcaagaacccgacgaacaagcatgaactgcctcaccatccaccgccgccgcgtcgccccttccccaatcccatccaaaattcctccgatccccgccggaatcgaagacaggagccgaccacatcaccaccccggcggcgcatcgatcgcgtatgcgctggatgcggccaaaaaaaaatcccaaaaatcagcacggatcggagagaagttatgagtcatcgtcgtcatcatcatcccatcgcggatgcaagcgcgacaaggggaagcgtgctagggatatctccaccgcggcggcatcagtagcagcatcagcagccgtagcaatgtgaggaatccgtgcgccgttcgatctccactggctcgccttgcagcgttcaagttcaaccatgtctcatttcaagagcggctcaagggtgaagtgcacgatgcttgcagttctgtgcggtaaggtaggcaagcagcggacgccacctggtccagtgcccgagtcccagcggccgcggccgtcattcccattcctggagttgatctcgtccgggaggttggatgtgcacacgctgatcaatcctacggttgatcaatttctggaggcacaacgggctttgcagccccgcttcatatacctccagggacagctgcttgacaatgaggaagaaatcggcgcacttgtttggggcgatgctgatgtttctgatccacagacatttagttcactcatttgttcgccttttcctaccatagtttatttggaagttccaagtggagaaaagattgctcaatctcttcaatcgaaggggatttcatatataatgtattggagatattcattatcatcctatgcggcatctcattttcgccattccttattgtcagttgttcggagctcctgcagccatgcatgggatgcatttcagcttgcatatgcttcttttgaacaatactgtgtaagaaataatgacgtgcaacgtcttatgcttgggcctcatcttcttggggatgctccaaggatatatatcacccctcctggaaacaaaatggctgaggaagaagatacctctgaatactttccagacataaagatatacgatgaagatgtgcacttaaagcttcttatctgtggagcacattgcacccctgattcatctatattgaactcactagaggatggtttgaatgctcttctcaatattgaatttcggtggtgcaaactccaggatagagtcagcgctgctcctcctcttcatgttgattcagctctgttagacggggtggttacaatatgttgtgatatcactacatccagttcttcacacgtgtcactgcttctttctggcagtccacaaacctgttttgatgacgagcttttggagaagcatattaagaaagaacttattgagagccgccggttagttcgtgttgtctcggttagcgaggatgatggaccatcttcagccgagcctttgacttcaatgtccgtggcttctggagcttctacttttgaagtgttgatgaccttacctaagtgggcagcacaggttttgaaatatcttgctcaagaaacgtcttacaaaagcctggttccacttggaattgcttctgtaaatgatactccagtttcttcgttcgataaagaagatgtggatcggcttcttttcttttgcacaaaccaagatgaagatgaagctattggaaatggtctatatcaccatctgccaagatggtctgcatcccttgcgaaggacagagtgaagagaaattttgtgtcaaaaccagctaggtgaaggatacaagggcaacggcaatttgtagttgtgcaaaggtgttgtcagtgctgaatgttgagagaatgcacaactcacttgcacatcaacaagcatcgcaagggcgaggctctatgttgagcgaatccaaatttcggaaagcaaaacaggctgtgcagcccaacttgatgtacctccagggtcagcagcttgagaatgaggaagaaattggtacacttgtctggggcgaggctgatgtatctgatccatagatatttagttcactcactagtccaccttttccgaccatagatgctatgtgatccgctgcggcggcagcattagcatccgcagcagctgtagcaatgtgaggaattggggagatccctgcttccttgcgcagttcgatctccactggctcgagcggcctttgcagggttcaacggttgcggatctgtggtgtttttttgttcaaccatgcctcatttcctgagcagctcaagggtgaagtgcacgatgcttgcagtgctgtgcggtaaggtaggcaagcagcggacgccacctggtccaatgcccgagtcccagcggctgtggccgtcattcccattcccggagttgatctcgtctggaaggatgctagttagttgggctaaattagcagcaattaaatcttgccagaagagcagaaatgttcccgacacattaagccggtgtttgaactgcacacaacgaggaagccagtcctgtggacacaagcaaaagcccaatatacttaccccgtagaaatgttaggcgattttcttagggcttctataagaatttgtgggacacacatatttcccgaaacactttttaccatgcaccctatactttcatctcttttacatgatgctatgtgatctgccgcagcggcggcatcagcatccgcggcagctatagctatgtgatccgtgcaccatttgatctcccgtggcttgagagatgtcacttcagtttcttcattcgatagacaaggcgtggatcggcttcttcttttttgcacgaaccaagatgaagatgaagctattggaaatgatttatattccgatctgccagatggtctgcatcccttgcgaaggacagagtgaagagaagtatagctttcaattaaatgatgactgatactacattaagcttctgtttcaatgcgctgtaggactttatttatgtgacggacatttatactccgtagaaaatgttaggtgattttcttagagcttctataagaatttgtgggacacatatttccccggaacacttcttaccatgcacccgacatccgcaacagccgtagctatgtgatccgtgcaccatttgatctcctgtggcttgagagatggcactctagtttgttcattcaatagacaaggcgtgggtccacttcttttcttttgcacaaaccaagatgaagatgaagatattgaaaatgatttatattccgatctgccaagatggtctgcatcccttgagaaggacagagtgaagggaagtataggttcaaaaccagcgaggcagatcggttacaagggcagcgacaatgtggagtggggcaaaggcggtgtcgatgctaaagttggtgattactcactcgcacatgaacagtatgtcatagcatgggcaaggctcattgtttggcacaatgaactgcatgaaaatttggatgcgatattcaaagaatcgagctgacagtagtcatatgtgagggaatccaaacttgtagtttgatgaacctaacttatttttagtgttgatctgaatgttacttgttggtttattaactgcaaccaaaatttgaatcttg

SEQ ID NO: 26494 - DNA, 3316 bp, Oryza sativa
  ref <308>: DATABASE ACCESSION NUMBER: AK101936
  ref <309>: DATABASE ENTRY DATE: 2002-08-28
gaaatctttagcctgagagagagggagagtgagagaagaagaagggagggtgattgctctgatctggagctggttggggggaaaggagttgggagaatctcatgggagctgtgatgaaatgggggaggagaagctccttgatccgttcttgagccgggaaatttgatctttttaagctgcggggttggggggaaatttggatcttgaggctacccgagcgcgaagcctggtttcttccggtgctccgttgctgcattgccttgttgcccccagatccgagctgccgtgcgagggaaactcggatctttgcttgcgctctccccaaatctgcccaaaatttgggctctggagcaagctgtgttcgtggtagccccccgtgcttcaaatccttttcagaaagttcatttgtttagttgggggttagatatggcagtgatgcggactactttatgaggtgtctcctgccatttttttttagagtagattcgtcagtaatggcggatcttgccatggagtagtagtagtagtagtagtagtagtagtagcagggggttccttcggtgatagcgaagggtgcttagccattaagcggcggcgatgtctctgaagagcattgtgcgggagctgagggagatgagggacggcatcggcagcatgtcgaggcgagccgctgacgggcgcgccggcggcgggcgcggcggctcgcggcattcttggccggtcctgtggtcggagcagcagcagccgccgcagcagcagcagctgcagcgtcaggagcatcagcagcagcaggggcggtgggcgaacctgccgccggagctgctgctggacgtgatccagagggtggaggccagcgaggcgacgtggccggcgcggcggcaggtggtggcgtgcgccgccgtctgccgctcgtggcgcgaggtcaccaaggaggtggtgaagacgctcgaggagtgcggcaggatcaccttccccatctccctcaagcagccggggcctcgtgagcatccagtgcagtgctttgtgaggagggacagggcgacttccacctatctcctctacctggggctcagcccatgtaagttaaatttacatctctgtttttggttgttgacaaaatatatggcttacaaatcttgttctactaccaatttataagagtatcatgtaccatcagtccatcagtattcagtactagtccagttcatctgcatcaagatgtgttgtttctgccatttgcaacagtgaaaaaccagaataagctgtttgaatgagttactaccattgttaattcggtttaccgaaatctgtgtcaggtaatgaattgtgttccttaaggctaaggttaggggaatgcaatctgctatgggtgtttcatatgcatagcaaattttcattatttacacgagcagatgttttctagtgcctgcatgtatatgaagattttgtttgtcctgcctgtctttgagcgctacattatgcaaaaattcaaccgcggaggagtactcagtgacaagaaaagataatgttcgccttttccgatcacatcagctgaactggttgctcctccagatcgagaaggaaaccaactgtgactaataaacatagagcctgtaaaggttgtttcaacgcacttggctacctcattaacacaagtctttgtagcgtagcaaatgtacaagatcctaagctgaacctaaccgttgaacgtgcggtgctttactattttccggaataggttagacaatatgtgcaggcaatccatgatatgcatgccattctgcagattcctattcactctagatgcataaatatctacttctaacccccctatctaccaggctgtgggtgcagtccacaacaaacttggtacgtatgctgtttagtacttcctctgtcccaaaatataagaacctaggatcgtgtccagattcgtagtactaggaaatgtctcatccgattcgaagttcttatattttgggacggagggagtaggatgtattataagggctaaatagctcatctcctgttttgaaaatttgaatagagctaatatggaactcagaatacggacaattaatgttgactacatcactaactattattctatttatgaatgcagctctacatggagaaaacgacaagcttttgcttgcagcacgcaagattaggcgtgcgaccaggacttcttttgtgatctcactggtctccaatgacttctctctatccagtagcacctatgttggtaaactgaagtaagcactttataatgttgactttaagtaatttggttattctcttacttctagaaagctcactcaaatttattcccctgtatcagaccaaacttccttggcacaaagtttacaatctttgacagccagcctccttgcgatgctgtagtgttgccaaacaaccgaccaagcaaacgacatttcaagcaagtatcaccgcgattgccactaggcaattacaatgttgctacggtctcatatgagctcactgtcctacgtaatcgaggaccaaggagaatgcaatgcaccatgcactctataccggcattgtgtattcaggaaggtgggaaggccccaacccctgccggcatcatccactcacttgacgaacaagttcccgccttatcaactagcaaaggaaaggaaccagccatagaattttcatcgacaagcctcagcgctgatttgtctggaccggtctgtacaaatgaagtgcctcttgttctgaagaacaaagctccccgctggcatgagcagctgcagtgctggtgcctcaacttccgagggcgtgttacagtagcatcagtcaagaacttccagctcgttgcctcagttgatccttcccttggtatccctgcggcagagcaggagaaggtcatcctccaatttgggaaaatcggaaaggatatattcacaatggattataggtacccgctctcggcgttccaggcatttgcgatctgcctgactagctttgacaccaaaccggcgtgcgaataactgaagaaaggtatcaaacctgtgtcttctctctatttagctcaggcagcgtctgattccgttggatgctgtaaaattctcggtcttgctatgccaaaatgagcctactcctgggggagacagtagctttgtcagatcaagatgaacaatggcatctatatcttggcaactggcaaaaccccaggaaagatttgagtgacaatgctgtaaccaacaaactgctattgtactattgttcttggaatgtttagcggtgaaatatcactgcgctatggataatatggacgctgttcatcgtgccc

SEQ ID NO: 26495 - DNA, 2151 bp, Oryza sativa
  ref <308>: DATABASE ACCESSION NUMBER: AK101937
  ref <309>: DATABASE ENTRY DATE: 2002-08-28
ggttccaaaaccacctcgcgtggcctcctccgtcccctcgccggcagtagcctcctcctccgttcatccaccacaggcgaccgcccggccgccagcctgccgcctcgaagcctaggaggttctctcgtgcgcgccccccctccgctccgccggttcgttctggtggagtggacttggcgtggcggtggagtggggggatccatcgggggcttgcagtgattcccttcttccttcggctttcctagcgcctccgccggcctagccgaccgcctcgagagccgccgcacacctccgcttcgcgccgccggcccccgcaaggagcccccgcaccgccgacctcgggaacccgccgcctcgcgcacctgggtggattggagtacttcaaatgacaagggtcatccatgactctggagaaggcatgcagaaggaggcacttgctatggtatcttctgatgttaacttccccaagggccattttccagactacaagattgggccaaacaaccaaatcattgatccagaagagatacatgaggctgtacctttgaaggagatcgttgcgaaggaaacagcacagctgctagagcagcgaaggcggctttcagtgcgtgacctgaaggagaagtttgagaagggtctatcaggtgcctcaaaactgtctgaagaggctaagcgccgagaagcagcttcgttggacaggcaggttcttctgaagaagcttagagatgttttagacactctgaaaggccgtgtggctggtagaaatagagacgatgctgatgaagctatttcactggtggaagcattagcagtccagctgacccaaagagaaggggagttaatatatgaaaaggctgaagtaaagaagttagctagcttcctcaagcaggctactgaagatgcccggaaggtggcagaggaggaaagggctcttgcattagcggaaattgagaaggccagaactgcaattgctatagtcgagaaaggattgcaggagcatgatgcagcatcaagtagcagggaaaaggaggagatagagggactcaggaaagaggtccgtgaggctagaagaataaaaatgctacaccagccaagcaaggtaatggacatggaatttgagcttaaggcactgcgaactctcattgcagagaaaaatcagctttgcaatcagctaatgaaagagcttgcaatgatcaagaggctagaagaagatagctctgacctctatgatcttgaaggttctgatatccttggatcacagttttgtattatccctcgatttgatgatgctccagacatcagcagctgtccaactcaatggtaccgtgtaatttctggaggcaatagaaatcttatattgggagcaacaaaacctacatatgctccagaaccatttgatgttggccgactgttacaggcagagatagttttaaatgcagagaaagttacgatacaaacaatgggacctataaatcctgctgccggactggaacattatgtggagtctctaatgaaaagagcagatgtggagtttaatgtggttgtcacccaaatgaatgggaatgattactcatcgaactctgtccatgcatttcatatcggaaaaatgagaataaagcttcgaaaaggatggtctacaaaagcaagagagtcatactcgaccacaatgaagttgtgtgggagccgtggtgggggtaatgctgcagctacggcagttttctggcaggcaaggaaaggcctgtcctacaccttagcttttgaaacggacagggataggaacgcagcaatcatgcttgctcgtaaatttgcctcaaattgcaatattacgctcactggtccaggtgatgaagttcatgctggtagctgaatttacagtgttcacggtgtgacagcaggagtatacatgtaggctgtgaattgtgtactgtgtcagtttgtgttttcgagagtagaggttgtacactaggctttcctctttcagcatacattctcaaggcaattctttttatttgcctgccagcagctgtttgtggtgttcgtcaaacatgctgtgcaaaatgatgattattcttgagcattatatctattaacgttcgaaaagtgatagtttgcttagaaggagcttcccttgaataatcaagaaatgtacat

SEQ ID NO: 26496 - DNA, 1496 bp, Oryza sativa
  ref <308>: DATABASE ACCESSION NUMBER: AK101938
  ref <309>: DATABASE ENTRY DATE: 2002-08-28
gggttctggtccatgtttgcttctcagaattttgcttataattttgatttttctcgtcttgatctattgttagattgactctgatgtacagttagctcgggaatactgaagctacgattgcggggcagtaattcaaaattgctctttgaaatgtgctacggtaccaaattcaaaaatcaaacttgagatcattggcttgcccacttgaaacaggaattggatggatttcccaacaatgcatcattttctgttttttgcttctgaatttatgcctttattctgcatcgtggattactctttaaattgtttgtatggatcctccaaagaacggttagttcatcaccgtttttgttctttgatcttgcagacttggcatttgtagagtttttagatttatagatagcaaagatgtcggcacaggcggagctttcccgtgaggagaatgtgtacatggccaagctcgctgagcaagccgagaggtacgaggagatggtcgaattcatggagaaggtggccaagacggttgactctgaggagctcaccgtggaggagcgcaacctcctgtctgttgcatacaagaatgtgattggagcccgccgtgcgtcatggcgcattatctcctccattgagcagaaggaggaaagccgtggtaacgaggaccgtgtcacactcatcaaggactaccgtggcaagatcgagactgagctcaccaagatttgcgacggcattctcaagctgcttgaatcccaccttgtcccctcttccactgcccctgagtccaaggtcttctacctcaaaatgaagggtgactactacaggtaccttgccgaatttaagaccggggctgagaggaaggatgctgctgagaataccatggtggcatacaaggctgctcaggacattgctttggctgagctgcctcctactcatccaattaggcttgggctagctcttaacttctcagtgttctactatgagatcctcaactcgcctgatcgtgcttgcaacctcgcaaagcaggcttttgatgaggccatctcggagctggacaccctgagcgaggagtcctacaaggacagcactttgatcatgcaactcctccgtgataacctgaccctgtggacttcagacatctcggaggacaccgcggaagagatcagggaagctccgaagcgcgactccagcgaggggcagtaaagccggctttatgtgccctagaagcttgtagctagtgctttgctactgtgtaatgacacctatgtggctgtgattgttgtcgggaaatctggggctcccccgtatgtgaggttgctagcgatggttttgcagtctcgcctttaagctactcgtagcagagcaggtgggggtctgtggagccaggcctggttgggggtgggggagcctcttgaactgcttggtggcacttcctgtttttctgtttgcctttttattggtgtttattgttatggtcaatcctgtgtctatatcttggtccc

SEQ ID NO: 26497 - DNA, 1631 bp, Oryza sativa
  ref <308>: DATABASE ACCESSION NUMBER: AK101939
  ref <309>: DATABASE ENTRY DATE: 2002-08-28
ggggcagtttcgactttttggagaggagagggtggggaggcgtgagcgcgagggaaggggagggggtttctcgatttcttccgcgcggttgcggaatcgcgaattcaattcgattccgctccaccaccaccacctcgcgccgcccagctgctccgattcgcgctgcggagcttccctttttccacccgctgatcgattgattcgttgttttttgggggggatttttttctggtgtgtgtgtttttttttcccgatcggatcggtccagatcgggtcgatttgggcggggtggaggaggtggagggaagggggagatgcggatcgaggagcttccgggtgattccggcggaggaggtggggatggtggtggtggtggtggcggcggggcgctgctgcagctgcgtcgtggggcggcggcggcggcggcggcggtggaggaggagggtggggtggtgatgcgtgtggctttcgacgcgaagcgcgcggcggtgggcgtcggcgcgcggatgctgttctacccgacgctggtgtacaacgtcgtcaggaaccgattcgagccgcaattccactggtgggatcaggtcgacgagcatgttctgctcggtgctgttcctttccccagcgatgttctacggctgaaggagcttggagtttgcggtgttgtgacactgaatgaatcctacgagaggctggttcccaggtgcctgtatgaggctcatggaattgaaaacctggtgttaccaactagagattatctttatgcaccatcatttgagaacctttgccgggctgctgacttcatccacagaaatgctttgtgtgggaagttgacatatgttcactgcaaagctggacgtggacggagcacaacagttgttctttgctacttggtgcaatacaaacaaatgactccggctgaagcttatgaacatgttcgcttgcgcaggccaagggtgctattagcttctgcacagcggcaggctgttgagcaattctaccagcttagggtgaagaaatttgggaaatccatttgcctggacagcccaataatgaaaccaccgctgttccttgccactcgcaacctcattgcatttgacgagaagacattcgtcatggtttccaaatcggacctcgaagggtatgatgcggataccttggccgttaacgtgggcagtggctttgtgggagataagcctagtataccgcgtgcagtttgcgagccaggcggcctttgcagggttctcatacctgtgggtacgatgccgtgccccccgtaagaacaaggaggcactccctgtccctgagagtaacaatagcgtggggagcgagagctgctcccttgaggcagagcaactcgccaaacctcacccatgtttgcttcaaggtgtcatggttaatccatgatcgttcgacttgcattcgccgcgacctttcttttaactttttgtctggcatgtcatccgtatatattaaagccaagaacatgcaaatgcaatgtgaagtccttaactccagtctcctcagcaagcaaagagtgcagttgcttgggtatgtacatatctgtaataagttgacttctacatgtacagaggtaaatgacaaggtatctcaaatcgctgaccatgtgtccc

SEQ ID NO: 26498 - DNA, 1156 bp, Oryza sativa
  ref <308>: DATABASE ACCESSION NUMBER: AK101940
  ref <309>: DATABASE ENTRY DATE: 2002-08-28
gtcaggccaaaacactgcaacatttcagacttcacagttcacagtgagttcagaccaagaacacaagaataccaaaaagaacagcaccaagaactctcctccaatccatcacagacatttttcttccctccaagagaggcattgatcatcagagagtagagccagggcgtgtgtgtgtgtgatgagctcagtgctgctgttcttgcttctgctgctgctttctggagtgagcttgagtggctgcataaggcttggcaatggcgggtatgaggagtggaggatgggctcggcgacctacatcaaggagtccctggggcacccgctgaatgatggtggtggagcctgtgggtacggcgacctggacatcttcaggtacgggaggtacaccgccggcgtgagcggcgcgctgttcgggcgcggcagcgcgtgcggcggctgctacgaggtgcggtgcgtgaaccacgtgctgtggtgcctccgcggcagcccgacggtggtggtgacggccaccgacttctgcgcgcccaacctcggactctccgacgactacggcggctggtgcaacttccccaaggagcacttcgagatgtcggaggccgcgttcctccgcgtcgccaaggccaaggccgacattgtgccggtgcagttccggagggtgagctgtgacagggcaggggggatgaggttcaccatcaccggcggcgccagcttcctgcaggtgctgatcacgaacgtggcggcggacggggaggtggcggcggtgaaggtgaaagggtcgaggaccgggtggatcccgatggggaggaactggggccagaactggcagtgcgacgccgacctccgcggccagccgctgtcgttcgaggtcaccggcgggaggggccgcacggtcgtcgcctacagcgtcgcgccgccggactggatgttcgcgcagaccttcgaaggcaagcagttcgtcgagtaggtgtcgacgatgtgggtgtcattcttggaatgattgtaattattatggttataattatattatacaggtgaaaaacaactgttttggtttggttttggtttggatgttgttgtttgatctgctcagcatggcaaacgaaattattatagagttaatcagttaatgaaggattgacaaaaaaaatgtttggct

SEQ ID NO: 26499 - DNA, 1762 bp, Oryza sativa
  ref <308>: DATABASE ACCESSION NUMBER: AK101941
  ref <309>: DATABASE ENTRY DATE: 2002-08-28
ggtttcctattttcctcttcccctcgcatcgcagcacagcggtaggcatttcgcttccattgcttctcctcctcctccgccgccgccgccgctgctgctcgtcttccctctcccgacccgccacccgcctcctcgccggtttgattttttttttctttttgttcacccggccgggcggggcgagcttgcgctctcttttcttccttcctttttcttggattctatttcggctttggttgttcggtcggggggggggggggggcgcaagaatcggagtaggaggtcatggtggttagggaaaagcaaggtggccggatggggaaggggaaggggaaggggaaggagaaggagtgcgacattaactgcttcgggaggagcttcttccgtgtgcttctcaccctgcaatctctggagcggatgaaaatcccatcatcattcaaccaatgccttcagaatcaacctactgggatggtttctctggttgatcgaagtggaaataaatggagtgcagagctgacttcagactctgagggattcttctttgtgcatggatggaaagaatttgtcagagataactcaattcagtgtggtcaatttttagtattcacttatgataaacggtcacaattctcagtgacagtctttgaaccttcaggcattgacaagatatcaactttctctgctcacccttccaaaaatgtgatcattaaaacagaaagtgatgaagggggcatggtcaccgcagctatcacaacagagaaaatggctcccgccctgaaggaaaataatggaatcacaggaaagagaactagagatgtagattaccttatggaagatagggtggttgtatttaagaagtcatctgaggctaatgtttgcgaaagttctaggagaaaacgtgcaggagcttctgctggcaagtccaaggtaacatcgacaagccataacagtaccagaggttcatcatgcagctcagatgaagataattcttctagcaagtcaccaaatccaccattcctgatgcgctttctgtctggtgaggtgtctcggcgtggtagatgtgtttcaaagggtcaaagacaactaacagtaatatcacagaggcgtccggtaactgaagcagagaaggaccatgctcttcaaagggcaagagagtttaaatctaagaatccttttgccgtgcaaataatgatggagtcatatgtctatgttggatttttcatgaatatcccatgtgaatttgtccgtgagtgtcttccccataccaacaaaaggatcacactctgggatccacaagggaaggcttgggaagttaactatgtctactacagtgatcgttctgttggttctttcagtggtggctggggcaaatttgctgttggcaacaatctggagaagtttgatgtgtgtgtcttcgagcttgtccagaaggataacataaaagtgcacatctacagagttgtcccagaaattactccgcacaaactccgttctgacccgaagtaacattgctatgtcggcatgttggaggcttcaattccattgatctgaggctgtagttggcagttaaaaaactatttatatgttggtttctataaaaaaaaacaaaataagtgcctagttcataagtgaactattgttccggttgggttgttgaatgactagtttagacctggttgtattggttaaggagtgtactattgttgcggacgtgcagccattgtaatgctaaaatgtaacttgcatttttttttgtggctgt

SEQ ID NO: 26500 - DNA, 2127 bp, Oryza sativa
  ref <308>: DATABASE ACCESSION NUMBER: AK101942
  ref <309>: DATABASE ENTRY DATE: 2002-08-28
gagcctctgctctgctctgctctactacagccacctctctctctctctagtttctctctctagccccctccctcctcctcctcctcccccactagcgcagagcccaatgcggaacaaaccctagtagtgcccccccccccaccaccgggtcccctcctgatctcgcgcggcggccatgggtaactgctgccggtcgccggcggccgccgcgagggaggatgtgaagacatcgcacttccccgcctctaccggaggcgggaagaagaagccgcaccaggcgcggaacgggggaggcggaggtggtggtggaggagggggaggctgggagaagaagcggctgtcggtgctcggggaggaagggagcgaggtgaacggcgggatcgaggagaagtacgcgctggacagggagctggggcgcggcgagttcggggtgacgtacctgtgcatggaccggtgctcgcgggagctcctcgcgtgcaagtcgatctcgaagcggaagctgcggacgcccgtggacgtggaggacgtgcggcgggaggtggccatcatgcggcacctgcccaggagcgccagcatcgtgtcgctgcgggaggcgtgcgaggacgacggcgccgtgcacctcgtcatggagctgtgcgagggaggggagctgttcgaccgcatcgtcgccaggggccactacacggagcgcgcggcggcggcggtcacgcgcaccatcgtcgaggtcgtgcagctctgccaccgccacggcgtgatccaccgggacctcaagcccgagaacttcctcttcgccaacaagaaggagaattccccactcaaggccatcgacttcggcctctccatcttcttcaagcctggtgaaaaattttctgaaattgtgggaagtccatattacatggctcctgaagtgctgaagagaaactatggacctgaaatagacatatggagtgctggtgtcatcttgtatattttgttatgtggagttcctcctttttgggctgagactgaacaaggagtggcacaagctatacttcgtggaaatatagattttaagcgagaaccatggcccaatgtttctgataatgctaaagatctagttcgtcagatgcttcagcctgacccaaaactcaggctaacagcaaagcaagttcttgagcatacctggcttcaaaatgctaagaaagctccaaatgttccacttggagatattgtaaagtcaaggctgaaacagttttcaaggatgaatagattcaaaagaagagctctaagggttattgctgatcacttatcagccgaagaggttgaggacataaaggacatgttcaaggtgatggatacagataatgatggtatagtctcttatgaagagttaaagagtggaatcgcaaaatttggttcccatcttgcagaatctgaagtgcaaatgcttattgaagctgtggatacaaatggtaggggagcactagattatggtgaatttttggccgtttcacttcacttacaaaggatgacaaatggcgagcacctccggcgggccttcctatttttcgacaaggatggcaatggctatattgagcccgaggagcttcaggaggctctggtggaggatggggcaactgatatcatggaagtggtgaaggacatattgcaagaggttgacactgacaaggatggcaaaattagctatgaagaattcgtagcaatgatgaagactggcacagattggagaaaggcgtcacggcattattcaagaggacgtttcaacagccttagcataaggcttataaaggatggatctgtaaaattgggcaacgagtgaagttgcaaacttgcagctggtgttgccctttactactcatctgcgcatgtaagtctggcccttggacccactaagcagagaccttctccttttctaatgattattttggtggttttagataggcagagccccccccccccctgattggcttactcatgtaagtagttttcctggtatctctgatgaggagcacgcactgaatgctgcaccaatagctgtgcacagtgcacttgcttgatatctccttcactgtacccatgcttgttgtacaatattttgttgttccactcaatgcacttcgttgatct

SEQ ID NO: 26501 - DNA, 2669 bp, Oryza sativa
  ref <308>: DATABASE ACCESSION NUMBER: AK101943
  ref <309>: DATABASE ENTRY DATE: 2002-08-28
gaaggcaggagaggggaagggggatgagcagctcggcgtggtgaggtgagccgagaggtggggcggtggctgctgcattgcattgggcgggagagatcgatcgatcgctcgccggcgctggggctgggatctcgcggcgctcgagggcgctgaggaggagctctgtggctgctgcggcttcttggtcaggcgccggcgttgtgcccattgggctggggtcaagctcgccgtgatctggggatttggatctccgaggcgcgttgcccgttcgctgtcgggagccgccggggcgggtggtgggtggaaggctccattgcggcagttcggtgggcggctgctgattgggggcagccgggtgggagatctggccgtcggcggggagctgcagatcccctgcctactgcgcgtccacgcttcgctgccgtggagattcttgaggaggttggtggtggggatggggatggtcggagcctacgcggatcccttcctgcctccgaagatggccttgtcggcgtacgccgcgccgatgggggagtatggccagccgcagccgcagccggcgccgcgcccgccggcctgcccgtactcgtcttcctcctcctcgccgccgccggtctccgcgtcgtaccattcttggcctccggcgacgtcagcttcgccggtgagtagcccacctccggtctcctctccgccagagtcgtttccgtcatcgccgccgccggcattgtcgccgccgccgccggacgctcctcccccatcgctcccgccgtctccgccgccgtccccacccccgtcgccgccccatgtggaggtgcaagcgccgccgccgccgatgacaactgaccagccgcacgtccagccccgcgtgtacacatcacccccgccgccgtctctccccccacctccgcctcagaccttctcgccgccatcgccacctccatttcacccaccgtcgtcgtcgcccgctccagctccagtgcctgctgctgtagtctatccgcctcctcccccaccaagaatcgcctctccaccgccgccgcgtaatcacatcaagccacattacgtgccgcggtcatctgcgaggtcgcattcgaattcgacccgcgcatcaagtggcgccggcaagaacatcgagatatcgagggaggcagccaccacaattgtagcacttgccgggcttgccatgctcagctttgtcggcgctacaatttggttcgtcaagaagaagcgccggcggatagagcctcctgcatcactgccgacgcagcagccagctccgccgccaccgccaaactactttccctcttccggtggatcctcgctaacgtcagatgcatttttcatatcacctggatatcatccggtcaggttgttcagtgcggggagccatgggtatccatattcaccagctgattctgccattgggtactctaggatgctattcaccccagaaaatttggcagaattcacaaatggctttgcagagcaaaaccttttgggagaaggtggatttgggtgtgtttacaagggcatcttgccagacaatcgccttgtggctgtcaagaagctcaaaattgggaatgggcaaggagaacgtgagttcaaggccgaagttgatactatcagcagagtacatcatagacatttggtttcactagtaggctactgcatagcagatggccagcggatgcttgtttatgattttgttccaaacaatacgctttattaccatctccatgtaagtgaagcggcagttcttgattggcgaacaagggttaagatttcggccggagcagcccgtggaattgcttatctgcatgaagactgtcatcctcggattatacatagagatattaaatcatccaatattttattggatgacaacttcgaagctcaggtttctgattttggacttgcaaggctagcagctgactccaatacgcatgtcacgacacgtgtcatgggtacatttgggtatttggctccagagtatgcgttgtctggcaagttgactgcaaaatctgatgtatattcttttggagtcgttcttttggagcttattacaggaagaaaacctgttgatgcttcccagccactgggagatgagagccttgttgagtgggctcggccccttctcctcaaggcaattgaacatcgagaatttggtgacctccctgatccaaggatggaaaacaggtttgatgaaaatgagatgtatcatatgataggagctgcagctgcatgcattcgtcattctgcagcaatgagaccgcggatggggcaggtggttagagcactagatagtttagcagactctaacttgaacaatggccttcaacctggccgcagtgaagtattcttagaaccacagtccgaagaaattagattgttccagctgagagaattcggcagccgagattgtagtgacgagatgagccaagctagctggagaagccgaagagatttgtaaacatgttcagcacaagatcattaacaattttttggccattctttacatgtaattatctcttttacatgatttttttcccctctgaggcaattcatgtttctccatggaataaaattttgcattctttgaggagataagtaaatcattccttcccttttcagtgaagagtatacagatgtttgattcttggcattcgccg

SEQ ID NO: 26502 - DNA, 2603 bp, Oryza sativa
  ref <308>: DATABASE ACCESSION NUMBER: AK101944
  ref <309>: DATABASE ENTRY DATE: 2002-08-28
tggggagacagagagactgaactgagctcaagccgctccgggatctccatcttgagttatccaagaactgagagtgctcccggctcctacatttgccctctttgggcaccaataattggaggagcaggctgtggattcttgatttcttggtggctggaatcctttcaattacagacaagttgcaggttgcttcaggttcttgaaattgtaatttggttggttgcctgcggtccctacttcctggagctttgcttatttctaagaatcttttaatgctcaaaactgcttcaatttcattattttgggagagtaatcacctcagtggttgagcgctggtgatgctaaagttggatgatggaggtagctgataagattgtggagccaaagggccctttggtggccactgctcagctgccaaataatgtagagttgctcaaatcagttgtgctgaatccatcaagggaagggggaagctcacaagagcagtatgagaaggatctgttggcagaaggtgaggagagttttcggagcgaggagtcatctgacgagggtggccggagttcattctccggggtgagccaccctccggagccaattgatgtggatcttatgagcacggtgtatgtcgcgatcgacgaggagaagcctgagccacccgagtgcttgatgcgaggcctatcggtcaaaggagcatctatggaggacctctcagtccatgccatggatgcaaagccggatgtgattgtttgcacagttaatgtcaatggtttggttgaagagaggaaggtgcactgtgctgtggtagcaccagatgctgttgaagccgtatcctcaactcaggcctcggaggagaaggattgcgtctgggatgcctccttccctcccagtggcaatgtcagcccacacagtagcagtgacagcactggtgcggtcgctgccacaagcatcaggggaagatccacaagcacatgtagaagtggagttctaactagtgaatccatccttaccgtggagaagacatgtgagagcgcaaaggatagcacccgaggcaactcaatggaaagcacaaagaccagcatgagtcgagcgagtgatagtagtggcgttagcgatgacagcaactggagtaacatcacaggaagtgctaacaagcctcacaagggcaatgatcctagatggagggctattctagctgtccggggtcggggcaatgtccttgggatgagccattttagattgctcaagcgtcttggctgtggtgacattggcagcgtctacctctcagagttgagtgggacaaggtgctactttgcgatgaaagtaatggacaaggcgtccttagcaagccgaaagaagttgaacagagctcaaactgaaagggaaattctgcagcttttggatcacccattccttccaactctgtacacacactttgagactgacaggttctcatgtctggtcatggaattctgtccgggtggtgatctgcacactctgcggcaacggcagccacgaaagcatttctctgaatatgcagcaaggttttatgccgctgaggtgctcctagctctggagtacctgcacatgctgggcgtcgtctaccgggacctgaagccggagaacgtcctggtgcgcgatgacggccacatcatgctctccgacttcgacctctctctgcggtgcgcggtgtcgccgacgctcatcagagcgtcggcgtccgactccgatcccaggagagccggcggttcgttctgcgtgcagcctgcttgcatggagccttcttcggtgtgcatccagccggcgtgcttcatgcccaagctgttcggccagaggagcaagaagcagggccggaggccgaggtccgagttggggcagggcggtggcgccgccctgccggagctcgtcgccgagccgacgtcggcgcggtcaatgtccttcgtggggacgcacgagtacctggcgccggagatcatcaagggggaaggccacggcagcgccgtggactggtggacgttcggcatcttcctccacgagctcctctacggcaagacgccgttcaaggggtcgggcaaccgcgccacgctgttcaacgtggtcgggcagcagctgcggttcccggagtcgccgtcgacgagctacgccgggagggacctcatcaggggcctcctggtgaaagagccgcagcagcggctcggcgtgaagcgtggcgccgccgagatcaagcagcaccccttcttcgagggcgtcaactgggcgctcatccggtgcagcacgcctcccgaggtgcccaggcatgtcgaggccgagctgccggccaagtacggcgtggccgagccggtggcgagcggcggcggaggcggcaagagggtggtcggcgccgaggtcaggtccggcgggaaatacctcgacttcgaattcttttagattatgaatgagttgctgaatgcccagtctcactagtgtgtgcattttaggtgtggtgtctcattgtagttttgcatgcagtgttccttcctggatcaatgtaaccagtgttagatttagcgcgattttagtgcgcaatgtatccaacactctggaacccagggaaagaaataaatcag

SEQ ID NO: 26503 - DNA, 2219 bp, Oryza sativa
  ref <308>: DATABASE ACCESSION NUMBER: AK101945
  ref <309>: DATABASE ENTRY DATE: 2002-08-28
gttgcatataccaccaccacctcccccgtcctcctctcctccaccgcaaccgcaaccacggccagccacgggccaagcgagtcacgactggcacaacgaggcaaaaacaccattgctacccccgaggcgtccctctcagctagccctggcacccgcaccacctagcggcggcgccgtcgtgttcgtgtcggccaagtcgtcaagaagctagctagtcattgccagtgggcgcattgtgctaggggatggcgagaggaggaggaggaggagaggaggcggcggaggaggagagggaggtgagcgaggcgctgacggcggactcgtcggccgacgaggagtgccgccgcgggagcagcagctccagcgcaagctccggggacgcctccagcgagtcctactgcccgcccgacgagtggcagaaggtggccatcaagacctgcgtgtcgtccgacctcgtcgtcgtctcggccgagccggccaaggagaagaagccgccgccgccgccgtcgtcgccgcgtgtcgacgccgccccggcggacaagcaccaccggccctcagagatggagatgatgaaggagaggttcgcgaagctgctgctcggcgaggacatgtccggcggcggcaagggcgtctgcaccgcgctcgccatctccaacgccatcaccaacctctgcgcgacgatatttgggcagctgtggaggctggagccgctgctgccggagaaaaagacgatgtggcggcgcgagatggactggctgctctgcgtcagcgaccacatcgtcgagctagtccccacatggcagacattccccgacgggagtaagcttgagatcatgacaagcaggccacggtctgatctctacatcaatctgcccgcactccgaaagctagaccacatgctcctcgaaattctggagagcttcagggacccggaattctggtacgtcgaccaggggatttgcccgccggaccgcgacggcagcgcccccttcatgctaacgttccaccgccgcgacgagaagtggtggctgcccgtgccccgcgtccctcccggcggcgtcggcgagaccacgaggaggcagctcgagcacaagcgcgactgcgccagccagatcttcaaggccgccatggccatcaacagcaacgccctcgccgaaatggacgtccccgactcttacctcgactcgttacccaagaacgggcgtgcgacgctgggcgacatcatatacaggtacatcacgtcggaccagttctcgccggactgcctgctcgactgcctcgacctgtcgtcggagtaccaggcgctggagatcgccaaccgcgtcgaggcctccatctacgtgtggcgccggaggggcacgtcgggcgccgcgagccgcgccggaaacaagtcgtcatggggcatcgtcaaggacatgatcatggacacggagaagagagacgacctcctcgccgaccgcgccgagggcctcctcatgtgcctcaagcagaggttccccggactgacgcagaccagcctggacacgagcaagattcagtacaacaaggatgtggggaaatcgattctggagagctactcgagggttctggagagcctggcgtcgaacatcatcgcgcggatcgacgacctgctgtacgtcgacgagcggagcaggcaggcggagctgcttccaaccgcgggcgccgggagcggcaagatctcttgcatgccggccatgtcggcgtcgtcggtgccggcgtacccggtggtgtccacctcgggcaccccgccgccgtacgcgacggcgtacgccacgccgagcttctcgccggcgcagctgtcgagcccatccaacatcgggagggcactgctggtcgaccggcggtcgcacgacggccgagcgttcgacggcagcatggagttcatggggatggcggtcagcaacgccgtgttcgacctaccgggcctgtgaatcgatcgatcacgggccccgtgtctagtgctttacttaccctcgcctgtgtgcagtagttgtaatgttgtatggcgtgatttcttctcgggagggcggcctgtttttgccgtttcgccgtttcgccgccctccagttttatgatgtgttttgacagtgcctttgttaacttgctagtgttgtaagagtgcttaagttcgatgttggtcggatggcaaaagagaaccatcgcgtttgtgcaaaccacagagttttcttggctgtttt

SEQ ID NO: 26504 - DNA, 2553 bp, Oryza sativa
  ref <308>: DATABASE ACCESSION NUMBER: AK101946
  ref <309>: DATABASE ENTRY DATE: 2002-08-28
gagcacgctcctctcctctcttccccaacgactccgctcgcgacgacgcggcggcggcttgcccccaaacctacctccccgagttcccgaccaggagacgagaaaatcggggggagaagaagaagaagaagagcagaggagagaaaccactccagcgagatcctactcctcccccgccctgcgccgctcgctcccacgcttgctcagatatttaataacaagaagccggattctgcttcgccataaatgagggagagggatgtctgctgggagtactgtgacaagatggaagggaacaaggtcaggtgcaggttctgctacaaggtcctaaatggtggtataagcagactcaagttccatctgtctcaaatctcaagcaaaggcgtcaatccttgcaccaaggtgaagccggatgtcgtagaaaaggtgaaggctgtcatagcagcgaaagaagagcacagagagacacaggttctcaagaggcaacgtgacactgaattgtcggtgcgtccaagaagaatacgggaccttccctctcagcctacatctccagagcgagctacttctcctgctattacttcaacctctgaccagacacagttccttgcgttggaagtatctactccagtactgaagctatcatctgtgacaaacaaggctcgctcagcaccacaatcggaagccgaacgatgcatagctgaattcttttttgagaataagttggactacaatattgcagactctgtttcataccggcacatgatggaggcacttggtggacagggattccgagggccgtcagccgaggttttgaagacaaagtggttgcacaagctcaagtcagaggttttgcagaaaaccaaagagattgaaaaggattgggcgacaacaggctgcactatattagctgattcatggactgataacaaatcaaaagctctcatcaacttttctgtatcatccccattagggacattcttcctgaaaacagtggatgcttctccacacatcaaaagtcaccagttgtacgaactctttgatgatgtgattcgggaagttggtccagacaatgtggtgcaaataatcactgatcggaatataaactacggcagtgtagacaagctgatcatgcagaattataacaccattttttggtctccatgtgcgtcttcttgtgtaaactcaatgttggatgacttctccaagattgattgggtgaaccgatgcatctgtcaagcccaaaccataacacgatttgtctacaacaacaagtgggttcttgatcttatgagaaagtgcatagctgggcaggagcttgtttgttcaggaattacaaagtgtgtgtcggattttctcacactgcaatcattgttgaggcacagaccaaagctaaagcaaatgtttcacagctctgactatgcatcttcttcgtatgcaaacaggtctttaagcagttcatgtgttgagatccttgatgacgatgagttttggagagcagtcgaagagatagctgctgtttctgaacctctattgagggtcatgagggatgtcttaggaggcaaggctgctattggttatatatatgagtctatgacaaaagtgatggactctattagaacatactacataatggatgaaggaaaatgcaagtcatttctggatatcgtcgagcaaaagtggcaggtggaattgcattcacctcttcattcagcagctgcttttctgaacccaagcattcagtataatccagaagtcaaatttttcactagtattaaggaggagttctaccatgttctggataaagtgcttacagtccctgaccaaaggcaaggtatcacagtggagctgcatgcttttcgaaaggcacaagggatgtttggctctaacattgcaaaagaggcccgtaacaacacctccccagggatgtggtgggaacaatatggtgattcagctccatcacttcaacatgctgctgtcagaatagtcagccaggtctgcagcaccctgaccttccaaagagattggagcataatcgttcggaatcattcagagaagcgcaacaagttggacaaggaggctttggccgaccaagcctatgtgcattacaatttcatgctccattccgactccaagatgaagaagggtgatggggatcccatcgcgctggatgctatcgacatgacctcgccatgggttgaggactctgacagtccaaacctcgcccagtggctcgacaggttcccgtctgccttggatggtgacttgaacaccaggcagtttggtggttcgatctttggcaccaatgatactctgttcggcttgtgacagctttcagttgatcagctcctcgtccggcaatgtgttgcttctgatgtacaagttatctctgtatgtatcattccatctccatatatctttgctagactagattctatatttgtttataccaaggtgaaaacctgttacttgttttggatcggacatgagaagctgataacctggagtatatggattatcgagattggagaacatgaaactgaacttttgatggcc

SEQ ID NO: 26505 - DNA, 1701 bp, Oryza sativa
  ref <308>: DATABASE ACCESSION NUMBER: AK101947
  ref <309>: DATABASE ENTRY DATE: 2002-08-28
gaaggtgacccaccgccattggcttcttccgttttatccaggagaaaggaggaggagtactgggagataggagcaatggcggagtcgacggcggcgacggcgccaccgggggacgagccggaggcgaaggggaggagcaactccatcctgctccccatcctcgggatccttctcgtctacctgctgtaccggtacctccggccgcgcctccgcggcctgcggctcgaccgcctcacgtcccgcctcccggcgtgcctccgccggagcaggacggccaacaccatgctcccctacttcgcgccgatcgccgaccgcctcggcgcgctgcagccgtacctggcccccatcgccgaccgcctcggggtgggcgcgcagggcggcgtcggcgcaggggcgtacggcagggcggacgcgctcgtcaagttccccggcggggaggcgctctccgtcgccgccatcctcgaggcgccgggggaggtggtggccaagtcgtcgcacagcaccctgtaccgcgccgcgatgcgctccggggaggccgccgtgctgctccggttcgtgcggcccgcgtgcgcgctcacctccgacgaggcctccgccgccgcgcgccggatcggcgcggtcagccacccgaacctcgtgccgctccgcgcgttctacgtcgggccgaggggggagaagctgctcgtgcaccccttctacgccgccggctcgctccggcgattcttgcaagagggaattgttgattcacaaagatggaatataatttgcaagctctctatcagtattgtcaagggactggattacctgcatacagggttggagaaaccgataattcacgggaacatcaagacgaacaacattctgctcgatgctaattacgagtgcaagatatcagactttggcctctaccttctgctgaatcctgctggtgcccaggagatgcttgaaacttcagcagcacagggttacaaggcacctgagctgatcaagatgagagatgccactagagagactgatatctacagcttgggagtagttctgcttgagatgcttgcccagaaggaatcagcaaaggataacacgccaaaccctcgcgacatcctattgcctgtctcgttcaaaaatttggttcttgagaggaagatttctgatgcattcagctccgatcttgtcaggcagagcaagaagtcagggaaggaaaagaatttgaatgctttcttcgagttggcaacagcttgctgtagcccttcaccatcattgagacctaacacaaagtttatactcaaaaagctcgaagagattgcaaaataaattaaactgggtagtttaccggcttgctatttaatcggcattgcattatagcagcatatacagcaatgacgagtactgaggcatttcagcctggccaaggctagaaacctgctgaatttgtgctggccagggaactgaatagccttgacatgaactcagagtaacatacatgctggaggggtgcttcagatgcaggatcactgtgtttttcttgtgcattacctggaaccgaaaaaaaaaatgtagaactgctgttcataggccagtgcccctgaagaactgtataacacactgttagtgaaatgtatatgttgtacttttaatgcatcgaaacactccatgtgaactggaatgttcctcatccagacgccatgaaactaaagttactgt

SEQ ID NO: 26506 - DNA, 1872 bp, Oryza sativa
  ref <308>: DATABASE ACCESSION NUMBER: AK101948
  ref <309>: DATABASE ENTRY DATE: 2002-08-28
gggattcccccgccccccggcccgcggctcccccgccccacgtacccatggcgttgccgaggtggctcccatgatgcgctctcgccgcctcgccatgtgacccgcgcgccacgccgcttttccgagaccgagagacggagagagagaaaaaaacgtagagatccacgccgcattctccatttctccccctcccggctgcagctcgccgtatcctgctttcttgccttgcgggcgtcgtcgtagcgtggtaggagtaggggagcccggcgcgcgggcgggcgcgggtggttggtgagtgcgcgcgcaacgcgcagcagcagcagcagcgggaaaaaaaaaaaggctaactaagctaggacagaggagagaaaagccgtggcgctttgcggtcacgagattcagggggtggtttgcttttgctcgcaagggaagtgttgggggagccgtagacatccgaactgttctaatggcgaccctctggggggcggtggcggtggcgttgctttgcgcgatgtattggtgaggccggtactaggggagggggtagtagtagtggtacaagtggtggttgtcgtcgtcgtagtcttgtgggttgcgtgcgtgcgttcgtgcgcgccagcgaagttcttgcgacgatcgtgtggggtgggttcgtgtgctctctcgctcctgccattggttgatgagcatggggcattactccgagcagaggccggggttcgaggtgaccaaggactggaacggcgccgaccaggtcatgatccggtcgccgcggggggcgtccgtcctggtcagcctgcacggcgggcaggtcgtctcctggaggaacgaccgcggcgaggagctcctcttcaccagcagcaaggctatcttcaagccaccaaaagcgatgcgaggtggaattcccatatgctttccacagtttggaaattgtggaacattggagcagcatggatttgcaaggaacaggctatgggccatagatgatgaggctccaccactaaatcataatgataacaacggcaaagtttctgttgaccttctgttaaagccatctgaagatgatctcaaatgttggccacactgctttgaattccgtctcagagtttctctttcgacggatggagatctctcgttagtatcacgagtcaggaatgttaatgggaagccattcagtttttcgtttgcttaccatacatatctttcagtctctgacatcagtgaggtgagaatagaaggtctggagacacttgattatcttgacaaccttagccaaagagaacgttttacagaacaaggagatgctataacatttgagtctgaggttgacagagtctacgttggttccccaagcgtaattgctgtgcttgaccatgagaagaaacgcaccttcattgtaaggaaagaagggcttcctgacgtcgttgtttggaacccatgggacaagaagtcgaaaacgatggcggattttggcgacgaggagtacaagcagatgctgtgtgtggacgctgccgcagtcgagcgagccatcacgctgaagccaggcgaggagtggacggggaagctggagctgtccgccgtcgcttccaccaactgcagcgaccatctggactacccttgtagctagctccggtgttcctataatgcgttccagtagctatattcagatgcttagttttgccccccctaaatcgaaaatcatgtactacgtttttccttgtacatgggagtgtgtactacgtttttcattgtacaacatgggggcgctagctaggtccgtcgtcttgatcagcctgttgctgatcagtctacccgtgtcatttgtcagatactactatatattcagatgcaaagttgttgtgacaagactcc

SEQ ID NO: 26507 - DNA, 1575 bp, Oryza sativa
  ref <308>: DATABASE ACCESSION NUMBER: AK101949
  ref <309>: DATABASE ENTRY DATE: 2002-08-28
gaaaggcattcgcaacacacacttgaagaaaaaaaacacgacgaacacgttaaaaaaaggtcgaagagaagtgggagacccaaaccgcgaacaatgtgtggaggcgccatcctcgccgagttcatcccggcgccgtcgcgcgccgcggcggcgaccaagcgggtgaccgccagccacctgtggccggccggctccaagaacgccgcccgcggcaagagcaagagcaagaggcagcagaggagcttcgccgacgtcgacgacttcgaggccgccttcgagcagttcgacgatgactccgacttcgacgacgcggaggaagaagacgaaggacacttcgtgttcgcgtccaaatctcgtgtcgtcgccgggcacgacgggcgcgcggcggcgagggcggcgagcaagaagaagcgggggcggcacttccgaggcatccggcagcggccatgggggaagtgggcggcggagatccgcgacccgcacaagggcacgcgcgtctggctcggcacgttcaacaccccggaggaggccgcacgcgcctacgacgtcgaggcgcgccgcctccgcggcagcaaggccaaggtcaacttccccgccacgcccgccgccgcgcgccctcgccgtggcaacacgagagccaccgccgtgccaccgccggcgacagcacccgccgccgccccgccgcgcggactgaagcgagaattctcgccgcctgctgagaccgcgctacctttcttcaccaacggcttcgtcgacctgacgaccgccgcggcgccgccaccggccatgatgatgacgagctccttcaccgacagcgtcgccacgtcggagtccggcgggagccccgccaagaaggcgaggtccgacgacgtcgactcgtccgagggcagcgtcggcggcggcagcgacacgctgggtttcaccgacgagctggagttcgacccgttcatgctgttccagctcccctactccgacggctacgagtccatcgacagcctcttcgccgccggcgacgccaacagcgcgaacaccgacatgaacgccggcgtcaacctgtggagcttcgacgacttcccaatcgacggcgcccttttctgatgtactcctccattgatgcagtttgtgcactcaattgttaatcacgtcgtcgttgatgaatgtttaaccggaggatgatggggtgcagctgatatcatggcttgcttgattaccgaattatattgcggtgtttgtgtttgtcaattagattctgaatctgtactactgccgatcttatgatcaaaactatatattaagtttatgtactcttaatttgtgggctacttttacggggtcttcgtactgctggtcaaatagtcctatgaaatcgatcatgtcggcaatatcgtcgtcaattatcgtggtcgtggttgttaatgatgtcaaataagtctatgaaaacctggtcctcttggtgtttatgtaccactgatcgatccatcatttgatctctgtcatgttgagatggatcgtgtaagaatatcataatttgctggattcagtccagtcgtaatgtattttggtttgtacaactgc

SEQ ID NO: 26508 - DNA, 2262 bp, Oryza sativa
  ref <308>: DATABASE ACCESSION NUMBER: AK101950
  ref <309>: DATABASE ENTRY DATE: 2002-08-28
ggcccgagccatttctccgcgacctcttcttctccctcgcttggcacgatcagaagcggccggaggagaggcagatagataaacagtgccagccatgtcgcctcctctgtgacttaaattggactgaattgatcaggtggctgcgcctcacctgaagccaacaaagtaagcagcgagaggacgcgccgccagggtagggagagcaagctatatatctagctgtgctgtgctgtagtgatcgatctctccctgttgttttgcggggatggcggccgcctcgtccgcacccttctttgggctcggcgacacgcagatgccgccgccgcagaatcccaccaatccagccctccaccaccaccccaacccctcccccgctcccgtcgccgccgccgcgcccgcgccgaagaagaagaggaaccagcctggaaacccaaatccagatgcggaggtgatagcgctgtcgccgcggacgctgatggcgaccaacaggttcgtgtgcgaggtgtgcaacaaggggttccagcgggagcagaacctgcagctgcaccggcgagggcacaacctgccgtggaagctgaagcagaagaaccccaaggaggctcgccggcgcgtgtacctgtgcccggagccgtcgtgcgtccaccacgacccgtcgcgggccctcggcgacctcaccgggatcaagaagcactactgccgcaagcacggcgagaagaagtggcgctgcgacaagtgctccgagcgctacgccgtgcagtccgactggaaggcccactccaagacctgcggcacccgcgagtaccgctgcgactgcggcaccctcttctccaggagggacagcttcatcacccaccgcgccttctgcgacgcgctggcgcaggagaacgcgcgcatgccgcccatcggcgccggcgtatacggcggcgccggcaacatgacacttgggctcaccggcatggccgccccgcaacttcccgccggcttccctgatcaggccggccagccgtcggcgtcggccggcgatgtcctccgcctcggcggcggcagcaatggcgcctctcagtttgatcacctcatggcctcgtcgtcgggctcctccatgttccgctcgcagggatcgtcgtcctcctcgttctacctcgccaatggcgccgcccatcatgctcccgctcaggacttcggcccggaggacggccagtctcaggccggccagggctcgctgctccacggcaagccggcggcgttccatgacctgatgcagctccccgtgcagcaccagcaaagcggcaatggtaacctcctcaaccttggcttcttctccggcagcaatggcggcgtcgaccagttcaacggcggcgctggaaacggcgggcagggcagcatcgttacttctagcggcctcgccggcaaccacggcggcggcggcggcggcttcccttctctgtacaactcgtccgaaccggccggtacactgccgcagatgtcggcgacggcgctcttgcagaaggctgcccagatgggtgcaacgacgagcagctacaacgccggcggcgccggtggcgcgagctcgctgctccgtggagctagctcccacgggatcagcgtcggtgaagggccggccaacgagaggtcgtcgtaccagaatctcatcatgggctccatggcgagcggcggcggtggcgcgggtttcgccggtagcttctccggcgcgtctggattcggtggcgccgtcgacgacggcaagctgagcacgagggacttcctcggcgtcggcgtcgtccagggcatcagcggctcggcggcaatggggccgccgcgccatggcgcggccggcctccacgtcggctcactggacccggcaaacatgaactgaagtcatcacagagaagaaaaaaaacaatagaagacggaaggagatgatcatgctgctaatttcatttcatcatatcagaattagtcaagaaactggaggtaattaattaagaagagaaaagcgatttcaatccatgcaagatggatgtttctggggaaatctggagctgttaatggtgagtcgtagttgctagctagctagccagagctgggaggaataataataatacctggattaagtggccagaacttaattttgtaccggtacatttcgtttgtttttcatgtacttttggcagggaaatgggtctcttttgatgtgaagtcatcatgtgaaggcctgaccccagactagaatcaattcaagcgcgcgctgtgcctggattaatt

SEQ ID NO: 26509 - DNA, 1959 bp, Oryza sativa
  ref <308>: DATABASE ACCESSION NUMBER: AK101951
  ref <309>: DATABASE ENTRY DATE: 2002-08-28
gattgatctatcgtatgtgccactagcttcccgttcgttcgatcgagagcctatttaagcttcgccgccgcgttaatccctctttcctcctccaaattaatctcatcctaattctgttttaatttctggtgggaatttcgctgtttgatctggcctcttcacgtaaccgtaatgttctatgtgtaaattgaattaatggagttggttgtgaaatcgttgaattgatggtgattcggttgttgttagttcagttaaatgttgcaagatatcatgaacaccaagaagattaagctgcacgactgccacttcggctcgccgctatgtgacccttcgccggcgccgcacctgctgagctccgccgccgccgccgggctgtcgttccacccagggctcgtgagctcggcggcgcagcaccagcagcacggcgcgggcggctggctgcacgaggagtactacgcgccgaggtcgtcgccgccgtcgtcgcttctcgcgcagacctgcgtcggctccaacgcgaccgcgttctacgccgccgagaacctgccgcagttcgacttcccagctctcggtacggcggcggcggcggcggccaaggcgccgttccggtcgtcggagagcgagctgtaccggccggtcgacccgctgctcctccgtgcggaccactcggtgaggacgtactacgtccggccgcagaagcgggattccggcgagaggacaccattgccgccgccgtcgcagcaacagcatcaggacagaatccacgggctcttcgccggcgctcccaccactcggcttctcagcggcgaacccaaaatccactcgtttccacctcaagtggcggcgaagccgattctgccggcgatggatgcgccgagcctgcagaaccagatggagaatcagctgacaaggaactgcatcggcgcggcaactccggtgacccccaccggaaacctcgccggatcaggtgcgccgagcaagacgcggatcaggtggacgcaggacctgcacgagcggttcgtcgactgcgtcaatcagctcggcggcgcagacaaggcaactccgaaggggattctgaagctgatgaattcggatggcctgacgatctaccacatcaagagccatctccagaaatatcgcatagcgaagtacatgccagcgtcatctgaagggaagcaactggagaaaagagcaacaggaaatgacatgcagaatctggaccccaaaactggaatgcaaatcacggaagcactgcgtgttcagctcgacgtgcagaggcgcctccatgaacagctagagattcagagaaatctgcagctgaggatagaggagcaggggaagaggctgcagaagatgttcgaggaccagctgaaggcgagcaggagcgtgatggaaccgcaggagctggacgacgtcgtcgccttcgccgccggcgacggagacgacgacgcgttcgatgacgtcgacgtgcagctgctggccgtcgctggcagcggctatgacgacgccgggttccagtccaaaataagctaggacagccttttttgcgttttgtgttttggcactttgatttgacaaatattgttctggttcttcgacgtatgatacgcacaatgctattttttgcccgtgtagttggcgaaagtttcaaaaagatattttaagaaagagagtgggatccacagattcgcgcttaatttttttttttgtagctagtttgatcagagttgtaaaatttaggctttttcaattggcctgcactgcatttcttaatggttttagttaggtcttagcaggcaaaaaacaggttaagttcaagtggcaatatattgctcatgtcacattcacatatgggcttgggatgctctacgtgtaccaccatgacaccatcctacgcagaaaaaggaaattacaaaatggatatcaaccacagaacgcaataatgctgttgtggattgtctg

SEQ ID NO: 26510 - DNA, 3902 bp, Oryza sativa
  ref <308>: DATABASE ACCESSION NUMBER: AK101952
  ref <309>: DATABASE ENTRY DATE: 2002-08-28
aaaaaaacccccgatccccccttccttcaagcggtcgccggtggcggcgatttccgcctttttctgcggcggcggcggcggcattcgcatggcgcactcagtcgccggcaccgcaccggggtctcctccatcggcgagttctcgtcgcccccctcgctcctccgttctgtaatccgcgcggaaccatcgggccgatatcatcttgcaagattcccccattggatttacggtcaaatcggagaagcacatgcagcacatctttcattgatggccgcattgaaggatgctccccagtacaaatcacagcaagtgtaaacacctccaatgcgtcctcaacatgggttgggtctctgatcccctcatcgagaagatcaactgacaaaccatattcttggtactgcctccatgcccattgtgccaagcaatagtactctccaccatcatttgccactcgaccagttatgatttccagaaggaccacaccaaagctgtagacatcgatcttctcgtttaccttgagccgatgtccgtattctgcaaagtgtaaacaatttagtgtttcaggtaatatgcaagtatatactcatcaaagttactctttttctctctgacctggtgccatgtagccaaaagttccagctatagcagaaaatgactcgtcgtctccagctttgagaagaatctttgcaagcccaaaatctgccatctttgctctgaagttgtgatccagaaggatgttggcacacttgacatctcgatgcactatgggaggcgagcaatggtgatgcatgtagcaaagacctctcgctgagtcgatggcaatttgcaatcttgttggccaatccagaggtcctggcgcaccaattctttccctctggtgaagccattgatgtaggctgccgttttccatgtactcatagacaagaagctttgcatctgaacttgagatgcagcagagcagcttgacaatgtttgtgtgcctgatctctcccaatatctgagcctctgcaaggaagtccttctccagtttgtcatcaagattcggtgtgttccatatctttttgacggccaccatccttccaccacttgctctatccccagcataaacccggtacaccttgccagacctgccacttccaatccaattctgctcgtagagcccagaaagaatgttagttgtggtgaaatgcaatatgtggaatggtgttagcttccatgacaagtggtcttgaagcttttttctccttaagagcatgataccaagcactgctgaacccaaaagcatgatgctggcaacagcagaaaagagggctataagcctcctaaatagatcattgccgtttgttcttgccctgcagatagggaaattatgaactgaattgtttgatgatacacagaggcctgggttgaatagaaagctttgttcatatgcttcgttttgcagtgatatcggaatttccccgatgagttggttcatagagagattcagaaaattgagcctcagcttattaaaatcctttgggatttcacctgataatttattcgacgagagatcaaggatggttagtactgtcataaacccaaacgccgctgggatattaccagatatctgatttccacttaggttaagtgtgtttagcctcgccagcactccaattgtcatgggtagtgagccactaatttgattcctagagaggtcaacttctgtgacctgagaaatgtctgtcagatcccagggaatttcaccagacagcaagttgtttgctgctatgaatactttcatttttcctgccaatgttggaataggacctgagaatttgttgttgctgatgtcaagacgtgtaaagttccatgggagctgtttggggaatgtgccagagaacctgttgttttgtatcataactgtacttagctgatttgtcaccactgaccaaagactcttggggaactctccagaaaaattgttgttgtacatcatcaaattgttcaacagatagcagccgtccaatgacgatggaagttttccagaaaagctgttattgaacacaacaatgtcatatagcttcctgttgaagcagaggccttctggtagcttcccagagaggttattattggagacctcaagattggccagtggtgagtgcttaccaagctctggtgggagtgatccagagagcatgttaccgaataaccgaatgtcagtaagctttggcagcagcccaacgcttggtggtattgatccactcagcttgttaaagtagagaaacagtaaggtaaggttggtaagcttaccaaatccatttggtatggttcctattaattcgtttgaagaaacatcaatctccaccaagttcaaggcactgacattgggttcaatctcaccggtgaatccgtttgcatacaggtacaaattctgaagtttcttatgttgccagatccacgttggaatttttccttgcagcttgtttgatgaaaaatccaagaggttgagctctctgaggctggacaagttttcagggatttcaccggtaatattcatatttgacagccacaagtaagtcagacgtgtcaacctaccaaactccactggaaagggagccggtacaaatggattgactgctagtgtcagcctctcaaggtcagcaagattgctgatatcctcagctgggtacctcccatcaaactgattggtgtcaaggagcagtgacttcagccttgggaacagtccaattgatggtggaattctgcctgtgaagtgattagatgataggttgagatgctcgagcagtgctgatagatgatttaagtcacttgggagttgtccatcaaatgcgttgttggaaagatctaggaacttgagattggagcaattgtagagcatggtagggaatgaagtggagaaattgttgtaggaaaggtccaagcgggtgaggttctttaggagacaaatggagggaggaattggtttgatgaaggtttgatttggtagagagatgccaatcaccgcaccatttgtgcatgtaattccttcccagttgcagtgagcagtagtagtggagttccatctacctagcgcaggtgagctcccccaatggttcttgagctcaaggaggatttggtgttcttcattagattgatttgtggactttgggtaggatttgtgcagcagagaaaatgatatcacaaagaacaggaagaagttcacataccgtttgttggccatctctgctgaatccttttggctggaaatctcttgccaggagaggagtaatgcatgggtgttttgggtgttcagctataatctccaatgcaagtggatgctattgtattgtcaccagtcactgtgaattccttttagaattgggcatatactggcaagtcatccattcgactatttgattttgagctaacatggaagccttgctgttaatgcctttgtttatgtggtcctcccagctccaacgcatcgttagtgtctgatgacatggatgacttggaacaatggaaccattatgacctttgggcgagggagaatttaccacttctgctttggaacagtttagacatgaacagggatttttacacttgcctgtgtaaactacacgtctttgagaaaatttcaggtaatttatactgcttcatacaaaacaaagtgctacctagttcaagttactgtcttgttgaatattatgggtcgtggtgtaaatcttctctgtttgattaaagattgtggggtggggtaaaattgaaccgacattagttgcttggagtaacctatgtcctaactgtcagtccacttatatgaagttcatatggtaaccgctttggcatcctgctgagataatgttcaattggctgttgctactttttgcatcttgaattattaaaacttatttgtctgc

SEQ ID NO: 26511 - DNA, 2361 bp, Oryza sativa
  ref <308>: DATABASE ACCESSION NUMBER: AK101953
  ref <309>: DATABASE ENTRY DATE: 2002-08-28
gactctcgtctctccctctccctctctcgccgccgccgcctcgcgccatcgccaacgccgtccccgtcacctcgcgcctgcgccctcgtccccgcctccgcctcgcgtagccgtcgcggtcgccactccctgccaccacgcccttcatcgcccaatcgccgtccctgagcacgggcttcgaggcggacgcggagaaatcgaggaggcgaacgctccttcctcttcccctcttgtctctcctctgcctgcgaggagcgctgctttgccgccgtcatcgccgtcgtcaccttgccggtctagccgctcgctgccatcagagtggtcggatctgatggtggcgagcacgtggctgtcgattgtttggcggttgatggagccaccgttgtcctcccacaagccggtatcaccattttcgcgttgtagtggacaaggggctccacggtggcgacgagctcaaccttggcggattgagcgatggcgtcaacctcgccggcggcgccgataaatagaggcttgctggatctgatggcggcgaggtcgtggccgccagatccggtagcctggcggctaatggaggggctgttggtctggcggatggaggtgctcactctcctctccgtcgtgcattcacgtttaactggtgctgccgccaccaccatcgccggcacggcaaggcatccacctcctctgcaccatccccttcctcctcacacttctctgccagcctgaagcaccatcgccggcacggcaaggcatccacctcctctgcaccatccccttcctcctcacacttctctgccagcctgaagcaccccatgagtatggatccctcgatttggcgctagaccatgacgctgcctcaagccctcgccgatgagttcactgccaccgccaccactgcgcggccagacgacatgatgctcgtgaatcggatgcaacggcttgctcactaggataactgacatcggcagttcatgctagagcaggaacggatatacaggtactgaaaatactgattatcctgtgtgagctgttcaagaattcaaagatgggttcattcacaaggaggagttccagctagcactctttaggaacagcaacaagaagaaccttttcgctgatcgggtcggtttgcctttttttcaatttctgtgtattctgctgtctcgcggcaaaagcttttatatttgatctctttgatcttaagcgcaatggcattactgatttcggggagtttgttcaatccattgacatttttcacccggaaatgcctttggcagagaagattgcctaggctgcaggatttgtacctgttgagcccatttaaatactctagaggaaatactggagaagaaggtggaggaggccaccgaaaggaagtttgatagttcctcctctcctcacctcgatctcctcctcctcctcctccgccgcaccgagggtttcgcctccgccttccaccgctgccgcagaggggacgaaccgaggggcaggaatggcggcgcggcacctcagatccggcctccccctcctccgcgcccacctctcccaggagggctcaaggggcttcgcgtcgcaggtggcaaagccgaccgggaaggatatcaaggttccagaagctctgtatggtggcaccggctactatgctagtgctctgttccttacagcggccaagctaacttgctggacaaagttgaaactgagattcgcgatgttgtagaggcatccaagaagagtccattgttttctcaatccattaaggacttgtcagtgcccaaagagaccagggtgaaggcaataactgaaattttcgctgaagctggtttttcagatgtcacaaagaatttcttggctgtgctcgccgacaatggcagactgaagcacattgatcgcattgctgagagatttgttgatttgaccatggcacataagggggaggtgaaggtccttgtcaggacagttattccactccccgaaaaagaggagaaggaacttaaggagaccttgcaagatattcttgggaagaacaaaactatcttgattgaacagaagattgactacagcatcatgggagggctagttattcaatttgggcagaaggtgtttgatatgtcgatcaagactagggcgaagcaaatggagatgttcttgaggcaaccccttgatatctaactgccttttggatcgaaagatgcagttgttttgctaatgaaggcatcctcatgtctgttactttgatatggtcttgaaataaatcttcgtttacaagagaacaacactctgttttatcttgttttgtgtgccagaagcctgctgaacaattttatgtcaatttctttgctactaagaaagttatgcacc

SEQ ID NO: 26512 - DNA, 2106 bp, Oryza sativa
  ref <308>: DATABASE ACCESSION NUMBER: AK101954
  ref <309>: DATABASE ENTRY DATE: 2002-08-28
ggaccgcttccgagatccgttcaaccccgatctacgccgccgagaacctcgccggcggcgacgacgacgagcacctcgccggcggcggaaggcgatgatgcctgtacgcacgtaccaccaccaccaccaccacaacaacagcaacaaccatcggctacgccgcatcatcccccgagtcctcctcgccgtcttcgccatctacgccgtctcgttcgcggcgtacctcctccgccaccagtcgccgcacccgcacccgcaccctgccgctgaccccgagcgcgacgccgtggacgcagccggaggaggcggaggaggaggagccgtggaccgtgtgcgggtagaagcgccgtcctcgcagaagccatggcctcgcctcccctccttcctcccgtggacgtccgcctccgttcggccgccgccgaagcactcctgtgaggggtacttcgggaacgggttctcccgcctcgtggacgtgctccccgcgcggggcggcggcggcggcgggtggttccggtgccaccacagcgagacgctgcgcagctcgatctgcgagggcgggagggtgcggctcgacccggggctcatcgcgatgtcgcgcggcggcgagccgctcgaccaggtgatgggccgcgccgaggaggaggagctgcccaagtacgagcccggcgcgctgcaggtggaggcggcggcgaagaggacggggccgttggtggaagcggggttcctcgacgcctacgtgcccaccggcgggatcgggatgcacacgatgaggtcgctgctcgactcggggcgcgtcgtgccgcccggcgagctacactgctcgcagtgggttgaagaaccaacacttctagtaactcgttttgaatatgcaaaccttttccacacaattacggactggtacagtgcatatgtcagttccagagtcacggatttacctaaccgccctaatgtggtctttgtggatggacattgcaaggcacaactggagcaaacatgggaagcacttttctcaaatgtgacatatgttaagaatttctctggccctgtttgttttcgacatgcaattctttcaccattgggctatgagactgcgctatttaagggccttagtgagagctttagctgcgaaggtgcttctgcggagtccctcagagaaaagcctgatcaccagaaaacggcaaggttgtctgaatttggtgagatgattttagcttcttttgatcttctgagggatgacatactgtcatccaaaacatcaaatgggctcaatgttctctttgttcggcgagaggactacttggcccatccacgccacagtggaaaggttgaatctagactaagcaatgagaaggaggtatatgatgcaattgagggctgggtaaaaggtcagaaatgcaaaataaatgtcatcaatggtctttttgcccacatgaacatgaaggagcaactgcgtgctatacaggaagcttcagtagtaataggggcacatggggctggtctaactcacttggtttcagctaccccagatacaaaagtccttgaaatcatcagcagcatgtatcgacgcccacattttgcattgatctcacactggaagagcttagagtatcatgccataaatctccctggatcatatgcaagggtaacagatgttatcaatgagttgagtaatatactgaaaggttttggatgctgagacagagctaggtattcatcaggaaagtcaccatactaacaacacaaatgcttacaatttcaatggatgggaaggaggttatttgcatctgtgatctgtgaactgatgcattaccagggctcatcacttcatcggaggaatttttatgctgccaaatgcagagagagattgtgctgacaagtgacaatctttaatctgcatatcgtgtggaacaagaaggcaatccttccccccttcctgacatcagccgacgacatgaaaaccaatccatgctgcgcacacttttctaccatgaattcatggtcttgaggaccgatcctcaaactgtaattgtaattcatcatttgggacattcggcgacaattcttgtatgttaatgcataatgttgagtgcttctcccccactgttc

SEQ ID NO: 26513 - DNA, 1855 bp, Oryza sativa
  ref <308>: DATABASE ACCESSION NUMBER: AK101955
  ref <309>: DATABASE ENTRY DATE: 2002-08-28
gagtgcgacgacgacctcctcccacacgcctatcgtcatcctcgcgatcgccgcattcatccatccactccccccgcacgccgaaggaataacctagaccagagacgaccaaggagagcgtctcagatggtggtggtggtggtgggaggcggaggaggaggaggaggaggaggaggggtgaagaaggaggagggggaggaggaggcgaggggaagaggaggaggaggcggcgtggtgggagggtgggggacgtgggaggagctggtgctgggcagcgccgtcatccgccatgggggcgttgcgtggggcgccgtcgccgccgaggtccggtcccgctcgccgtgcgccttctcgcctgaggaatgtgaagctaaattttcagagatacaagcacgctactctgcatgcgatgcttggtttgaggagctccgtaagcggagagttgctgaattaagaaatgatctgaagaagtctgaaaattttattggatccctgcagtccatgatcaaaagcctcagcaatagcaagcatgatgatggcaactctgaatgtcacactagtcatactgagtcatgttcaaataatgaaaatacagctgataacaattcatcaagcaaagcattgtccaaagatagatcatctgctgctagttttacagaggaagcaagcaacagtcagaaatctgaaaaggtgcaacactgcgatactgattcaattcaagtgaacaatacttcagcagaggttttggtaaaaccccttgttgaaaaaaaggtttgtgctgaagatggtttgctttggggctctagaaagaaaagggccgtgagggataggaggacttttctgatggctgataatagttgcagagctggcgagaatacatctacatcacacatacagacagatggttcctctgaaggctatgcaaagaagggcttgaaaactccaaatctagaatctggtgtgtctgtcgttgagaaagcaaaaccaaacttggcagagattttgaaaactatatctactcaaagtgactgttatatgttgcaacgccgacttgatgtccagcggaagcggactagatacaagaagatgattcgccggcatatagacttccgtatccttcattcaaagatcaagagtggcgcaacatcttctaccaaggagcttctaagagacattctactgtttgtgaataatgtccttgccttctatccaaaggctacgttagagcacatggctgcaattgaacttcgaaatattgcattcagaacagtgcaagagagcgcaagcatgccctctaagagttgtggagtaacaggagcagcaactgcccctttagtgaagaagaacacccgacccgtgcagcctggaagtcatgggcctcatgatgcaaagagaagcaaagtttctttaaaggggactggaagtactgtcaagcagggtgaggccaagggatcgcgtggtggttcatcagtgacagctaatgtaaaaactatgcagagaaatccaccggccaagaagagaggcgttgggcggcctccaaagaatgggcagaagcgtgctgctgcacagcaagatagccctaacaaaggcaggaagaggacccgacgctgaacttcggctcaaaatgcccaaatatacaaaactgtgtacagacagcgtatagctagaccacatagtgtcgtctctttcagtgtttacttgttacctggcaaagactaggtcggaaatcagaatgttgtagcagggagtagtactgtatttcctgttgttgtcttaaaaggacagataggaaagaacatttttataggcagaaactatcaacttagatatatatagtatatctcttgctttgtgc

SEQ ID NO: 26514 - DNA, 1631 bp, Oryza sativa
  ref <308>: DATABASE ACCESSION NUMBER: AK101956
  ref <309>: DATABASE ENTRY DATE: 2002-08-28
gggtcgcgtggcttgagcggtggtgacaccgctcgcctccgtccgcctcgcctccaccgagaggttctctctgccgccgattcagatttacagggagattatcttgtgatctgtaaacatgtttgggcgtgtaccgaggagtaacaacaccaagtactatgaggttcttggagttcctaaaactgcaagcaaggatgagctaaagaaggcataccggaaggctgccataaaaaaccatcctgacaagggaggggatccagaaaagtttaaagaattatcacaagcgtatgaggttctcactgatcctgagaagagagacatatatgaccaatatggggaggatgctcttaaggatggaatgggaggaggcagtgacttccataatccatttgacatatttgagcagtttttcgggggtggtgcctttggggggagtagctcaagagtacgcagacagagacgtggtgaagatgtggcgcatactttgaaggtgtctttagaagatgtgtataatggatctatgaagaaactatcattatcacgaaatattctgtgcccaaagtgcaaaggaaaagggaccaaatctgaggctccagcaacatgctatggttgtcatggtgtaggaatgaggaatataatgcgacagataggactaggcatgattcaacatatgcagactgtctgtcctgaatgcagaggatcaggtgagatcataagtgacagggataaatgcacaaactgcagagctagcaaagttattcaggagaaaaaggtgcttgaggttcatattgagaagggaatgcaacatggccaaaaaattgtattccaaggtgaagctgatgaagctcctgatacagtgacaggagatatagtatttatcttgcaagttaaggtacatccaagatttaagaggaaatatgatgacctgttcattgagcgcacaatctctttaactgaggcattgtgtgggttccaattcatcctcactcatctggacagtaggcagctcctaatcaaggcaaatcctggcgaaattattaaacctggtcaacacaaggccataaatgatgagggaatgccacaccatggccggcctttcatgaagggccgtctctttgtggaattcaatgttgagttccctgaatctggtgtactctcccgtgaccaatgccgggcacttgagatgatcctaccacctaaacctgggcaccaattatcagatatggacctggatcaatgtgaggaaactaccatgcatgatgtgaacatagaagaggagatgaggcgcaagcagtatcaaaggaagcaggaagcgtacgacgaagatgaggaggaggatgctccaagagtacagtgtgctcaacagtaagaagtgtcactttctggcgcaagtgatgatactccatgtaaactaagtagtttttggtgagactgttcattttagtgtattttgtactagttaaattaaatagtgaatgtctaagttgtgtcgtttgatatataagcttgtgctaacaacataaggctttcttggccttcataagatatactcctacctaggagaaagtggtggatgagcattcgtttctgtttttattggtaatgaacatatttacatgttgtattgactg

SEQ ID NO: 26515 - DNA, 1407 bp, Oryza sativa
  ref <308>: DATABASE ACCESSION NUMBER: AK101957
  ref <309>: DATABASE ENTRY DATE: 2002-08-28
gatcgatccaatccaatcgaggccatggccgccggcgtgaagaacatggtcatcgccatcctcgtccctctcccttccctcctcttcttcttctctttcgtccgccccaccaccaccccgtccccggtgtcgtcgtggtgcgccgcccaccccctcctcgtcgccaacctcctcttcctcttcaacgttgacctcctcttctggctcatcggcaatctcctctccaaccactgggtcagttcttttcctcctctctagactttagtgttcttcactgctctgttgcttttgcccgcaacctgtttgacgaaatgccttgtttgttgcagctcatcgatctgtactggaccgtcatcccggtgatgctgctgcactactaccgggcccacccggccgcggttgcggacacggcgaggtcggcggtggcggtggcgctcacctgggtgtggagcgccaggctgacgcacaactacctgaggagggaagggtggcaatggggcaagagggaggattggaggttcgccgagatgcgggggcagtacggcagggcgtggtggtggatgtccttcttcgccgtctacctctcgcagcaggtgttcctcatcggcatctgcctccccatgtacgccatccactccaccacccagccatggggcgcctgggacgtcgtggcaacaatggcatgcctcgccggcatcgtcatcgcccacttcgccgacacgcagctgcacaggttcgtgaccaccaacgagaagctgaagaaggtcggcgagcccacggtgctgaccatggaggccgggctgtggcggtactcgcggcatcccaactacttcggggagcagctgtggtggtgggggctgtacctgttcgcctggaacatcgggcagccatggatggtggtcgggccgcttgtgaacagcctgtgccttggctatgtcaccgtgctggtggagcggcgaatggtgaagcaggagcaccgagcagaggcctacaagctgtaccagaagaggacctccgtttggatcccctggttcaggaagcccgtccctcaaccctacaaccacaaggacagctcaaaccaaaattcgctcaaaatttcgcactcttgattgttcacctttatgtgtttgatcactttgattgctccttcctgtctgtcgtgctttcgtgatgtttcatttgttgtcgtgtaattaactatttgtaatctgtaacttgtaccatcatcactttgcaaggtgtctgcaaattcacggtgtaatctctactcatcgccttcactaaaatgaattacatgtattactagcgagcgacagctgaatgcttgatgcaggagactctgtccatcaaatgtcaaaaacacaataagttaactaatgctgaatccaggcttgatccttggtgtgg

SEQ ID NO: 26516 - DNA, 1365 bp, Oryza sativa
  ref <308>: DATABASE ACCESSION NUMBER: AK101958
  ref <309>: DATABASE ENTRY DATE: 2002-08-28
gactgccgaccagtgtgggctactacactgaactgaacaccaaccgaagcagcgacctcaacaaccatcgagcaaactagcaatggcctccccaatccactcgccgccgccggagccggccaccgatggcgatgatgcccaatcccaccctccccctcccaccccgcacccggcaaccgatccccctcccatctcaccccaaaatccaacccctcctcctcctccccttcctgcctccgccgccgcccctactactccgtcaccaaatcactccggcgatccctctcgccccattccttcgcaggccccggcaccgccccctcctcccaccgccgatccgtctcctcccctcccccacgacaaccgaactccacagccgcgggcggcgccccctcccgctcccgctcccgatcaaccagcaccgccttctccaccaccatcactgccgccttctcccccagcaccggggtccccggaatccatgctggagcgggaggcgtcggaagcggatggagaaccggagaacatgacgcttgcccttgcgctggcggagacggagacggagaaggcgatgccgccgacgccgccgaaggccgcggaagcggcggagtccccaaccggatcgccgcagaaggagtctgccctgaccattgccaagctcctctccggcgaggaccacgcggggacggagacgaagccggtgcccgagaaggccgcaccagcagcaaccaccaccaccgccgccgtcgcatcagtcggcggcggcggcggtggtggaggaggaggcgtggggtctaagagatggcttcttggcggcgtcccagagaaggtgcggcggtcggagctcaggagggccgagctagggttcagggttttggccgccgtcttctgcttggtctcgctctccgtcatggccgccgataccacgccgggctggtccggtgactccttccgccgctacaacgagtacaggtatacactttctgcgagtgtgttggcttttacttactcggggttccagttggtcgtggaggtgcactactttgtcacggggagacgtataattcgagacccatcagggaagtacttcaatctcgcaatggatcagatattggcttacctcctgttgtcagcatcttcagcagcactttctcgcaatgatgtttgggtgtctcggtttggagtggatcaatttgccaaacttatcaatgcttcagcctccatggcattcttagctttcgttgctcttggttttagctccataatctcagcgtatcatgtcttcagctcggttttttaaacccattgtacattacttgttgtaagtactatgtgctagtctgctagatgtatcttggtcaagcc

SEQ ID NO: 26517 - DNA, 1745 bp, Oryza sativa
  ref <308>: DATABASE ACCESSION NUMBER: AK101959
  ref <309>: DATABASE ENTRY DATE: 2002-08-28
gagcacaacactggtctacatcgatcaatagctttatagttatccttccctctcataagctcaaacaaacgctggtcaagtgctcttcaagatcggcgcatcgatcatatctatcgccatggacatggacatgagctcggcttatcctcaccattggctctccttctccctctctaacaactaccaccatggcctccttgaggccctctctaccacatctgcacctccacttggagaggaggggccagcggagggcgctccgaagatggaggatttcctcggcggcctaggcggaggcggcggcgccgtcgccgccgctccggcagctgccccggaggatcagctcagctgcggcgagcttggtagcatcgccgccgggttcttgcgccggtacccagcgcctgagaacgccggcggggtgaccatcgcaatggcgaccgacgcggcggcggagctggccgatccggcgaggaggaccgccgagacgttcgggcaacggacgtccatctaccgtggtgccactaggcaccggtggacggggaggtacgaggcgcacctgtgggacaatagctgccgccgggaaggccaaagccgcaaaggccgccaagtctacttaggaggttatgataaggaggagaaggccgcaagagcttacgacctcgccgccctaaagtactggggtccaaccaccacgacgaacttccctgttgccaactacgagacggagctggaggagatgaagtccatgacgcggcaggagttcatcgcgtcgctgcgcaggaagagcagcggcttctcaagaggggcttccatctacagaggagtaacaagacatcatcagcacggccggtggcaagcgaggatcggcagggtggccggaaacaaggacctgtacttgggcactttcagcacgcaggaggaggctgccgaggcgtacgacattgccgctatcaagttcagggggctcaacgccgtcaccaacttcgacatgagccgctacgacgtcgacagcatcctcaacagcgacctgccggtcggcggcggagccgccacgcgcgcctctaagttcccctctgacccatcgctgccgctgccgtcgcctgccatgccaccgtcggagaaggactactggtccctccttgccctgcactaccaccaccaccagcagcagcagcagcagcagcagtttcctgcttctgcatttgacacctacggctgctcctccggcgtgaacgtggacttcacaatggggactagcagccacagcggcagcaacagcaacagcagcagcagcagcgccatatggggcacagccgccggcgcagcgatggggaggcagcaaaacggcggcagcagcaacaagcagagcaacagctactccggtaacaacattccttatgctgctgcagcagctatgacttctggatcagcactctacgggggctccaccggtagcaacgggacatgggtggcgagtaacacgagcacggctccccacttctacaactttttgtttgggatggagtaggtggacttactggctctattagcttcattagctgaaacgagtggtaggcctaggactgacatggaactgatcaaaagttttggctgctgatgcatgcaggaatgcaatgcaatgcatccttaagattattcttttgcttccctgacatagtcctgtagcagagaaactcatgtatcaccagtgtttctaattcaagctcatttttttaactagttcc

SEQ ID NO: 26518 - DNA, 1850 bp, Oryza sativa
  ref <308>: DATABASE ACCESSION NUMBER: AK101960
  ref <309>: DATABASE ENTRY DATE: 2002-08-28
gaaggctcgcgcggctcccgggctccgcctccgcgccgcttctccgcttgcgcgaacccaaccccggcgaccccgccgccgcaaaacccttccaccctctgctctctctctctccggctcggcgtcgcgcgcgccgtggaagaggccaccagtcgcgggggcgcggcctcccgtcggtgatccgacggcgctgtataagcgtgatcgcttggagcgtccggacccgtcgctggctcgtgtgcgtgtcaggggtttctccggctgtccgtgcgggtgcccgtccggtacgggatcctcggccctcctccgctgtctccgccgagggaggaggcagaccggccggtcgctgactcgctgcatcgatttttggtttggtggagttcagccttaaagacggcttacgccagatttgatctcttccaaggatttgtatgctacaaatattttcgaggatagcaacacgaatccctcaacgagtcatctgtgcatcgaattcatatagttcaaattatcgaagtactagcacaagcagtcccatgaattcaaatgaaatgctgggagctcaggaaacggtatctactgaggggaacaacagctgttctagtgttcagtccactcctgacatagagaagaagtatgtgcatcgtgtatatgatgccatagccccacatttcagctcaacacgctttgcaaaatggcctaaggttgcaggattcttgaattcgttgaggccagggtcagttatactggatgctggctgtggtaatggcaaatatctgggcttcaatcctgactgtttattcataggatgtgatataagcccaccactgattgatatatgtgctgggagagggcatgaagtgttggttgctgatgctgtcaaccttccatacagggataattttggtgatgcggcaatttcaatagcagtactgcatcatttaagtactgatgccaggcggaggaaggccattgaagagttgatccgtgttgttcggaaaggtggtctggtgctcatcactgtctgggctgtggagcaggaggacaagtcacttctcaacaagtggactcccctctgtgagaagtataatgaagagtgggttgatccgagcagccctccagtgcgtaatcaatccaatactgtgcttgaaagcatatcagagactgatgaagacacaggtgcagtgaagcaaaggaatgatgatctgaaaataagtaatgatggtttggatgataacgccgatgtaacttgcagcaattccaacattgatgagtatcacaaaacccagcaggagtactttgttccttggcatcttccatttcaccgagctgaaattggtggtgcatctgctgctgctcttgaaaatggatttgcaaaaagagatgacaagaagggtactgtggtctacaaccgctattaccatgtttttgttgaaggagaacttcaaaggttagttgctggtataaacaatgcagttgttgttgaccaattctatgacaaatcaaactggtgcatcgttcttgagaagctttgaacatgcagctaaaagtgccggggagaaactcatctggagcctgtgcccttgtatctttgtaaggactgccagttgtaggcgagcacggttttgcgctccaaatgtacgaggcctgacacaaaaaaactgcattattgaatttagcatgtcataattctctattcacttgttggtgaagatcacttttgcccgttgtcatcgcgggaatcttcaggttgatcctttcaggattgcccaattagggtcatccggatttgcagaagtttgtacttatgttctcatcgaactggtgaattttgcaggtttgcttgtctc

SEQ ID NO: 26519 - DNA, 3596 bp, Oryza sativa
  ref <308>: DATABASE ACCESSION NUMBER: AK101961
  ref <309>: DATABASE ENTRY DATE: 2002-08-28
ggtgttgcctcccaccgcaatctcgtttcggctctccggccctctcctagggtttcgattcctcgccccctcgatcctcgacgacgcgaggtggttttccttttttttttggttttgtttgtgagagtggggggagatgccgccgaaggctaggaggggcgccgcggcggcggggaggaaggggccagggacgaggggcaggctggtgaaggcgcaggcggccgtggaggaggtgcccgccgaggaggttaaggctgcggaggaggccccgaaggtggaggagcagaagcgccagccgtcaccgccactgcagcagccggccgcggaggagaaggcctcgtccgacgctgcagcgaacggcgcgagccacggtgaagatgagggaactacaaaagaaacatatgaagaggataaaggtgaacgattggaatttgaagatgaaccagaatatgaagaggaggctgctgtggactacgatgagaaggacttggagcaatatgaagagcaatacgaggatggtgatgaagtggtggaatatactgaagatgtgattgaagaggagacggatatggtagacgaggaattggatggtggggacgatggggagggtgaaggatatgaaaatgccgaagaagagcataatgtggatgtggaggatgaagagcatcatgaaatggtgaaagagcatcgcaagcggaaggagtttgaagtttttgttggtgggcttgataaagatgcaacagaaagcgatcttaggaaggtttttggtgaagttggcgagatcactgaagttcgtttgatgatgaaccctgttacaaagaaaaataaaggctttgcctttctgcgatatgcgactgtagaacaagcaaggcgggcggtgtcagagctaaagaatccttcggtgagaggcaaacaatgtggtgttgctcctagtcatgacaacgatactctttttgtgggcaatatctgcaagacatggactaaagaacatctgaaggagaaactcaagagttacggtgttgagaattttgatgatctactattagttgaggacagcaataatccaggaatgaatcgtgggtatgctttacttgagttttctactcgccctgaagcaatggatgcttttaggcgattgcagaagagggatgtagtttttggagttgatcgtagtgcaaaggtttcctttgctgattcctaccccgaagttgacgatgaaataatggcacaggttagaactgtatttattgatggccttcctccctcatgggatgaagatcgtgtcaagaagtaccttaaaaaatatggagctattgagaaagttgaactagcccgaaatatgccagcagccaagagaaaggattttgggtttgttacttttgatacacatgataatgctgttgcatgtgctgatgggataactaattctgagattggtgaaggtgacagcaaggcaaaagtgagagccagattgtcgagaccattgcagagacctcctagaatgaagcatggattaagaggaaattttagggttgggcagggtgctcctcgaggtggacgttttgcatatgatcgtcctcctccacttcgccggcctccacctcgtcttttaagacccgatgttagtcgcttaccaccaccggtcaggagccgcccactgaagaggccagtagatattagagataggcgccctgttatgtcaataccagatagagttaggcgtttgcctccacccgagagatcatatgacagaaggcccccagctcctgtgtacccaaagagaagcccaaggagagaatatggaaggcgtgatgaacttcctccgccaagaagcagagctacctttggtgactatagttcaagagttccagtggatagacgcccctatagggatgattattcaccccgggggtcagcctattcggacctaggtcctcgtagtgctccccgcctttctgataggcgagcatatattgatgatggttatggagggaagattgaccgtcctctaccaacatatagggagggccgtggtcgtgattatgatacaatgtctggttcaaaacgctcatatgctgagatggatgatgtgccacctcgatatcatgacattagtgttcgtcagtctaaggcacgcttagactatgatgttggtggcagcagtgcccggtatgcagatacatatagcgagaggcttggacgatcacatgcgggatacagtggtggcagatctgtctctggtcatgatccagtgtacagtagtggtcggcatggcatgagttatggaggttccgcaagcagtaatgatgctggtggaatgtactcatcaaatttcagtggtagctacatgtctcgtgggtctgatgttggtggaagttcatattcatcactttactcagggcgtaatgtaggtagcagcagtggctactatggcggtagtggttctagttcatattactgagattttgcatcatatcgtctatggaacacacatggcaccgtaggaggttggtgtaggccccggattgtatggagctccttaatttaaggcctacggacctggacaagaagtggcaattgtgtgtggtgctcctgaattagacatgatcaaagaagtcagaaacaccaagttggttaaagcaatagtcttgtggatgttctggctagtttctttaatgtaaggctttgctttatttggtcaagaattgtgaacataatcgccagctatggtatcttggcatgtttacttccagtgtttctaaacatttttgagagatatggagtgtttcagtaaaatagtattatgaggtagttccctgaaatacatggtgccttgaagatctcttgtgatgtgctggctgaagatcagacttacaaatgaagccttagaagggggcgctttgtgtaaggctgttacttctgaaacatttggcatctgctctctagtggtttggtaatttgctgtgccaaaagatgattggtcagactgaaactctggactagttatttggtaactgctgaaaaattggatttgttggttgctgaaattgggagaaaccatttatatggctcaaagtagttctttcaccaagcgattacctaggccttgccataataagtttaagataacagaacctgcagttacagaactatgattatggtcttggattgccgctgttgattagcagcagcatagaattcagggcacccaggtatatctaacaagcaatgccatcattgagcacaacatttcacttgctactcgtttctgtaatttctgtcaagtgctgcatggagcatggataatatatctttgggaaagaagtggtaattggacaattgcaaactttgaagaaatttgcaggaagcatgaagcatgatgcactgactaaataagtttcagaaaaaaataaatatggttttgctatgacacctatgtttgatttaccatcatgataacatgatagttatggtatatttgggccctttatcccattagatggagatatatttgggccaaatttcttacaaccaaatttattttgtaacatttttttgtaaatagacaattttaccaagatattaacgcattaggg

SEQ ID NO: 26520 - DNA, 1829 bp, Oryza sativa
  ref <308>: DATABASE ACCESSION NUMBER: AK101962
  ref <309>: DATABASE ENTRY DATE: 2002-08-28
gactccactccatttcccacacgactccatccagacattgtctccaatgtcgccgccgccgcttcgcctcctcctcttcctcctcctgctccacctcccctcctccctctcctcgcgccaccaccaccacgccccgtcgccgtccaagccggcgccggcctcctacgcggcgccgctcgccgtcctcctcgcttgcaacgccacgcggttccagcccgcctgcgtctccacgctctccaacgcctccgccgacgcgtccactccggacctcctcgccgccacgctctccgcgctcagggcccgcatcccgccggccgtctccacggcgcggtccgtcctcgccgcctcctccaacgtcaacctcaccaacgccgccaccaactgcctcacgttcctctccttctccacccaccgcctctcgccgccgccctcgacgtcgtcgccgtcgctcctctccgcctccaccgcgctcctcgacctctacgactgctggtccgcctacaagtacgtcaacttctcccgcaccatctccgacgccatggcctacctcgacgacaccatcgccgtcaacagcaactacatctccatgctcgccgcgctgcagcgctacggcgacgacaccttccggtgggccccgccgcagaccgagcgcgacggctactggccgcccgcggcggcggggtccgccgccgacgaggacgcgctcggcgtgcccaaggggctcccccccaacgtgacggtgtgcggcgcggggtgccactacaagacggtgggggaggcggtggcggcggcgccggactacggcgacgagatgttcgtggtgcacgtgaaggagggggtgtacaaggagacggtgaacgtgccgttggagaagacgaacgtggtggtcgtcggggacggcatggggaagacggtcatcaccggcgacctcaacgccgacacgccgggcgtctccacgttcaacacggccaccgtaggcgtgctcgcggacggcttcatggcgcgcgacctgacgatctccaacacggccgggcccgacgcgcaccaggcggtggcgttccggtcgacgggcgaccgcacggtgctggacacggtggagctcctgggccaccaggacacgctgtacgcgcacgccatgcggcagttctacacccggtgccgcgtctctggcaccgtcgacttcgtcttcggcaactcggccaccgtcctccgcgacaccgccctcatcgtcctcccgaggcagctccgcccggagaagggcgagaacgacgccgtcaccgcgcaggggcgcaccgacccggcgcagcccacggggatcgtgctccgcggctgcgtcgtcaacggcagcgacgactacatggcgctgtacagggagaagcccgacgtgcaccacgtctacctgggccggccctggaaggagtactcgcgcacggtgtacgtcggctgcacgctctccgagatcgtgcagccgcgcgggtggatggcgtggaacggcgacttcgcgctcaagacgctctactacggcgagtacgagagcgccggccccggcggcgacggcgccagcgggagcaggatcgggtggagcagccaggtgcccagggaccacgtcgacgtgtacagcgtcgccagcttcatacagggtgacaagtggatacccaaaatacattagttagagcagcataaaaagaagtaaatggtggtccattgtgtgatcccctcgaatgagatggtgccaaactgccaacggcgtatagccatttaactgtgcaaacgcattgtgccgtgcataatgtttaatgaaagggtggccaaagccttttccttgatct

SEQ ID NO: 26521 - DNA, 1688 bp, Oryza sativa
  ref <308>: DATABASE ACCESSION NUMBER: AK101963
  ref <309>: DATABASE ENTRY DATE: 2002-08-28
gagccgccgccgcccgctctccctctcgtctctctcgctccctctaccgctgccgccacctcgcgtctcctccgcctccccatcgcgctgccacctccgcatcgcgctgtcaccatcgtcgtccccgttaccgagcgccgccgcctccgcctccacctctacctccccctcgcgccgccacctccgcctctgcctcctctgccttcccttctgcctcgcgtggccgttgccgggtgcgccacctccggctcacgccgccgctgccgaccgtcatgtgtttgggggacgcggatctgaccgccgcagcgtcgtcctccgctatcgtcgccatcgccgagcgtcaccgttgcatcctccgccgcacctccgtccttcaccgccaaagaccgctgtgagcggtcgacctcgggtggagcaggccgccattgccgcaacctcgtgggctaagctacagaacggttgtccgtcgatttgaggagggagaggcggcagcagcaataaagaggggagaggcatgccggcggctgtatggtggagaagcgccgccgcagcccgcatcccctcctcttgcccctccctctcccacctgggcgattcgtaagccgtcgtcgccgtcgcatgggctccaggaaccaccgtcgactgccgtcgtcgtgtcccctggtctcctcaatcctcccgtgcgccactcatgccggcgagatgagatcggcgcaagcaatgtggcagtgggcaactccaagaagtcgagattgagagctctggctaccgccttcgacaatatctgacctggtgctgcgcctgcctcggcagatcgggcaacggtgtcgacctcggcgatgacacggattgcactccgtcctttgcggcggatcaagtacacatcgatggagcccctcttctcctccccccaccggcaagggcagatggaggcggtgtgcgccggaggctgtagatcaagtgacggccttgacgctttgaagccagtggacaagctggctcctacactgagcggcaatggtggcaccaaagagctgtccaggtgatcagttcgcctgcggatttgttgttgaaaacaccaccaggcagcacgtggtggccgatggtcgcgcctccaccaacttcatcagcgcgtggatccagtattgatcatcttctgctcggtgccattccattccccaagaccttagtttgcagtgtcgtgaactgaacaaatcctacgagaggctggttcccatgtgcctgtaagaggctcctggatttgaaagcctggtgttaccaactagagattatctttgtatatttaaggacctttgctgtgcggctgacttcgttcaaaggggcaggccaccgtcggcaggctactgggcaagctaggatgcatgagcttggagctgggaggctgatattctccctcctgttctctgcttctatggctgacagaggatgagataaagtggagttgggggcaagtgaggactgtgagggtatgagctacctcattatttttcaggcgttgcctgattttctctaattgttaacttatatgtcattctttagttttagagtgtttctataggtgtaattcactcaatatgtatttatattactcctttcttgagcaaatatgtaggaacagaaaaggggtcttttctttatgtgcaatagtaaattgttgttttatagtg

SEQ ID NO: 26522 - DNA, 1668 bp, Oryza sativa
  ref <308>: DATABASE ACCESSION NUMBER: AK101964
  ref <309>: DATABASE ENTRY DATE: 2002-08-28
acacacactaactaatcaacaacgataataatatcccattccttccttccaatttgagattagattagcggaggaaggaatggccgtgacggcggagatggagtcgtcgccggcggcgacggggaagctgcggtacaactcgccgctggtgcaggtgtccctgatcgggttggtgtgcttctgctgccctggcatgttcaacgccctgaccgggctcggcggcggcgggcagctggaccactccaccgccgacaacgccaacaccgccctctactcctgcttcgccgtcttcggcgtcctcggcggcgccgcccacaacctcctcggcccgcgcgtcaccctcctcgccggcgccctcacctacccgctctacgccgcctccttcctctactacaaccaccacccctcccgccaggccttccccgtcaccgccggcgccctcctcggcgtcggggccggactcctctgggccgcgcagggcgccatcatgacgtcatacccacccccgtcccgccgcggctcctacatctccctcttctggtgcctcttcaacctcggcggcgtcctcggtggcctcctccccttctccctcaactaccaccgcgccgccgacgccgccagcgtcaacgacgccacctacatcgctttcatggcgttcatgctcctcggcgcgggcctcgccctcctcctcctgccggcctccaggatcgtccgcgacgacggcagccgcgccaccaggatgagctactcctccgtgtccaccgaggggtgggagatcctcaagctgttcgccaactggaggatgctgctcgtcctccccgccgcatgggccagcaacttcttctacacctaccagttcaacaacgtcaatggccgcctcttcacgctccgcaccaagggcctcaacaacgtcttctactggggcgcccagatgctcggctccgcggccatcggctacttcctcgacttcggattcggatcctccagcaggaggaggaggggcctgtgcggggtcgccgccgtcgccgtgctcggcaccgccatctgggccggcggcctcgccaaccagctccgctacgccgacggcaattggggggagaggctcatcgatttcaaggatgggcggcggtacgcggggcccttcctgctctacttcagctacggattgctggacgccatgttccagagcctcatctactggatcatcggcgccctcgccaacgacacccaaatcctcagcagatatgttggattctataagggagtgcaaagtgctggagcagctgtggcatggcaaattgatacccacaagacaagcctaatttcgcaattgattgtgaattgggcgcttactaccgtgagctaccccttgcttgcactcttggtgttcttagctgtgaaggaggaggacagttctgtttcttctgttgaggatggcaaagagaaagatagcaaactgtctgcaccaaccagcttccactgaggagatctggagttttttcagtgtgttccttcctttgaaagtacattttagaaatcaaaggagtagagtgatttaggggccatggtatagaaagtaagtttcctcgatgcaattttcttggtgtttacgtatgtgtagcttattgtttcaactgctatgaaaggtagctatggtttcaggcttcc

SEQ ID NO: 26523 - DNA, 1162 bp, Oryza sativa
  ref <308>: DATABASE ACCESSION NUMBER: AK101965
  ref <309>: DATABASE ENTRY DATE: 2002-08-28
gagggagcggcggcgaacccagctcggtgagtcgtcgtcggcggcggcggcgacggcgacggctaggaccacgtgacgcggatcagctcggaggcagcgacgacccatctctgatctccctcacgttcagaggcgcgaccaagcgtcgagggggagcgctcgacggcgagagtcatgcagggggcgcgtgttaatctgaaggggtggcaacaggctgctgttgcattcggttctgcatttggggccttgcttgaccctagaagagctgatctgatagctgctcttggggagactactgggaagccagcatttcagcgtgtgcttcagcggatgaggaacagtgctgaaggcagggatgttctcctggagcgtcctcgagttatatccacacaagtttctcatgcctgggacatgcctcagaacacatttggtgcagcatatgctcagttcatgggatcaaggaacttctcaccggatgaccgcccacctgtccgtttcatggatacagatgagcttgcgtatgttgcgacccgcgcccgtgaagtccatgacttttggcatgtgctgttcggccttcctacgaacctgattggagagactgcccttaaggtcattgagtttgaacagatgttccttccaatgtgcatgctttcagtcgttgggggctctgcgaggttcaatgagaaacaaaggacactgttttttcagcattatttcccatgggcttcaaaagcaggtcttaagtgcacagatcttatgtctgtgtactatgagaagcattttcatgaagatttggatgaagtgaggaggaactggggaattataccatgccctgatcccaaaaggagcagtgtttagacttttagatcggtacattttgcatgaaagatgtctgaacttggttttcactttgtctacgttagtattagctcttccctttcaagaataatagcaagagttatgctattgatacctaaaaaaactagtaattctctttaacttagcatagcaactaagcttgcaatgttgatgttccctttaacaatagtgtagatgagttaattacatttttatgtgtaatactagctgaatgccggtacttcgctatggacagaagaaaacatatcataatattgtctgaaataaataaaattatattttc

SEQ ID NO: 26524 - DNA, 997 bp, Oryza sativa
  ref <308>: DATABASE ACCESSION NUMBER: AK101966
  ref <309>: DATABASE ENTRY DATE: 2002-08-28
ggcgcgcgtacacgcgagagagagagagagagagagagagagagagagagagaggagaagcggcgatggcgagcggcggcggcgacgcgaggaggaggaaggaggaaggggaggaggacgggttctcgtcggacggcggggacaccaccgacgctgagtcgtcggacgagagggcgggggcgggggcggggaggagggcggtgccgggcgcgaaccccatcctgagccgcctcgcggtgtcgcggaacccgagcccgctcgcggcggccaccgcggcgcccggggtctgcctcctgcggttcgcgtgggagtccgccgctgggtccctcgtcggcgccgtcgtcggatatggaaaaggtttggtcaccactaaagggtttaaaggctcgtttgctgatgctgcatcttctgctaagatatttgctgttcttgctggtgttcaaagtttggttgcctgcactttgagacaactacgtgggaaagatgatgttctcaatgctggaattgcaggctgttgcactggccttgccctgagttttccaggtgcaccacaaacaatgattcagagctgcctgaccttcggaactttctcatacatcatagagatgctcaataaacaggaacctgcacttgctcgtccatctatcactggcacgaaggatctcaaggctggacacagagttcttcctcccttcacgctccctcttccgcaagaggcaatggagggtttttcctcgtttcaaaactttttgtcgaagttccaagggaagtgaaccaagtgaataacctcaagagggatggtgggtagcttcacctctttcctccgttggattttgtccgtgtaaatgcctcgtcttgagtttctcttttgttccacgagtgtaatgttctagggagtgacggattatgtgaatgttgatgtcattcttactcttttgaataacagctctgtgaatccttatcgtgcttcagctagtgttaatttgccacttgcttc

SEQ ID NO: 26525 - DNA, 1736 bp, Oryza sativa
  ref <308>: DATABASE ACCESSION NUMBER: AK101967
  ref <309>: DATABASE ENTRY DATE: 2002-08-28
gaattatctagctgatcagcttgcctaggaagcaaggaattagccatggcttctgtttcgccgctactgcttctcctcttgtgcagctaccactctgtagttgctcatgcaggagatggacagagttacaaggttcttgagctgaattctgaggccgtctgctccgagcgaaatgcgatttcgtcgtcgttgagtggaaccacggtggcgttgaaccaccggcacgggccatgctcgccggtgccgtcgtccaagaagaggccgaccgaagaggagctgctcaaacgcgaccagctccgagccgagcacatccagcggaagttcgccatgaacgccgccgtcgatggcgccggcgatctccagcagtcgaaggtgtcgtcgtccgtgccgcccaagctgggctcctccctggacacgctggagtacgtcatctccgtcgggctcggcacgccggccgtgacgcagacggtgaccatcgacaccggcagcgacgtgtcgtgggtgcagtgcaacccgtgccccaacccgccgtgctacgcgcagacgggcgcgctgttcgaccccgccaagtcgagcacctacagggcggtctcctgcgccgccgccgagtgcgcgcagctcgagcagcaaggcaacggctgcggcgccaccaactacgagtgccagtacggcgtccagtacggcgacggctcgaccaccaacggcacgtacagccgcgacacgctgacgctgtccggcgcctccgacgccgtgaagggattccagttcgggtgcagccacgtcgagtcgggattcagcgaccagaccgacgggctcatgggcctcggcggcggcgcgcagtcgctcgtgtcgcagacggcggcggcgtacgggaattccttctcgtactgcctcccgccgacatcgggctcgtccgggttcctcacgctcggcggcggcggcggcgtgtcggggttcgtgacgacgcggatgctcaggagcaggcaaatcccgacgttctacggcgcgaggctgcaggacatcgccgtgggcgggaagcagctcgggctgtcgccgtcggtgttcgccgccgggtccgtggtggactccggcacgatcatcacgcggctgccgccgacggcgtactcggcgctgtcgtcggcgttcaaggccggcatgaagcagtaccggtcggcgccggccaggagcatcctcgacacgtgcttcgacttcgccggccagacccagatctccataccgaccgtcgcgctggtgttctccggcggcgccgccatcgacctcgacccgaacgggatcatgtacggcaactgcctcgcgttcgccgccaccggcgacgacgggaccaccggcatcatcgggaacgtgcagcagcggacgttcgaggtcctgtacgacgtcggcagcagcacgctcggcttccggtccggcgcgtgttgaccggggcgggcggcgcgacgccggcgcctggcgggccgggcaacacgacacacgtagaggccaagagggtagcagtaggttgctctcatgtggtcgtctacttgtttgtggttgcgaggtaagagtcgtgacgtgtgatgatgacaagatataatgatatatattgcaattgtaatccaacaaccaaaatattatattagtccctagctctaaaaaaatattatattaggagtgaacttttcatgattttttatgaataataaagactttatactgattaattcgatcgtttgattccc

SEQ ID NO: 26526 - DNA, 1530 bp, Oryza sativa
  ref <308>: DATABASE ACCESSION NUMBER: AK101968
  ref <309>: DATABASE ENTRY DATE: 2002-08-28
gacgtgccaggtgcgtgcgtgcgtgcgtctcctccccttccctcccccctcccccgcgaccccggaatagccgaacaggaaacctcctcccatctcggcaggcggcggcggcccatcgtatcgggaaaccggagccccccagccagccaccaaatcgacaagactcgtagtcccccccctcgtgcgctccccgtcccggcattgccgccgctgtctccgaggagtggaggtagacgcgccgccgtttgtcgatcggatccttgcttttgcttgcggttgcgggcgggggtttggggtggcaatgggcgccgcggcgggggatggacgggaggaggaaggggtgatggcgacggacttcttctggtcgtacacggacgagccgcacgcgacgcggcgcagggagatcctggccaagcatccccagatcaaggagctcttcggcccggacccgctcgcctttctcaagattgctgcagttgtatcacttcagctatggactgccacattactccgagatgctagttgggtgaagatactgacagttgcatatttttttggatcctttttgaaccacaatctcttccttgcaatccacgagctcagtcacaatcttgcgttcacaactccgagctacaatcgctggctaggtatatttgctaaccttcctatcggtgttcccatgtccattacattccagaagtaccacttggagcaccaccgtttccaaggtgttgatggaattgatatggatatccccagccaagcagaggcgcatgctgttaagaatactctaagcaaatctgtatgggttgtcttccagctgttcttttatgcccttagaccgctgttcctcaagccaaaacctcctggcctgtgggaattcaccaatttgattatccagattgcgcttgatgccagcatggtgtacttctttggatggaaatcactagcttatctgatactctcaacatttgttggtggtggcatgcatcctatggctggacatttcatctcagagcactacgtattcaatccagaccaggagacttattcgtattatggacctttgaatctgatgacatggcatgttggataccacaatgagcaccatgatttcccaagaattccaggaacaagactgtacaaggtaagggaaatcgcaccagagtattacaacaatctgaaatcatacaaatcttggagccaggtgatatacatgtacatcatggaccaaactgttggtcctttcagccggatgaagagaaaggcgccgaaaaaagattcatagatttatgcatttagattggtttgtttcagatgacattttctgtgcgcatatggtcatatatatggttgttagacatggtcatgtgtgcttgtatgcagtgggatacaatactcgataagtcgatatttctttgttaattgttactgattcattttgttccgtccacactagaagcagcgtttcagtgttactgtaactcatgaaactgtaaccatggcaccgaatgaaaattttgtagtatc

SEQ ID NO: 26527 - DNA, 983 bp, Oryza sativa
  ref <308>: DATABASE ACCESSION NUMBER: AK101969
  ref <309>: DATABASE ENTRY DATE: 2002-08-28
ggcctcgctaacccattcccaaaagcaaagcgaacctaagctcgcttcgtctctctctcggattcgatcatggcgcagagggagaagaaggtggaggagccgacggagctgagggcgccgtagatgacgctctgcgccaacagctgcgggttcccgggcaacccggcgaccaacaacctctgccagaactgcttcttggctgcctcggcgtcttcttcttcttcttccgccgctgcctcgccgtcgacgacgtcgttgccggtgtttccggtggtggagaagccgaggcaggccgtacagtcgtcggcggcggcggcggtggcgctggtggttgagcggccgacggcggggccggtggagtcgtcgtcgaaggcgtcgaggtcgtcgtcggtcaaccgatgccacagctgccggaggcgggtgggcctgaccgggttccggtgccgctgcggcgagctctactgcggcgcgcaccggtactccgaccgccacgactgcagcttcgactacaagtcggcggcgagggacgccatcgccagggagaaccccgtcgtccgcgccgccaagatcgttaggttctaaaaggataatacaaggggaaaccaacctgaattttcctcctttttctttcttttttcttcttctttccttttaaaaattaaagttgagggtattattttttcttttcctgagagcttcttaaaggtgaaaggggaaaaaaaagaaagaaaaagaaaaggagatgagatgggtgactcaagatgcatcaagcaaaggaagaacaatatgatgatgatgatgttgttgttatagtggtggttgaggttggaagttggatggaaagagggaggaaggaagaagatggggttgttgtgttgtcctcccacaaatctctatttaattttaattcccttttgtataaaatttattattatctgtggagagcattattatcagcttgagctagtggcatctttcttttt

SEQ ID NO: 26528 - DNA, 1094 bp, Oryza sativa
  ref <308>: DATABASE ACCESSION NUMBER: AK101970
  ref <309>: DATABASE ENTRY DATE: 2002-08-28
gcagctctgcaactcatctcggcaccaccacgccgctcttctcactcaggtcccgcatggccgccgccgccgccgcggcgctcatcaccgccgcctccactcctttcccgctggtctccttccgcagccggcgggatggccacctgagcctttcgcctcctcgccgccccggcgccgggcgctgcagggcctcggcgccgacgttccaggggggacccgccgccagctacgcccgcgagatggagcgcctctccgccaaggagtccctcctcctcgccttcagagatgctggagggtttgaatccttggttagtggaaagactacagggatgcagaagattgatgtcaatgagcggattgttgggctcgagcgtctaaaccccactccacggcccacaacatctccctttctggaaggtcgatggaactttgaatggtttggtgacagcagtcctggagcacttgcagcccgtcttctgtttgagaggtcacctacaactgttgcacactttacaggacttgatgtcctgatcaaggatggatactccaaaatttcttccaacgtgaagttcttaaatacggtgcaaagcaagttcctgctgactactcagttgtctgtggagggtcctattaggatgaaagaggaatatgtcgagggcctaatagagatccctaggatcagagaagaaacactgcctgatcaactaaagggtttctttggacaaactgcaggtgctctgcaacaactccctgcccccataagggacgctgtttcagaggggattaaattgccacttaatgggatgttccagcgcctattcatgatttcttacttggatgaggaaatactgattatcagagatgcatctggagcacctgatgtcctaacaagattggaagggccacagccaaattcaattgatggcacatcagacgcagtgctgtcagaatatgaaagctagtgttaattgggtgcactaattagaacgtcgtgattagttttttgttcttctgttcagccacttttcacgcttgcacatacataataactgtagtgcgtaacagcatccacttgaatggattaacttacctcc

SEQ ID NO: 26529 - DNA, 976 bp, Oryza sativa
  ref <308>: DATABASE ACCESSION NUMBER: AK101971
  ref <309>: DATABASE ENTRY DATE: 2002-08-28
ggctccgccgtcgctgttgctctctgatccctagggtttactttcccctcctcctcgaactctagggtttttccgctcgctctccgccaccatgacggccgccgagacgcaggaggagctgctccgcaagcacctcgaggagcaaaagatcgagggagatgagcctatccttgaggatgacgatgatgacgaggatgatgatgatgacgaggatgacaaagatgatgatgtagaaggagcaggaggtgatgctagtggaaggtctaagcagagtaggagcgagaaaaagagcaggaaagccatgcagaaacttggcatgaagaccatcactggtgtgagccgtgtcactatcaaaaagagcaagaacattctgttcgtcatctctaaaccagatgtcttcaagagcccaaactcagacacctacgtcatcttcggtgaggcgaagatcgaggatctgagctcgcagctgcagactcaagctgcagagcagttcaaggcacctgacctgagtaacgtcatctcaaaggccgagccttctgcagcagctcaggatgacgagggggtcgatgagtctggcgtcgagccgaaggacattgaactggtgatgacacaggccaccgtgtcgagatcgagggcggtgaaggcgctgaaggctgctaacggtgacattgtcactgccatcatggagctgacgaactagtggaatcacgaaacgttgtggtggggatggaacttgtgggttaaattttaatgttgagggcgcattgataggatgaaccctcctccttggttatgctatcttgagagcggtaggtagtgttacgaaacttcaaggcctatatcatcctttgataagatcgactgtttgctatttaatatgcctttttcattcactggtctcgctacacatgcctgcatgctccatggcttctattatcgaaaaactgttgaatgtgaatgagtatgtttttttgct

SEQ ID NO: 26530 - DNA, 2263 bp, Oryza sativa
  ref <308>: DATABASE ACCESSION NUMBER: AK101972
  ref <309>: DATABASE ENTRY DATE: 2002-08-28
ggcataaacgctagctcgtccactctcctctactagcagcagcagtagaagacaacacacacgcagcagcagctgcagcaaggcagtaggagaggagttggagggaggagagggagctccaagaatcaccagagagcgagcaagagagaggtgagaagtaaggtgagctcagaaggatttggtaagggatctcattatgcagacttcaaaaaccaggaatgggccttcagatgccccacagaaggcttctccggcaacaccacggtcatctcgggtggcgaaaactggagggaatgaaactgactctgcagggatcacaccaacaagaaccactccagagaggagccctaaggtcaccgagcgtcggtcaccacgaagcccaattactgagaagcgcccaagtaggctgtccgagttggagtccagggtcagccagctgcaagatgagctgaagaaggccaaggagcagctgagcttatcggagtcacgaagacgccacacacaacaggaagcagaggaagcaaaaaagcaggagcaggctgcaacctcaaagctcgaggacctacagcgccagcttgccgagttctcagctgcggaggagtcccgactccaggaactgcggaaggtctcactggagcgtgaccgtgcttgggagtctgagctcgaggctgtgaagaagcagcagtcagtggattcagctgctctgagctcagccttgtctgaaattcagaggttgaagcagcagctgggggccaccacagagtctgatgcagctcgtgccaagcaatgcgagtttgcggagtctgagctcgagggcttgaagcaggagatggagctccggcttgcgaccatcgagggcctgaaggtaaacgttggcgagagcgacaaggctgtagctgaggcgaacgcggtggcagctgagaccaagaagcagcttgagatggcacaagctactattgactcgctgcttgctgagggtgcccggttgcaagaatgcctgaggtcgaaggacgcagagctcggccagtccatggctcgattagccacactggaggaagatctgaagaaggcacataacaaggatgatgttgatggcagctttggcagccctgatcatggtgaagctgtggagaaggtggtggtaactatccccaatggcaatggcagctgtggtggttctggcgcagagattgagcagctgcggacggcgctcgaggtggctgagattaggtaccaggaagaacaaactcgcacgacgatcgagacgaagaccgcctacgaaatgctggagaatgccaagtcagagtacgaccgcagagtgcgcgatcttgagctggagctgaagagcaagaacgatgagctcactgaagcgaaggccactttggctgtcaggtgtgacgggaagagcgatgtgatgcagccagagcttgaggcgaagctgatgaagtcgatcaccgatgcgacggagctgaaggcgagcctgatggacaaggagacggcgctgcagagcgtgatggaggagaagcgagacgctcaagtcggaggcggggaagaaggcggcggaggtgcagcggaggtacgaggcggcggtggcggagctggagctggccaaggcggcggagcaggacgtccggatgcggctcgggtacgtgacggaggaggccgacaagagcagccggcgcgccgccagggcgtcggagcagctggacgcggcgcaggcggccagcgtcgagatggaggccgagctgcggcgcctccgggtgcagtctgaccagtggcgcaaggcggccgaggcagcggcggcggcgctgggaggaggcggtggcggcattggcaggaacgtggagcggacggggtctctggagccggcggagtacaccaactccatgatcggcgggaagctggcgagctcgccgttctccgacgagccggaggaggagtcgccgaagcggcgcaacagcggcgtgctccggcggatgagcgggctgtggaagaagagccccaagtgaccatcgacgccatggacagcttggtgtggtgtgtgtactagaaagaactgaaactgactagctaggctgagctgatctgatcacgccatggatgggtttagctgcaaacactgtgaatcaaagctagttaagttaattactactggttggttagttggttttgctgctgtggtcgcagtaaaaaaagaatgttaagaactcttgtaatgatgttggagatgaggagcatctacattttgggctgcatgctgtcg

SEQ ID NO: 26531 - DNA, 1180 bp, Oryza sativa
  ref <308>: DATABASE ACCESSION NUMBER: AK101973
  ref <309>: DATABASE ENTRY DATE: 2002-08-28
gaccgtgtaatttcctcatttgcctttcagtttttccctttttccctgtagtacagtattttccgaacagttgagaagtagtagcaaaacgatagaatatggcggcgaccttctccgccgccgccgccgccgccgcaagccccacctacctccaccgcccccgaaccctagccccacccgcctcaacccctgctcgcctgagccccagcagcagcagcaggaggccggcgaccccctcgctgctctccctccggcgcacccatgccgcgccgccgccgctccgtgccgccgccgctgaccccaaggttgttaatggggaagatttcccccctatgaaggacctacttcgtctatacaagaaagctttcctagatggaaatgatgaggctcttggtggaattgagagtgctatcattgccattgagaaagaaaggagtaactcagctgctcagtatgaaagtattgcaaccgaaattacttcagggaaggacaagttcctccgtataaatgctgatctggagaatttccggaagcagactgaaaaggagcgtgctaggtttacctcaaatatacaggtggatgttgttcagagtctattgactctggttgatagttttgagaaggtgaatcaagagatcaccccggagactgataaagagcagacgattagcacaagctatcaaggcatatacaagcagttagtagagacattgagaagcttaggtgtaggagttgtggaaacagttggcaagccatttgatccttcgattcatgaggctatcgcacgcgaggaatctcatcagttcaaggctgggattgtctcgcatgaagtcaaacgcgggttccttctaagggagaggctgctaaggcctgccactgtgaaggtctcaaccggctctggcacccaggagacgagctccccatctacagagaagcctgtggaggatagcaaagaagatgccgctgtctgaatctgctggaaactggaatcctggaaatccaaccgacaaaatcaggaaatcagtagcaagttatagctagagcaccattctttgggagctcattttttttactgtccataccatgcgaaggttttgtgttccaaatgggtgtctttatgtgtacattttcatagcgatttcaagctactatttttaaatgaatttcttttcccctgtgc

SEQ ID NO: 26532 - DNA, 3427 bp, Oryza sativa
  ref <308>: DATABASE ACCESSION NUMBER: AK101974
  ref <309>: DATABASE ENTRY DATE: 2002-08-28
gcggtgagttttggtgcatagtaggagcagaggagcagtgtggtctgtgggctgtggcggtagctaggcagttttcaggggagagctttgctggtcgctgtgcattgaagagttggaactactagtaacctgtgctgtctgtgctgcttgctcggttcgagggtaaggtgtggtggtgtggcggggagggggtttgtgcggctgggaggcggctaccgaagctgggcgagaaattaaagcagcgaaggccccgcgattttaaagcgggtttgtgtggctcgctgctcgccgctactgtgttcctctcgcgtcgcctcgtctccctcttgccaccaagttcaggggttcaggtcaggtcgctgccgcggctctccagatccttatctccttgcttggagtggagtgctttgctctgccattcggagcctggatggggtctcggcagcagcgggtggaggcggagggcgcgccgaatcggaggtgatctggccatggggtagcctgggtgggttgggtgggtgggtgggtgcgcggcgggtatggagggctcccgtgtcgacgccgtcgcgggcgggcggcggtggggggaaggggaggagggtggacgacgcggaggaggaggaggaggaggaggaggaggaggaggaacaggaggtggtggtggtggtggagggaggagaggcggggaggacgggggtgaggtgagcctgcgggagtggctggaccggccagggcgggcggtggaggcgccggagtgcctgcacgtgttccgccaggtggcggagtcggtggccatcgcgcacgcgcagggggtggccgtcggcagcgcgcgcccttcctgcttcgtcgtgtcgccgcccttcgcccgcgtcgcgttcatcgagtccgcctccggctccgacgtctcgggctcctgctccggctccgacggctcggaggaggccgacccggaaccctcgcctcctcggcggcgacgggacggcgccagcggtggggaggaccgcggcgggaagacgttcccgctgaggagcgtgctggcgatggagctcacctggtacaccagccccgaggaggccgacgaccgcggcggcgctactttcgcctccgacgtgtataggttaggagtgctcttgttcgagttgttctgtacgttcgagacgatggaggagaagatgcgagcaatggcgaacctacggcaccgcgtcttgcctccacagctgctgctcaagtggcccaaggaagcatcattctgtcagttgttgatgcaccctgtgccggagacccgaccgaagatgagtgatgtgctacaaagtgagttccttaatcggtcaagaaatagtctggaggagcgtgaagcagcacttcggttacgcgaagagatagaagaacaagaattactgctggattttcttctccaactacagagaagaaagcaagatatagcagacaatttgcaggacacagttgcatttctctcttctgacatcaatgaagcgcaccagcagtcagctctggggcagtgtggaaacttctcatttgagttggataaagaggtgtgctctgaaacagttgaagatcagagtgattgtggatccagaaaacgtttccgacctgagctaccagctgttgatatggaggaacagaatcgtagtcttgaagaatgttcgggaacagttccatcatctgtgctgatccaggaaagtgtgttgtctaaaagctccagactgatgaagaacttcaaaaaacttgaaacagcatactttctcacaagatccaagttggcaaagcaagttgggaatcctgtaagcagttgccatcaagtcgtgaaaaggactactgggtcacctgttgtgactgagggaagttcaatagatgattttgctttggaagggcattatggtacaaggcaaagaggttggatgaactcttttcttgagggattgtgtagttacttatcgttcagtaagttgaaagttaaggcagaactgaagcaatgtgatctgctgaactcatcaaacttagtatgctctgtaggcttcgaccgggataaagagttctttgcaactgctggtgtaaataagaagataaaagtgtttgaatataatatgattgtaaatgaacattgtgatattcactatcctgtggttgagatgtctaatagatcaaaattaagttgtatttgctggaacagctacatgaagagccatatagcatctagcgactttgaaggtattgtacaggtttgggatgttactaggagccaagtttttgttgaaatgagggaacatgagaggcgtgtgtggtcggtggacttctcacttgcggacccaacaaaattggttagcgggagtgatgatggttcagtgaagctgtggaatatgaatcaggcaattttattcttgcacctggtgtatgtcagcttttgaactaccgataacatggttatcgagcttatgtctgcaatagtagactaacttgcctctgctatggtaacactttttcatgaactttgcaggctgggagtgttggcactatcagaacaagagcaaatgtatgctctgtgcagtttcaacctgattctgctcgttccattgcaattggatcagcagatcacaaaatttactgctatgatcttcgaaacatacgagctccttattgtacgttagttggccacacaaaaacagttagctatgttaagtatgtggatgcatcaactatagtgtccgcatctactgacaactccttgaagctctgggacttgtccatgagtcaggcaaggataattgacagtccgcttcggacatttacaggtcatacaaacactaagaattttgttggactttctatatctgatggttacattgctactggctcagagacaaatgaggtttttgtctaccacaaagcatttccaatgccagtcttggcatataaattcagtgtcacagacccaatatcaggccaggagattgacgatccatcacagttcatttcatgcgtgtgttggagagggcagtcctcaacgcttctttctgctaattccagcgggaacattaaaatcttagaaatggactgaccgtgcacaaatgggcagcttgtgcgcgtccagtttccaatagaaatgaactgacttgacacccaagggaatgcgcgtgcccggggctagcatagtgcattggaagtttgccttcaaatgcagagaggtctatagggcgcgatgtaactttattagagttggagttaggaggttgataggacagagtggtagctgtaccagagttagcataggattagatagaaaacgtagcataaatagggaaagtatttgtgacgcaggggatccaagaggggttttgtacatcattggtttgaggtatacttatataggcaatcaatccaagcttcagtcattgctattcttgttttg

SEQ ID NO: 26533 - DNA, 798 bp, Oryza sativa
  ref <308>: DATABASE ACCESSION NUMBER: AK101975
  ref <309>: DATABASE ENTRY DATE: 2002-08-28
tgacgccgcttcagtttgaaaacccaccgccacgtcgccgccgccgccgccgccgccgccgacgccgagatggctcgcacgaagcacccggcggtgaggaagtcgaaggcggggcccaagaagaagctccagttcgaacgctcccctcggccgtcgaaggcgcagcgcgctggtggcggcacgggtacctcggcgaccacgaggagcgcggctggaacatcggcttcagggacgcctaggcagcaaacgaagcagaggaagccacaccgcttccgtccaggcacagtggcactgcgggagatcaggaaatttcagaaaaccaccgaactgctgatcccgtttgcaccattttctcggctggtcagggagatcactgatttctattcaaaggatgtgtcacggtggacccttgaagctctccttgcattgcaagaggcagcagaataccacttagtggacatatttgaagtgtcaaatctctgcgccatccatgctaagcgtgttaccatcatgcaaaaggacatgcaacttgccaggcgtatcggtgggcggaggccatggtgaaaatttgtttgcgagccatgcagcatgatggacaaggagcaacatgtgtcgttgattaacattttagaaagtagtgtagatgtatcttcacatagggatcaacttacccttcgttcccattctaattcagttgatgttagtatttaccttttgctccatttggattggtcgaattcaggatttcatcaaacagtcgattgtgaaatgtgaaccaggaattgttgtgttgattgc

SEQ ID NO: 26534 - DNA, 2093 bp, Oryza sativa
  ref <308>: DATABASE ACCESSION NUMBER: AK101976
  ref <309>: DATABASE ENTRY DATE: 2002-08-28
gctgcgttctctttctttcttcgagccacttgtgttttggcttagacgccactctttcctccgtgccagctctgcgttaatcatcttcctcctcgctgtaccaatctcttgctgcgtttggggggagcaaagcgagcgagaggccgtgatggcggcggcggcggcggcggtgctgcacgcgctggtggcgctcagcctcgccggcgcggtcgcggcggcaggaagaggcggggagcagccgctgtcgaggatcggcatccaccggaccaccttcgcgatccagccgggtgcctccgtcgacgcctcgccgctcctcctcggcctcgagggacaggacagagaatgggtgactcttacctataacaaccccaagccatcgaaggatgattggattggggtgttctctcctgctaatttcagtgattctacttgtccatcagagagccaatgggttgaaccaccacttctatgtacagctcccataaagtttatatttgcaaactacaagaatcttgactatgagaagacaggaaagggatccatgaagcttcagctaatcaatcagagggaggatttttcatttgcattgttttctggaggcctctcaaatccaaagctcattgcacactcaaagagagtaaccttcacgaacccaaaggcccctgtgtacccacgcctagcgcaaggaaaatcctggaatgaaatgacagtgacttggacaagtggatatggcaccaatgaggctacaccatttgtcaaatggggcctacaagggcaaatccaaagcctttctcctgcaggcacccttacgttcagtcgcagcactatgtgcggtcctcctgctaggacagttggatggcgcgatcctggtttcatacatacaagtttcctcaaggatctgtggcctaatttcaagtatacatacagaattgggcatcggctatcagatggctctattatttggggacatgagtatagcttccaagcacctccttatccaggggaagactctttgcagcgtgtagtcatttttggagatatggggaaggctgaggccgatggttcaaatgagttcaatgacttcgagcctggttcactgaacacgacctaccagctaattaaagatttgaagaatattgatatggtaatacatattggggacatctgctatgccaatggttatctgtcacaatgggatcaatttaccgcacaagttgaacccattgcatccagtgtgccttacatggttggaagcggcaaccatgaaagagattggcctggatcaggttccttctatgggaatttggattcaggtggtgaatgcggtgtaccagctcagaatatgttctacgtgccagcagagaaccgtgagcaattctggtactcgatagactacggcatgttccgtttctgcatagccaacaccgagctcgactggaggccaggcaccgagcagtacaagttcatcgagcactgcttctcctccgtcgaccggcagaaacagccgtggctcatcttcctcgcccaccgtgttctcggctactcatcagctagcttctacgtcgaggagggcacaaccgaggagcccatgggcagggagagcctccagccgctctggcagaagtacaaggtcgacatcgccatgtacggccatgtccatggctacgagagaacctgcccagtctacgagaatgtgtgcgtggcgaaggcggcgagccactacagcggcgcgttcacggcgacgacgcacgtggtggtgggcggcggcggggcgagcctggcggactacgccggcgtacgggcgcggtggagccacgtccaggaccgggactacgggttcgccaagctgacggccttcaaccacacggcgctgctgttcgagtacgtccggagccgcgacggcagcgtgcacgacagcttcaccgtctcccgcgactaccgcgacatcctcgcctgcggcgtcgacaactgccccaccaccaccctggcctcgtgaggatctcgccgaggctcaggttgcttactgctgctgtgccgtaagccaatttgtacattgtgacattgagaatttgggatgcttggcttatcaatcc

SEQ ID NO: 26535 - DNA, 1721 bp, Oryza sativa
  ref <308>: DATABASE ACCESSION NUMBER: AK101977
  ref <309>: DATABASE ENTRY DATE: 2002-08-28
gcgagttaccaacccaacccgtgtccccttgtcggatccgggcgcgcgacctcgtcgccggccggccggatcgccgccgccgccgccgtagagatggacccggaagcggtgcggaggagcctcgagcccaccgccttgtccaaggaggtcgtcggccccgcctccgcgagcctgcgctacgacgccttcgccctcaccggcgtccgcatcgacgcggccgagcacggccgcctcctctgctccttcgtcgtcaccccgcgcatcgccagcccggcggggtacctcctcagcggcgtcacggcgacgctcgccgaccagctcgggcgcgaggccggcggctccagtcggcatggcgcttgtgttgcattgcggaagtggcaacaaaaatgcctttaaggcacttattgctgcagagtacactggagtcaaggtcgagctgaccaagaattttgagatgggtgtctcaaacaagacccctgagtttctcaagatgaacccccttgggaagattcctgttctggagactcctgaaggtgctgtttttgagagcaatgctatcgcgcgctatgttgctcgcttgaaggacaacagctctctttgtggttcttctcttatcgactattctcacattgaacaatggatggacttctcagcaacagaggttgatgccaatattggaaggtggttgtacccaaggcttggttttggcccttatgttcctgtgcttgaggaatttgctattacttcattgaagaggtcattgggtgctctgaacacacaccttgcttcaaacacataccttgttgggcattcagttactctagctgatattgtgatgacatgcaacctatattatgggtttgttcggatcttgatcaagagtttcacctccgagttccctcatgttgagcggtacttctggacaatggttaaccagcccaacttcaagaaggtcattggtgatttcaagcaagcagagtctgtgcctcccgttcagaaaaaggctgctccccctaaggaatcaaaagcaaaggaggccaagaaggaggctccgaaggaggcccctaaaccaaaggttgaggcttcagaggaagaggaggcaccaaagccaaagccaaagaatcctcttgatctactgccaccaagcaagatgattcttgatgagtggaagaggctatactcaaacacaaaaaccaacttccgtgaaattgccattaaaggtttctgggacatgtatgacccagagggttactctctgtggttctgtgactacaagtacaacgatgagaacaccgtatcgtttgtgacgatgaacaaggtcggtgggttcctgcagcggatggatctgtgccgcaagtatgcttttggcaagatgctggtcattggctccacaccgcccttcaaggtcaagggactctggctcttccgtggtcaggacatccccaagttcgtcatggatgaggtctacgacatggagctctatgagtggaccaaggttgacctctctgatgaggcccagaaagagcgtgtcaatgccatgattgaggaccaggagccgttcgagggcgaggacttgctggatgcaaaatgcttcaagtgagcagcacaatgtttagaagcaaaatcatcagttgcaaaagtactatttaggacttgaattcggagttaaaacagttgcctttttggtggagttttgttacttgctgtttatttgacctggt

SEQ ID NO: 26536 - DNA, 2919 bp, Oryza sativa
  ref <308>: DATABASE ACCESSION NUMBER: AK101978
  ref <309>: DATABASE ENTRY DATE: 2002-08-28
ggtgccctcctcgccgtcgtcgctcgctgcccatttcatcccccgcacggcacgcgcgggacgaaagcaaagcacgcgcacacactcaaacccgcgcctcctccgctctcgtccgtcgcttcggttcggttccggctcgatcggggaggttcctcggggcgaccatgtcgtcggccgtcgtcgcgtcatccaccacgttcctcgtcgcgctcgcctcttcggcgtcacggggagggcccaggagggggagggtggtgggcgtggccgcgccgccggccctgctttacgacggccgcgccggaaggctagccctacgggcgccgcctccgccccggcctcggcctcggcgtcgggatgcgggcgtggtgcgccgcgcggatgatggggagaacgaggcggcggtggagcgggcgggtgaggacgacgacgaggaggaggagttctcttcgggcgcgtggcagccgccccgctcgcgtcgcggcggcgtcggcaaggtcttgaagcggaggggcaccgtcccgcccgtcggccggtacggctccggcggtgatgcggcgagagtgcgcggggcggccgcgccggcgccggcgccgacacaggacgccgcctcaagtaagaacggagcgcttctcagcggccgcgacgacgacacacctgcctcacggaacggatcggtcgttaccggcgccgacaagcctgccgccgccacgccgccggtgaccataacgaagctcccagcgccggactcccccgtgatccttccatccgtagacaagccgcagccggagttcgtcatcccagacgcgacggcgccggcgccgccaccgcccggttcaaatcccaggtcgtccgctcctctccccaagcctgacaattcggaatttgcagaggataagagcgcaaaagttgttgagagtgctccgaagccaaaggcgactagatcttcccctattcctgcggtagaagaggagacgtgggatttcaagaaatattttgatctgaacgaaccggacgccgcggaggatggcgatgacgatgatgactgggctgattcagatgcgtcagattctgagatcgaccaggatgacgattcgggccctttggctggggagaatgtcatgaacgtgatcgtggtggctgctgaatgttctccctggtgcaaaacaggtgggcttggagatgttgcaggtgctttacccaaagctttggcgaggagaggacatcgtgttatggttgtggtaccaaggtacggtgattacgcggaagcccaggatgtaggaatcaggaaatactacaaggctgctggacaggatctggaagtgaaatatttccatgcatttatcgatggagttgattttgtgttcattgacgctcctctcttccgtcaccgtcaggatgacatctatggggggaacagacaggaaatcatgaagcgcatgattctgttttgtaaggctgctgttgaggttccttggcacgttccatgcggtggtgtgccctatggggatggcaacttggtgttccttgcaaacgattggcacactgcactcctgcctgtttatctgaaggcatattacagagacaatggcatgatgcagtacactcgctctgtccttgtgatacataatatcgcttaccagggccgtggcccagtagatgaattcccctacatggaattgccggagcactacctggatcacttcaagctgtacgaccccgtcggcggcgagcacgccaacatcttcggcgcgggcctgaagatggcggaccgggtggtgaccgtgagccccggctacctctgggagctgaagacgacggagggcggctggggcctccacgacatcatacgggagaacgactggaagatgaacggcatcgtgaacggcatcgactaccgggagtggaacccggaggtggacgtgcacctgcagtccgacggctacgccaactacaccgtggcctcgctggactccagcaagccgcggtgcaaggcggcgctgcagcgcgagctggggctggaggtgcgcgacgacgtgccgctgatcgggttcatcgggcggctcgacgggcagaaaggtgtggacatcatcggcgacgcgatgccgtggatcgccgggcaggacgtgcagctggtgctgctgggctccggccgccgcgacctggaggtgatgctgcagcggttcgaggcgcagcacaacagcaaggtgcgcgggtgggtggggttctcggtgaagatggcgcaccggatcacggcgggcgccgacgtgctggtcatgccgtcgcggttcgagccgtgcggcctcaaccagctctacgccatggcgtacggcaccgtccccgtcgtgcacgccgtcggcgggctgagggacacaatgtcggcgttcgacccgttcgaggacaccggcctcgggtggacgttcgaccgcgccgagccgcacaagctcatcgaggcgctcggccactgcctcgagacgtaccgcaagtacaaggagagctggagggggctccaggtgcgcggcatgtcgcaggacctcagctgggaccacgccgccgagctctacgaggaggtccttgtcaaggccaagtaccaatggtgaagagaccatgtccgcccgcggtctccgcctgcgcgttcggcagctatagctatagcctccctgaagaagcttggcgctgctgtggaggtgcgactcggtggcggtgtggcgccggcgccggcgcttgcaggggaggtgtttgtgctgaccgagctgtgcgttgaggtgcgcaaattagcttccggtttgtgtgtttatggcgaggcatggtggagttgagggagtattaagctttgtttcagatgcatcatgcatgcgtaataggatgttgtatttaataatgtgtttgttatgtccattgatgcgatgttacttcttcatt

SEQ ID NO: 26537 - DNA, 1246 bp, Oryza sativa
  ref <308>: DATABASE ACCESSION NUMBER: AK101979
  ref <309>: DATABASE ENTRY DATE: 2002-08-28
gttgggttgtcgcatttgcagacgttaggggtggtggggattcatcatggcatcttgcaggcaccaaagctaacaagataaattctatcaaagattttgctgcatgtggtacacatctcatcaaggaaggatttgttcacaaaaatagactttgtgctataggttgcagtgctggtggcctgttggttggtgcagtcatcaatatgctgccggatttattttctgctgcagttctaaaggtcccttttcttgatatctgcaatacaatgatggattctactttgcctctaaccatcttggattatgaagaatttggtgaccctaatatctccactgaatttgatactattcgtagttattctccttatgacaatttatctcctgacatatgctacccaccggttctggtaactgcctcatttaatgatacaagggtaggagtctgggaagctgctaaatgggtttcaaaagtgagagatattacatgccaatcctgttcctggtctgtcattctcaaaactaatatgcaaagtggtcattttggtgagggtggacgcttcatgcattgcgatgagacagcttttgagtatgcatttctcatgaaagccttggggttggatgacaatgacagctgcaaaatagtgtgatagttttcagggctttctacgcttcaatgttttgtgcaagtgtgacatatgactgcagaaactgattacattgtgggtagcacgtgtttttcttaagacaggagatcaactgctccgctatcaaaggtcagtagcctgcactatctgcggtagtagcatcaataaaatgttactacagcggttgaaaatatctggtatcttgtattctgattatctagcctttctcacaataaatgttatgctaaagcactattggttacatcaaattgatttcttcgaaggagatccatcaccaattcatgatgaattatgaccaagttgaccttccaacatgataggtgatgttgatggtgctaaatacagagctacttgagcccccgcaaaaaagtagagagtggatgtcacttttgacttctgcatgatatatcaggctattgtctgttcctttcttattttttgctcatctgaatgaaaccatcttttaacaagcttccttgaggcgtcatcagattgcatgtaacactcatatgtacattttgtgatgtagtccatatctgcgagatacacatggcctatccagctacttcatatgacttgtt

SEQ ID NO: 26538 - DNA, 3223 bp, Oryza sativa
  ref <308>: DATABASE ACCESSION NUMBER: AK101980
  ref <309>: DATABASE ENTRY DATE: 2002-08-28
gccgacatcactattattggtgtgtctatgggtttaccaggttcccattgatagtgtgcaaaccacggcgcacactctggccggtcgtcagttcaaccacccgccaactgttcgatcaaatgcctccagggcgtctactttgccattgcaattcccatctgcgagaaaagcttcggcgagcaaacacaggtcttgcatttgaaaatatctgaactgagagatcgagcactgaatggcagagtctgtggtgtttggaatcctatgcaaaattggatcaatattggggtcacatctgacgcaggcattagtttcacatctggggaaggaggtatcagttttaattgaggttgaaagcattgtaaagcaaattagaagtgagtttaggttgatgcaatctttcctgcaagatggccaagaaaaagaaagctccagcaggcaggctgaaacctttctgcaggaagttcagcagatagcatttgaagttgaagacatcctggatgaatttgtctattattttggcagaaaagaaaccccatctgtggaattgttgaagaacttcttcagaaaatctgaaagtgtgatgccattgcgcagaatagcagcagaactcaaagaagtgcagaatcgtctccaaaatattcgaaacttgaaacttcagtacaatattgacttatctgaagaaagtgccagctccatcaggtatgaagatagcaaaggtcacacactccaccacataatgcataataagaaacttgtcggttttgtaaatgagcgacagaagctgcaagagttgctaatggcaaatgaaagatcatgctcaataatttccatatggggtatgggaggttccggtaaaactactcttgtcaaaactgtttccgaaagcaaagctagcaagaaccgttttgattgccagatctgggttaccgtgtctcaaacatatgacattactgaaataatgaggaagattatacagtgtgcattgaaggatacgtgctcagctgacttaggaagcatgagtagtgaaggcgtagtgctgatgctccaggagactttgcagggaaggacatacatgatggtcttggatgatgtgtgggatacaaatgtttggttcagcttggaaggctttctagatgaaagcagcatcagaagtaaggtggtaattactactcgcataaatgatgttgcttctttggcagaagacaagcgccgtcttcaactacgaggattagatgaggcagagtcttgggacctcttttgcatgtgggctttccggcacggtgaagatcaaacatgtcctcctgcaatggaccgagtagcaagacagattgttggcaggtgtgaaggtctaccgttggctataacggcagtaggcaacttgctatccttcaaacggctggatttgatggagtgggagaaattctataatcaactgaactgggagttgcacaatcgcttggataaccaaggactcagcatggtgactcgactccttggtttaagctacaaacatctaccggtccacttgaagaactgtttccttttatgcagtatcttcccagaggactatatgatacgcgggaagcggctatgtaaactattagtagtagaaggtcttgttgaacaagaaaaaacatgacactggaggagattgcaatggagtacatagaaaagctagtagatcgctgcctgcttcaagttgctcggagaaataagcttggaagagtatgggaactccagatgcatgacattatcagggagctggcaatttcaatatccgaaaaggaaggattctgcatgatacataataaagctcagagatcggtggttgagtgcgagcctcgtcggttatcaattcatgagaattcagtcagagtccagctaagtataaatgcttcacgtgttcgttctttctatcaatttgatatcgattgttcctccgtgtcaaaagtgcaatgggtatcaaggactgctaggtacctgaaggttctggaactaggtagtgttccaatcagaaaactgccgagagacattgggaacttgttcaatttacattatttaggattaagacgaaccaagatcaagcaacttcctgaatcgattgacaggctccaaaatctccgaactttggacatcttccttactgaaatagcaagtcttccacgtggcgtaaccaggctaaggatgctacgccatctgattgctggaaaggctgttgcttcttattttggcctcgaagatgtcttcacaggtgtcaaagtccccaatggattatggcgatcactggatctaaatgtcctcacaggcatttctgcaagcagcaatttggtggaacaattggccagctttacacagctgagatcattgaagttgacagacgtaaaaaatatccactatacaaagctatttgcatccatcagaaagatgcagcttctaaagaaccttcttattggaactgccaatagtgatgagtatgtcagcttagaagccctagatcctgcacctcagaaccttgaaatactctttgtgaaaggtagactccatgatagggttataggctctgacctatttgaggcaaataggctaaccctcatggagttgactcttgaaaatagcaggctgagcatagatccacttccatcactatctaatttctgtaacctgacccttcttggtctgttcaaccattatattggagaaaccttgctctttcaggcagagtggtttcctaagcttcatacacttactttggctgagctgcaaaatgtcagttcaatagtgattgaaaagcatagcatgccaaatctctataactttgctctcatctgcttgacaaatttagaggatttgcctgagggcatggaattccttgggtctgttgaagagctcagtttggtgggcatgcaccaaaaattcatggaacatgtacaaggttcctcaaatgtaaaagtcaaacacattcctgtagttgactactttgatcaaaccaaagggaggtgggatcgactttctccactttatttcgaagacgaaggcactaagaattgaaattaaacacaagcaaagaaaagatggattacctgcactccgagcttatcctattccccactcatttctactagagatctttctactatgttctctctattggcatccaaaaatatttctatgtattttgccactcttacattagtatccttttgccatctccattcggttgatg

SEQ ID NO: 26539 - DNA, 2663 bp, Oryza sativa
  ref <308>: DATABASE ACCESSION NUMBER: AK101981
  ref <309>: DATABASE ENTRY DATE: 2002-08-28
gaattcgaatccaccggaaggggagaggcggcgcgacgcgaatggcgcggcggcggcgggagaggcggcagctcgctcgcctctgcgacctcgtcgcctgcgcactcctcccccacctcgtaagcagctctctgcactggcctctgatgactctggtctcctagtcctagcctatcactccgtgcgcgccgctcacaggaacccaagccgccggccacgcggctcacacgggaggacgagcggcggatcctcctcgcgctctcccgagtaagtaaggcgattcgaggatgggaagaggaagaggaggaagaggaggaggaggacgacgacgaagggtgcgaattggatcaggagattatttcatgttccgcggaagttcacagttgcagtttaccagctaaccagcattttgatgatggatttagctgcctggccaatattatctccatattggttggcttctttggtttctgtagcagttatgttaaacactcagctgggaatatcctgattgtcatctctgactctctaatgaagtttgaggttgtttggattcaatttgttgagctggtctggatagctatacatacagtatcaacatgcgctcatagtgctttaccttctttaattgactccatcagcagtttcagaaaagactcgatttgctattgctctgttatggaaagtctaagtcacgacattattatttcaagcaccaatatcacaagcttcgtggaattacttcagctacggtgtcttgatatcaatgggcatatggtggccagtctctttcgagtactgcacactattttaaagttccttaaacacactgataatgaactgaaagaggacttcatttgtatatctgctcatcatattcttatggttgattgggatttgtattatcaactcaatgttggagaacctctaaaccttgtcaaggatagcacatttagcttgagtgatgatttgaaacagttaggatttctttcaagcagtctcctccaactattgtgctctttacttgagcaaagtgacctggaagacaacaatggacaagatatctatgctaagcttgtaggtgtaattcctaagttagtggctatattaccagagcatcaggatgcccccaaaagtctctctcagtacttaaagcacaaatttctgatgataatgatgcggctaaagccttacatccagaaggattgctcatatattgtttgctgcctgaaattacttcgacaacatttccaggatcttcttcatgaacctataatgcaacatattgctaaaccagaaaactgtttggaaggatccccatttttgttgagcactgtaggtctgggtgagactcatgataaatccactaggcacttacaaagacaggctatgtatttgtttcttagcttttgcatatgtttggctcacaatggcaatgacagtgcactgcaatgttcatgcaagagagacgatcaaatgcttggtcacaaagttctagactgcagtgatcattgtgactgttttgccttatcagaaatttcagactggtttcagagatgtttcttagataagatttttggcttcaaatcatctacagacaatgctctgtgctttctgcagttatatatggaggaggatgacatgctgttcaacgttctcttacaacttcttgatgctccactcatttcctcgaaaatagatagcatggagaatagatgggcttctgaactgattggtggcaaactgttctcgagcatttttgacccagttcatgttttccatctcttgcttttattgctgcactatgatcacttggtgcttgttgattatctgatatctaaagatgtaggtgtgcattgcgcacagtatctgttaaggtgcttacgcctggtaacccaatgttggcattctttcactgatgattcaatttatgaggcaaaaatagagaaacttaactttaaaaggcagaagaccttcaatgatgcaaatagtagcagtggtagctcaattgaaggccctaagttaggttctgcatgtcataagaaaagcaagaacaaacacaagctttttctaaatgctaaagcatgcctcctttcattgaagagaacactggaagatcttcataggaagggtctgttcccttacaatccaaagcctctcctcaagagcttggccaggtttgaggagctttgtgagcaggattgaaatttgagtagcatgttgttacatgctactcgtggaatgaccttctggtaatcagtttatcctttgctctggtctttatgttgtatggtccgattcatgcaacaaacaaatgttgaattaatcttctgttctccacaaggctcatccgccgtttggcatccttgtcagggtggccgctgcaaaatggaggtgcaatcagcttgattatcttctcttgatttactagtatacctttagccctacttttctgggcctaatttcatgttgcttatgagttacatgaaccattagcagtgaaatactcattctcctgtctcgccttaaaactgattgatcattttcatacgtgaacactagcctgccccttgaaacgaatgaaattatcctgtacatgttactttctaactgaactctcctgctacatcaatacatataaggcatttcttgcctaagttttc

SEQ ID NO: 26540 - DNA, 2421 bp, Oryza sativa
  ref <308>: DATABASE ACCESSION NUMBER: AK101982
  ref <309>: DATABASE ENTRY DATE: 2002-08-28
ggtgacctccccgccggcggcggcggcggcgactccaggcagtggcctcgccgtcctcctctgcggcttcaccggtggctcccctactgtccacggcggggcacgggcggcttcccggccgggaccccgattctctccgacggcgcaaatggtggcgcggtggcgccggcaagtcgtcctctccgctccggccgccggtggtgcggctgatttcttcggggacatggtcaccaaacaactggagcctattcagttttggaaggtttttgatgccggagagagactctatcctgctcaaggtccaggttatcttctccatcttaggcacagctccgtcagtgaaggtgattttgtttatggcagggcagtcgacagtaagtaaggtgagcttcaggaactcttctttcttgaaggtaagtttgctttcattgtaagaactgtccaagagggaaaatgttttaaacactcgggtgaacgtccacccgtttcttgcatgtcatctaaatggttataaaaaattttcaagtttggttttttggcaaggacttgcagatcaacttggttcagcattgtactacgtgttaagatattaggggtagtttagtattttcgcatctcttttgtacatatttatatttccccttcaggggtagatcaatgaactgtggaaaatccccaaattcctctcctaaattacatggtatcagagcaaagatccgaaccctagctcaatccggtgtcctcaccggcgcgtcgatggcggctcgccgccggcgagccatcaccttgtcctcacgtccttttggcttttcttcatcaagcagtctcttctcaacgtcattggcaagcagctaagcagtcagatgcagcaagtgtccaaatccaagcagcagcaagcaaccattacaaagtccaaatccaacaaggcagcacgagaagtagcagccgccggcagtaacttacctcatcctcagctcgtcgtagtccatcctcgtctctgctgccggtcgacccgtcgtcatcaccttcgcgccggttgctgtcagatccgtgctcgccgtcggtgagccgtcgtcgtcgtcttccgatctagtctgctgttggtcgcctcccgccgctggtcacgccggcacgctgcccatcgcaagccgtcattctccgtcgtcaatcgtgggaggctgccactggccccatcgccagtctgtgccactcctcccgccggcttttgtccttgtgcccgccgcccgtcgcggcgccccatccaggctgtcgtcgtgacaatttgtccccatgtctgcatctgcgtgtgtggatgttctgctcatgctgctgcaccggacgaggccatcttcaagcagtaaccattttttggacttccatcgagcttgctgcagtagtatgcgttgtcgttcagcaaagctagcagcagacattccggtttgtcttttggtctatcatagtgtcagatcgaacccttcccatatactaccatcacttctgcttgctgcattgatgtgcttattgctgatgcctatccatattccatagtacaatgtgatatctctgtttgttcgtcaaatccatccttttgattttagtctgccaagttgtgtcattatatcatctctgttgtgctatcatcttagtcaggtttatcatcacagtgcgacttttgctaggtgtctgctgttacaatattgtctctttttcatctgaaattcatagtgtccatctaccgaagtccattgcatatcattcaatttgtcaaagttatgccagttcatctcttcatcgtcttttctacaccctaactccctgtcagagttggctttcatcatcaccagctccccattggaactggccttcattgtcacttcatcgtctccatgtcggagcttgtcatcatgatcatcatcaatcagcgaaggtccgaagaacagtttgtgaagggccttcatcaacatcatcatcagtcaaaggaccgaagaacagtttgtgaagttccattgtcatcatcatcatcaaccacatttccaaatcaataaagagccgaagaacggttcgtgaaggcttcaaggtaccaagggccgaagaacagtttgtgaaggctccgagatccacttcattgagaaggggatatatcttttcttcatcatcatctaagaattggcacactttgacgacatcatcaagactttaaagataggctaatatttagtttgtgttctcatgtttagttacactccaaatgcaatattattgtatacacattgcatttgagtgggggtgttaagatattaggggtagtttagtattttcgcatctcttttgtacatatttatatttccccttcaggggtagatcaatgaactgtggaaaatccccaaattcctctcctaaattacaaagaatgaccttggc

SEQ ID NO: 26541 - DNA, 3073 bp, Oryza sativa
  ref <308>: DATABASE ACCESSION NUMBER: AK101983
  ref <309>: DATABASE ENTRY DATE: 2002-08-28
gtggtgaaaaaaagaaagccgcgttccccactcgccgccgcgccaccccgcgacgccgctgccgccgcggattccttcggcgccgccaccgccgcggtaagagatggacagatttgtgcgagtttacagtggcggggagctggtgaagggtccaaacggggtggagtttggcaacctcgccgaggagggtttatggttcaaggcgaagcctgcattcgatgaactgattgatgccgtgtacaagaagctcgggtgggtgcctacgatgctcagcattcgtgcgcagggaaggttgaacgttggtggtggtgctcatcggcacttcatcatggtgcctatcgatgatgacatgtcatggagtagctatgtgaaagctgttttcaatgggactgagtggaactgcctagagatttttgttcaagcagaaatttgttccttgacagagggcatatcctcagagagagcactaatggctatcaaaccgctttatgcacaacgtcaaaatggccaaccgcagaatccagaacaggacatgtcgtttgttatcccttcaacggtgaatgttagtccactaaatggacatcctcagaacacacggcaacgaaaaccaagaaagagcaccaggaccttctctgatgatggttgtccagatcagaatggagcttcagaagcagttgataccacttcctatgatttaattgggcagtatgatgctgatcatcgggctcgtgctttagcatcaggccaggtagatcaaagagtacctatagcatttatattacaatcttttgtcgtgtaacaaactgttgatttgcaatttccaatgtttggtacagcatttgactgagctcaaccctcgtacccgtgaacctcttcgctttgacaggaggtatgagcgttaccttaggcccgctggcctgatgggactggcaaacatttgtagggctggtctgccctccattgatcgggcactcgtctctgcactagttgataggtggagacctgaaactcacacttttcacatgccttgtggtgagatcacaatcacactacaggatgttgcaatgattcttggattgccaatcgctggccatgctgtcactgtaaacccaacagagccccagaatgaattggttgagcgataccttgggaaggctcctccgccggataggccacgtcctggattgagggtttcatgggtcagagctgagttcaacaattgtccagaagatgctgacgaggagaccatcaagcagcatgccagggcatacatccttagcctgattagtggtctgctgtttcctgatgcctctggtgatttgtataccttctatccctttccactgattgctgatcttgagaatattggttcatacagttggggttccgctactctggcatatctctacagggcaatgtgtgatgcttgcaggaggcagtcagatggaagtaatctgactggttgtcttttgctccttcaattttggtcatgggagcattttccaattggcaggccagacctggtgaagctaaaatacccaaatgtggaggagctagaggatgagagggatagacccacagttggtttacgatgggttgtgggggtgtgcgcccgtcgagcagctcccgcacgttgctatgagcacttcacgaatgagtttgacttgctaacggatgaccaggttgtttggtgcccatatagggaggaacggatgaaggaactacagctagcccctatttgtacccaggattctcatttgtggctaacccgagcacctctactttacttctttatggtggagatctacatgcctgagagagtgatgcgccaatttggcctccatcaggtgtgcccacctccattgcgggacactagtgcggagcttcactggtgccgtcgtggaagggttcataatgactggcacagaagcacaagtcttttgtggatatgtgggaagcaaaggagcaagatgttgtcatggaagaccggccatatgaccacagcagttatatggattatttgcggtggtacagaagatcaacacgtattcgcctgtgcacaccgaagaggataagtaatggtcacaagggtggggcatctggtgggagtgcaatttctgattctgaagatccttttcgtgcttctcagcttcgttacacccccagggctcatttgatccactcagtgaccgacaaactcactgtccttgcgaaggaggcagcttctcaaaaaagttgctctagaggcaaatgccgtgcttttgttgaccaagtcaccagaacatgtgtagaagttattggggaacttggtggatcatcactttgcgacattgtggatctggttccatgctcatcgactgctgcaacaactgcagctgaaccagaggcagagcaacagagggataaagaggaagatatacatcattccatggcgcctgatcaggaaactgagtctggcctcggttctgagaagcgatctcgatcacggactcgccgcacacaggcagacaggacagttcaaacaagatcaaccggaaagaggaagaggggcagatcaggttcgagatgagaattgcacgccccgcggtttatgtaccataagaagctgtgggatgaaggaacggcatggtgctcaaaccagcttatcatttcatgaccctccacagttgaagacgaacaccattgaagacaaatttgttcttctagacagttgtaggatgacattaggaaatttatgcttgcatgctatacagtaattatttcagccattttgctgtcgatggtaatgcaaagccactcccagacatggtcaaattctgaactatggtcactcccagacatgggtgatgtttgttcctggtgtaaatgagctttgttcagatggcatttgagctttgttcagcgagcagcctttggtttaatatacacgattcagcatttcagctaaggtgattgtcagttttagctgaatcatcatgtatggttaaaactatcatcattcattcattcctgatccattcagttaccaatggagagcaggagtggaaacggagttttgttctgttattctgtc

SEQ ID NO: 26542 - DNA, 1698 bp, Oryza sativa
  ref <308>: DATABASE ACCESSION NUMBER: AK101984
  ref <309>: DATABASE ENTRY DATE: 2002-08-28
gatcctctccgcagtccgcacccgcgcgcgcgcgctcgactcccgcaccagccgcgtcatggcgccattccagctgcgcttcggcctccggatgtccccctcgcgctcctccgacgaggaggaggaagacgacgaggacgaggaagggttcgagtacgaggagatactgagcgacgacgggacggactcgccgccgccgctgatgatgcaggcggagaagggagggggagggctggtcggggcggtggtgggggcgctgcggaggtcgctggtgatgtgcagcgccgggaaggtcggggaggaggaggacagcgaggacgaggaagaggaggggatggagatcgggcggcccacggacgtgcggcacgtctcccacgtcaccttcgaccgcttcggcggcttcctcggcctccccgccgacctcgagcccgaagttcccagccccacgcccagcgccagtgtaaatgtatttggtgtttcaccaacctctttgcaatgttcatttgatcacaaaggaaatagcgtgcccacaatactgttgatgatgcagaggaagttgtatgaacgagagggacttaagatcgaagggatcttcagaattaacgcagagaatagccaggaaatctgtgtcaggaaacaactaaacagtggtgtggttccagatgaggttgacttacactgccttgcagggttgataaaggcatggtttcgggaactcccaaccggtgtattggactcactgacaccggaacaagtaatgcattgcaacacagaagaggactgtgctctccttgcttcaatgctaccaccagtggaagccgcattactcgattgggctatcaatctgatggctgatgttgtggagcatgaaaactacaacaagatgaatgctagaaacatcgctatggtctttgcgccaaacatgactcagatggccgatccattgactgccctgatacatgcagttcaggtcatgaatttcctcaagacattgatcttgaagactttaaaggaaagagaggcagccggaacacctaagacaacggaaccatgctccggttctccaaacggacaagataaacctccgacgccagagaatttggagagacccatcatttgttcagatcagaaaggcatagataaacctatgtttgatatggctacttgtgatcagctgctgtttggacctaaacaattccttgatcatcgtgagaacaacaaatttgaaggaccggagaagcatgacataggccaaccgaagcgccatagcgaagcttctcctcttggtaatgattcgaataaccaagtcagcagccctggaaaagaatttggcaacagaaatgtggaaggcctgttcgacaaatttagttttaggaaaggtgtcgagaggctttgcaggcaccctgtgttccagttgagtaggtccatgaagaagtctgcagacgttgtggtctttgatgctcctggagaagcaagacaagcttggggtttgatatgataatggttgtatatgtagttggtgtggatgtaatgctatcttttctctgtcttgtttgtgtgagcagaagcgattagcatgttagatttataggtgctgcaggttgttgtgtgcattataaccatttacttctgacgaaagcgtctgcctgtggctgctacaagtaaacgaaagccagctgaattctggctcagtactgc

SEQ ID NO: 26543 - DNA, 1821 bp, Oryza sativa
  ref <308>: DATABASE ACCESSION NUMBER: AK101985
  ref <309>: DATABASE ENTRY DATE: 2002-08-28
gatctatcccccctctactcgcggctgcggcggcaaggcggcgagacgtgggagagggatttacaggtagagggagagggtggaggaggagaggctgaggctaggaagcggtttcgccatggcgagcgtcgacccgtcccggagcttcgtgagggacgtgaagcgcgtcatcatcaaggtgggcactgcagttgtctccagacaagatggaagattggctttgggcagggttggagctctgtgcgagcaggttaaggaactgaactctttaggatacgaagtgattttggtcacctcaggtgctgttggagtggggcgacagcgacttaggtaccggaagcttgtcaatagcagctttgctgatctgcaaaagccacagatggagttagatggaaaggcttgtgccgctgttggtcagagtggactgatggctctttacgatatgttgtttaaccaactggatgtctcgtcatctcaacttcttgtcaccgacagtgattttgagaacccaaagttccgggagcaactcactgaaactgttgagtcattattagatcttaaagttataccaatatttaatgaaaatgatgccatcagcactagaaaggctccatatgaggattcatctggtatattctgggataatgacagtttagcaggactgttggcactggaactgaaagctgatctccttattctgctcagtgatgtggatgggttgtatagtggtccaccaagtgaaccatcatcaaaaatcatacacacttatattaaagaaaagcatcagcaagaaatcacttttggagacaaatctcgtgtaggtagaggaggcatgacagcaaaagtgaaggctgctgtcttggcttcaaatagcggcacacctgtggttattacaagtgggtttgaaaatcggagcattcttaaagttcttcatggggaaaaaattggtactctctttcacaagaatgcgaatttgtgggaatcatctaaggatgttagtactcgtgagatggctgttgccgcaagagattgttcaaggcatctacagaatttgtcatcagaggaacgaaaaaagatattgctagatgttgcagatgctttggaggcaaatgaggatttaataaggtctgagaatgaagctgatgtagctgcggcccaagttgctggatatgagaagcctttggttgctagattgactataaaaccaggaaagatagcaagccttgcaaaatctattcgtacccttgcaaatatggaagaccctataaaccagatacttaaaaagacagaggttgctgatgatttagttcttgagaaaacatcttgcccattaggtgttctcttaattgtttttgagtcccgacctgatgccttggttcagattgcatctttggcaattcgaagtggtaatggtcttctcctaaaaggtggaaaagaagctatcagatcaaacacgatattgcataaggttataactgatgctattcctcgtaatgttggtgaaaaacttattggccttgttacaactagagatgagatcgcagatttgctaaagcttgatgatgtcattgatcttgtcattccaagaggaagtaataagcttgtctctcaaatcaaggcgtcaactaagattcctgttcttgggcatgctgatggtatatgccacgtatatattgacaaatcagctgacatggatatggcaaaacatattgtaatggatgcaaaaattgattacccagcagcctgcaatgcaatggagaccttactagttcataaggatcttatgaagagtccaggccttgacgacatattagtagcact

SEQ ID NO: 26544 - DNA, 1181 bp, Oryza sativa
  ref <308>: DATABASE ACCESSION NUMBER: AK101986
  ref <309>: DATABASE ENTRY DATE: 2002-08-28
aagtgctgctgctgcaaaggaaaagaagaagctggaaaggaaactggagaaggacctcgagaatgagaatggaggtgctggggtctattctgctagtctcaagaagcattacttattggctgatgatgaatggaaggaagatattctgcctgagatattggatgggcataatgttgccgattttctggatccagatatactgcagaggtgtgaagagttggagagagaggagggtcttcgcctcgaagaggaagctgcacaggaagctttccagattgatggccatgaactaactgaagagcagcgtgaaatcttgggtcagattagaaagaagaaggcattgctcatccaagagcatagaatgaagaagaggactgcagaaagccgtcctattgttcctagaaagtttgacaaagacaggacattcacaactaatagaatgggtcgtcaactttcatccatgggttttgatcctagggcagctctggaccgagcccgcagccgttctagaggtcgcaagcgtgagaggtcacttagcagagctgctagtgatggtgatgatatggatatagatggccagcaatccagcaagaaattgcgcgcgttgtcgaggtccaggtctaggtcaaaatcaagaccacctgaggaggttgttccaggagaaggattcaaggactctgctcagaagaagaaggcgattaagaaagctaaggattctgtgaggaacaggaacaaggaggctcgtcgcggtgaggcggatcgtgtcattccaactttgaaaccaaagcatctattctctggaaaacgttctattggcaagacgagcaggcgataagtaattcagcactgctgcttagcatcactggtttcaggaagagcagtataattgcagttcggtgttgggattagggtgaaggaaggcctgtttatccaatctttaggacttgttctacgccgttattcatactgtctggtggattggtgttgtatcgcgtctcatccttcgactgagacataattttgttagcttatgtttcagctttatgctacattatatatggtttggctagtattaatagagtggtttaatttcgtcgaatggtactcactaccatcaatatcttataattgtgactttgttatacttatattccagtcctgttctactgtaccgatgctct

SEQ ID NO: 26545 - DNA, 1408 bp, Oryza sativa
  ref <308>: DATABASE ACCESSION NUMBER: AK101987
  ref <309>: DATABASE ENTRY DATE: 2002-08-28
agcttcgacgccgagcacaccgacacggcgctcgagcgctacgtccccttcgtcatggccacggcggagcagctccagcggcgggagcgcgtgctcaggatcttcatgaacgaggtgcgctcgtggcacggcttcaaccaccaccacccggcgacgttcgacacgatcgccatggaacccgacctcaagaagtccatcgtcgacgacctcgaccgcttcctgaagcggaaggagtactaccgccgcatcggcaaggcgtggaaacgcgggtacctcctccacggcccgcccggcaccggcaagtccagcctcgtcgccgccatggccaactacctccgcttcaacctctacgacctcgacctctccgaggtgcgcgtcaacgccgcgctgcagcgcctgctcatcagcatgcccaacaaatccatcctcgtcatcgaggacatcgactgctgcttcgacgccaacccaagagaagcccacaagatcaccacggcggcgctcgaccaggccgaggacttcgacttctcctcgtcggactccgacgacgccgtcggcgcgccgcccagagcgcgccgcgcgggagatctccagcagcagaagctgacgctgtccgggctgctcaacttcatcgacgggctgtggtccacgagcggcgaggagcgcgtcatcgtcttcaccacaaactacaaggagcgcctcgatccggcgctgctccggccggggcggatggacatgcacgtctacatgggctactgcggctgggaggcgttcaagacgctcgcgcacaactacttcctcgtcggcgaccacccgctgttcccggagatacggcagctgctcgccggcgtggaggtgacgccggccgaggtgtcggagatgctgctgcgcagcgaggacgccgacgccgcgctccggggcctcgtggagttcctccgtgagaggacgcggcggagggcaagacaagaggcagcgatcgacgacaaccaagtggtagcagaaaaaggcaatgcagcttaacaaatcttcagagaatttacttcacaataacgagatgagatgattgggttgcatgatcacgacagtagcaaacttggtactagtagtacttactgaattaataatcatttgtcatgctcactataatttctgttgcaaatctgcaagcaatggcatagctaggcaaggcaacagagaacagaagagagtgcagagcgtctggtcatggattaactgttgctttctgaaaagctgggcttatcttaaaacaaatgatgagctgtggttttagtttcaaccccagcctaacttaacagagtagcatataaacatatgacaggaaactactccgcgttggaggggtaagaaatgggactctgcattttctgaataatgagacactttctgaatc

SEQ ID NO: 26546 - DNA, 1680 bp, Oryza sativa
  ref <308>: DATABASE ACCESSION NUMBER: AK101988
  ref <309>: DATABASE ENTRY DATE: 2002-08-28
gtctttgccacttgcggcggaagcgccactctctcctctcctctcctccctcccccccacccatcccccgcgccccacgcgcccacgttggcggtgcggttgatccggcaacagcgggcgcctcctcctcctccgcccccaaccaccacccccacccctgcggcgcccatgggtgtccgttcctgagcacaccccacgcttccgctccgcgcatctccgtgggtgggttgggcatataccttgcttcagtcgctttcccatctcttgcttcgtcctgccttcttctttcttccgtgatcccggaacccggtggtcgccgccgcctcggtggatcttgctcggccctgcggggtgctcaggattaacagtgaggggacattctgtattcagtaatatcaagtttctacaaataaataggtgtaggaatacctttgatgccccatttacactgtttgtgcaatgtctttatattatattttctgtgggaacttccatcaactaaggaattcaataggaagctgttctagtaccggtttgcttaaatgcggattaatctatagaactgtacttcagaacagaggaaataaaactcgaccaatcagtacgacaatactagcaagaagtacaagaaaagaaagtaagcagtcattcaaaaccagccgtcatttgcatagtgaatcggttgagtcatcgattgaagtgctcaaacagtcagatcttgagcatcttaaatcacttcaatgctacaatattccacaaaaggtttccggagtgaagaccgattggcctgcaactatccttgtttttgatattgaaactacaggcttctcacgccgctatgaaagaatcattgagtttgctgttcgggatcttatgggaggaaagaatagcactatccagacactcataaatcctgagagagagataaaaaatgcatatgttcatggtattagcagcagcatggtctgcaaacctgatataccaagatttcgggagtttatccctcttctattacagtatgttttgagtcgtcaaatggctgataaaccagttctgtgggtcgctcataatggacgtagctttgatgtaccatttctcatgtatgaattccaacggagtaaaatagagatgcctggtgactggctatttgtagatacacttccaattgcaaggcaattgattggttctgatggggaaaaactgaaatctgtatctttagacaatctgagggagcactacaagatcccattggcagggagcgctcatcgagcaatgcaggatgtgatcaccctctgctatgttctccagaagttgaccttcgagctgaaactaactgttcctcagctccttgagaggtcattccgggtttccgatctttcaatccctcgccctggaaaatgactgcagttgcctcgccgaaaggatcacacagaaacctggattgtttcattgtccttgtatccagtgctgttgtttcagatcccagctcatatgttattccgacaacagaataaggcaggcctgatcgttaccgtgatattaatcatttttagtttagtactgatacttgttgccccttgaaacattgattagacgtacatttattcaaagttgtaaagaccaaaacatgtcctggtttccaacctggaagaaatgaaacgttcttgactatctgtagtc

SEQ ID NO: 26547 - DNA, 1396 bp, Oryza sativa
  ref <308>: DATABASE ACCESSION NUMBER: AK101989
  ref <309>: DATABASE ENTRY DATE: 2002-08-28
gggtggaggcaaaggcgccgcgggcttggcttggctggcaccctctccttctcgtcttcggcttcgtcttcccccgtcaaacccacccacgccggccgccgacgccgccgccgttgcggcgggtgcttcccccgctcgcgtcggtgccggggggctgaggggaagagggggagggggagggaaggcacgcggctgacctcgtgggggaggggagggggggaacggggcgacaccacccacccaccgccaccatgtgctcgttgcccgcctggtaagattggaccagctgtgatttggggagcttaaagttttgatcagagacatggaaaaagtgatcttctgggcacatctccttaaatgcaagctttttctttcaaaagaaactcttgattggtgtgttttagctcgtgggaacacccaccacttctctctggtgaactacacatagtggttttatgctcctttatgctcaagaacatttggctgattcaatctttttcctgaagccatatttcaagtctgccaaacatctacatcacgtcatctctaaagaagcttcctttaagttgtagatgctgatcatataagctggggttaatacctttgctcatttgtttgtcatctgttgctccctagttaattaccactagtgttgcattgaggtcagggttcatccttgctatagtatgcaactatatactatggttgctgcttgatcttctgagtgaaccaagatccaagaaaacataaggtgctggggctactgttcaattgactggttgcatatatttgttcgtgctaatcgatagactagtcaattggaagtggtggcaaacacctgtctttgtgacttggctgtccaacaggaaaaggctagcacaaggctgacattgaccggcataatggacagattcaaaatgattaaggaagttggtgacgggactttcgggagtgtatggcgtgctataaataaacaaaatggtgaagttgtggcagttaagaaaatgaagaggaaatattattcttttgaggaatgcatgagtctacgtgaagtaaagtctttgcggcgcatgaatcaccctaacatcgtgaagctcaaggaggttataagggaaaatgacatattatacttcataatggaatacatggagtgcaatctctaccaacttatgaaggatagagtcaagcctttctcagaggcagaagtccggaattggtgctttcagatttttcaggctcttgcatacatgcaccagaggggttactttcatcgtgacctgaaacctgagaatctgttggttagcaaagatgtcataaagctggcggactttggtcttgcaagggaagttacatccgtgccaccatacacagaatatgtgtcaactcgctggtaccg

SEQ ID NO: 26548 - DNA, 2651 bp, Oryza sativa
  ref <308>: DATABASE ACCESSION NUMBER: AK101990
  ref <309>: DATABASE ENTRY DATE: 2002-08-28
gctcacccgcgccgcccacctcccctcccctcccctcctctcctagacccggtccaccgccgcccctctcagatccgccgttgccgcggcggcctcggcagctcggtctccccccgctagggtttcgccgtctccgatcggaggggcgcagcgatggatcagagcaggcgggcggtggagtcgtactggaggtcgcggatggtggacggcgtcacggcggacgacgacaaggtggcccccgtctacaagctcgaggagatctgcgagctcctccgcgcctccgacgccagcgtcgtcaaggaggtcgctgacttcgtcctcaagcgactcgacaacaagagccccgtcgtcaagcagaaggctttgcggttgattaaatatgctgttgggaagtctggtactgatttcaagcgggaaatgcaacggcactcagcagctatgcgccagcttgttcactacaagggacaccctgaccccttgaaaggggattctcttaataaggctgtccgtgaaactgcaaatgatgccattgctgctattttctccacagaggaacctaaacctgctgttgcaacagaaggtcttggcaagcgcatacagggttttggaaatactaattttgagccatcaagagatgacaaaaaatctttccttagtgagctaagtgaagtagtgggcattggcagtgcttccattaaacagggtttgagcaactttgctgcttctcattcatcaatgataacaaatgataatggtggtccgtacaagagcccaaaccttcgtaggtctctgaccacagaaatggataaatatggcaggtatgatccaagtgaaattcaaggcgagagccgttcttcatctggtgcttcaaagaatgttagttctggttcatggggtcctagtccatccagttctgcaccaactgatgatactggttcaagtcaaacaggggttaagactcgtgaagagagacttttagatacaattgcaacttcaagtggtgtgcggttgcaaccaactcgagatgctctgcaaatatttctaacagaagctgccaaattggacgcagttgctttgagccgtgcccttgagaacaaattgaattctcctttatggcaggttcgcatgaaggcaatttgtgtattggaagcaattgtaaggaaacaggatactgatccttattcaatcattacttcatatttctgtgagaacagtgcatctgttgttagatgctgtgagcttccgcacgtttctctcagagaaaaggcttcgaaggtcttaaatctgctggttggggaacaacctactggaagcaataatttttcagaaacaaagacaacagtacctgctgcacagatgcctgatttgattgatacaggggatcaagatgacccaggagctcaaaattcagctcaggaaggtagcgagaggataatggggaatagcatgtttacttcttcggttgatgatttgctgggtggtgaacctattgctgatataagtaccaccaccagtaatggtaatggaggtgatccgtttgcagacgtttcattccatgagacagcagatactaaggatactaacgacctattctcggggatgacggtagaagaaaaggcaacagcagccttgcatgatagctcatcaataaacaaaaatgaattgtcagatatatttggcagcagccctgagccattcttccaagaaagagtagaggataaaggaaccgtgaatgatttgatggctggtttgaaccttaatggaactgcccaagctcagcctgggattaaaacagaatctaacaatactgtcaatgtttcacagctctttgacatgaacagtcagacaacaaatgtggctaattctgcagcaatgactggtattcttggccaaagcttttatcagcaacagcaggttcccttgcagtacaacttgccatcacagatgctgttaaatccagcatttgctgggcagcaattaaactacggtgctatgagtgttcttcttgctcagcagcagcagctgctgcaaaatctaggaaatttcaatgctgggttgggacattcgtctttgaatgcaatgaacagcggaaatgcatctgtgcttcctgatatcttcaattcaagtaaccaacctcaacatgttgctgtgatgagcaactcaaagaaggatgaaactaaagcttttgattttgtttcggatcatcttgcagcagctcgtggttcaaaaaagtaacccgagagcgatgggtatgttcagaatgtagcaacaatgcatttgtttggcttcacgcaaacttcactcgtactccatcgattagctggatcaatctcaggacaggttttgcatgttgtgctgcaacagatgacccaagaaagaaagaaaagaattcacgacgggggattgtgttgtatcatgtatctagacaaatgtcgatttttatgttgaaataagctgtacttatcttctcagtttcttttgatgccttgccttttttttttcttttaaagagtcggacattgtagattgttctcgggcgggattttgtttttgctgctgtacaacagcatatttggttcttttgacgggaattgtaaagcttgctacgttaataacaggtgccatacgggaataatgatgcctcttgaacc

SEQ ID NO: 26549 - DNA, 1237 bp, Oryza sativa
  ref <308>: DATABASE ACCESSION NUMBER: AK101991
  ref <309>: DATABASE ENTRY DATE: 2002-08-28
gacatccctcacagccacagccatagaccatagtactacaccacatcttctcccctacccaccagcagttcccagccatgtctgctagcaagctgcaattcaccccatgcagcacacccattcagggcaatgagatcaactttagcaaactctacctgcaccacacgccggctggtccaagaccaaaccagtccggggtcacaagcacaaacaaggaaaccgggttgggttccttggttgttaacaactggcaggtatacgacggaatcggctgtgacgccaaggttgttgcccatgcacaaggcctgcacgtttatgccggtaactggcacaactccttcaccctagtgtttgaggatgaaaggttcaagggttccactcttgaggtgatgggaatagttgttgaacaaggtgaatgggctattgtcgggggcacgggacaatttgctatggcaaatggtgtaatctttaaaaggttccatgaacaaaaaaaagaaggaaatattatggaactcactatcaagggattttgccctgtcttgaaagggtcaccgtcacagggccttgtcaccaagattgggccttggggtggaattgatggaggcagagctcaagacattacagctactccaaagcgtctagaatccattacaatacacagcggctggactattgattcgatctcatttatttactttgaccaagctggagagaagcacagagcaggtccatggggtggtcctggtggggatccttgcacgattgaatttggcagttcagagtttctcaaggaggtttctggaacgtttggcccatatgaaggctggaaagttataagatctattaaatttgtcaccaataagaaaacatatggtccatttggacgacaggaaggaaccccttttagcgtcccggtgcagaataactccactatagtgggcttctttggacgcagcgggaagtacctcgacatagttggcatctacgtgcatccgagataacatgtcaaaatcagtttcccatgtttgactttgaagtgtgttttctataataaataaatatgatgggatcctccctttcattccagtagtgatgagggatcctttctagctgaagtgtgtttacttctgaatttgcagtccttctgtcggtggtttcagtttgcaatgcattgtatgcatcaataaggatcttcgttgaaggttggtttggtgaataaagtcgtcattcagttagc

SEQ ID NO: 26550 - DNA, 812 bp, Oryza sativa
  ref <308>: DATABASE ACCESSION NUMBER: AK101992
  ref <309>: DATABASE ENTRY DATE: 2002-08-28
ggagtgctccagtagggttttgtttagttttcactttaccttttcccgcacggcgacgaagaggaggaaggagcggcgccaccaccaccaccaccaccccacgccatggcgaacccagcgcaggggcctctgagagcgaggacgaagcccgcggggaggaggggcggcgctccgccgcccgccgcggaggatccgtcccgggcggcggcggcggcggcgaggcgctcggtgcggaagtggagcacgtggacgatgaagacggcgaaggtggcggcgtactacggcttcatccccctcgtcatcgtcatcggcatgaactccgaccccagccctccatcggacagctcctctccccgctgtgattccgcttcgacccccactcgactctgcctccgcttttcttgggctctgctacatgatcgtacttactgcgtagttgatctgcaattagtactattttgctactagtatattcgctatgtgttagcaatattctgcactgttaatttgctgggaactgggaagttagtacttgcatcgatcgtcatgtaacctttgtgatgaatttggtgatgcctgcgtttgattctgatgcgtgccaggcatgtcgaataccatggttcggtgcttgccttgcgagatgcctcttgatctattattgtgtggaccttgttcaggagagtgtttttggccaatagctttgagcaattcaagggagtttcagtcttcttctgggtgcctgtttaggctggaaattccaaagatgaatacctgttttctttactgtatcttgaattccagttcttgttggc

SEQ ID NO: 26551 - DNA, 1218 bp, Oryza sativa
  ref <308>: DATABASE ACCESSION NUMBER: AK101993
  ref <309>: DATABASE ENTRY DATE: 2002-08-28
tggtggtgccactgcatggcaggaggcttggcatcatcagcaagccattagccatggataaggcaggcggcagcggcgaggcgccgccggagccggagccggcggcggcggcgacggtgaagtcaatcgtcgtgtaccccatcaaatcatgcaggggcatctccgtgccccaggccgccatcacctccaccgggttgaggtgggatcgaccgtggctggtgatgaactccgcagggagagccttcacccagcgagtggagcccaagctcgcgctgattgaggtggagatgccgcaagaggcgttcactgagtggcagccaacgcctgattctcacatggttatcagagcacccggattggatccactgaagatccctcttggcgcgaaacgtgccacagttgatgatgtctctatctgggagtggtctggttctgcgtatgatgaaggagatgaagcggccgaatggttttccagttactttgggaagccgactcgactcgtacggtttaatgaagcatcagaaattagagagaccaatcctgactatgctcaaggttacaaagttctgtttgctgacgacttcccattcctgctggcctcccagggctcagtggatgcactaaacagtatccttaaagaacctgtaccaatgaatcgcttcagaccaaatattatagttgatggatgtcatccatactcggaggatctgtggaagaccataaagatagggaaactgacatttttaggtgtcaagttatgtgatcgttgcaaggtgcctactattaatcaagataatgggattcctggtgaggaaccaacggaagctctacaagcactccggtctgatgaagtgttgcggccgagccacaaaaataaacgccgggtctattttgggcaaaatttagtctgcaaggaatctctgtcggcaaaagatgaaggaaggatcatcaaggtcggcgatccagtttatgttcttgagtcattcccttcttcagatgaagttccagcatgagcaaggagggcacagtggcaaccgttcagaggttagtaataggtcgatttatgcgcgcatggatgtaaatcttacgctgcagataaggcttgagaaagtgtgctatgtgccagaataaacattaccatctggcactgaaaaatgttgcccatacagtcgatggtttttcagtgatcactgttgtgcagttacctgtactttcacc

SEQ ID NO: 26552 - DNA, 3401 bp, Oryza sativa
  ref <308>: DATABASE ACCESSION NUMBER: AK101994
  ref <309>: DATABASE ENTRY DATE: 2002-08-28
gactgcgcctccgcatttctcgcctcgcccacccccacacgcaaccgaccgacccatccttaccacccaccccaccccacgctcccctcctccgcgggcttggcatttcaacaaacacctcgcgtgcacctccctcgccgccacctcctcgccgcgcgccgcctcccactcctcctcctcccggcctccgcgcgccaccggcctcggcagctccccgtgggacgcgggggaacaagacgagcccgagcaggagcaggagcaacatggactgggacagcgccacccccggcttccgcgcgcgggtgaaggacctcaccgggccactcccggccgagcgggaaggggttgacgtcaaggaggagaggctccatgaagcggtggagctcgccgtcgacttccactcggcgctcgcgtaccacgtcgtgggatacgtgcgcgccgcgctcggggaggacgagttggcgctcgattcccttcgcctcgccagggatctcgcccccagcgacctcggcatcgccttcaccctcgccaagaggtacgccgctagggagcagtttgatctggcggtggaagcgtgccaacgcgcgctcggccgaggtgacgctgatctcgtcgacccgcagctaaacgccgtcttcgagtcccgccacttggagccgagcaaagaggcgcggatctccactgctaagaatggcctcaagcaactccttatctccgccttgtcgaagatcgccatcccgatggcccgagatcgttggaacggcatgagcgaggagacgcgccgcagtttcctgacagtgggtattgacgagatggtagcatactgctgtgctaagccgtctgacgagtgtcagatgagtgctctcactggtgcactggactttgtgaaggacaatagagaatggatctgctggctgtgccctcaatgcgaaatgactttcctcactgcgaagaccttccagttgcatgttgaggatgatgagttctcccggtcccaggagttcaaagaatcgctgttgtttgtgccggagaggatatctgatgaacagacagagtttattaagtgttggactctgccatctgatgtcaatcctactgaagaagctgagggagaaaagatcttgaccaagatcaagagtacatttcagtacctcaaggataagaaggctctatctgttgatctttttgacaacctgatcaaattcacgaaaaaccggattgaagaagctgttacccaaaattatagctgcattacttctctggaccctggagggcttctgttgctggggacttatctggatttgcttcgattgagggttggtgatgccgagcaggatagccgtgataattttggtgggggagttgttcaagacgcttgcgttctatctataggtactgatgagaatgtgctaagaattactgatggttctagcaatcaagatgctctgtttagctggctatctagaccttcaagacaagacccatttacatcatgggacaacatgaggcaagcctgtctagataagggaactcatgcccttggaaagttgaatggaagggccgctgcattgatagagaaagttaatctgaaacgtggcttaacagcgacgcagacttatgaagcttattttggtgaaaaggctaaaatagatattgagatcatgcaattggttgccgaagttgataatttgaagaaaaacctcttggaagtctgcacttatgattatcgtgaaatcattttaccagctatgaaagatttcctatgggctaaactgtgtaatgttccacctaaaggggtctcaagttctgagggtgataaagtttctgaggcaagtattgaaaacagagatccagttcaagaagatattaatgcaggtctcaatatcatcagtcctgaatcagtcttacaagaagatgatggaaaagctaccgaggacaatctacagggtggagattcaactgtgcccgactgtaatggtgtcgaagagcttccaggcgatagtaaagtactgcaatctggcaagaagcttgagttgcctccaagagctaacacaagcaccttgggaagctcagagactcctatggaaaaggaaaacaagacttcctcaccatctgattactctggctcaaatgaagggagtgcaaacatttcgagcaatggagtaactggaactgcctatccaaatagtgaaaatgaactaaagtccttgttttcggctctcctgtcattgtggcacttaaggcccttcactgataagttcatgaagaaagcaccgctttatcctcattttggagtttctggaaaagatcggaattgtatgctgtgctacttgttccatagtttcaatgcttttagtgataagagtgactctacagcaacttatcgactgagctgtttgagaccttcttttatcaagattttagaagaggcgaatgtttcgttgaaggaggaaacaaatttggcagtgaaatatatagaaatagtgcttaacatggtgcatacatcagaaactgctaaatgtatcagcaacaacagtaaaaacattctgtacaaaacaacactcttctccagttgtcctgatcatagatgcctctcgcatgaactttttgggatgcacaagaatgcaacagagagcacatattttctcaacgttggtgcaagtgaactgcggaatattgagatgaacacttttgccgatgtcataaaatctgtcgacaagaagtttcactgtaatactgagagtaatgctcacaatcatccgccatgttacttcacaactgcttttggctatccaagtgagaatgatagccatcttgtctctggattactggtcagcatagctgcccccttggacattaatcctgtttatgaaggcctgcactcagaatgcaagtatactatggtttctgcggtatttcgtgctgaggggcgagatatctgccttgctcgagaagaggagaagtggcttgtatatgataactcactcagggaagtcaaggaatttgattcatgggagaaagtgcttgaagaatacagtcgttccagtttctgtccacagataatcttcttcgagcgtatcgacccagtttcagaggccgcgggcacagaagtcacagtctagacaactgcttacagttctacctggaaaccgaatcagggggctatttttgatggctgagtaatcacctttttagttagaatacagatagcttgatgacgcaaagctgaattttctgtcatgtactgtcgatatggctttcgtctctatatgccttgtccttagctttacagttctactaccagatatcatacgcagcgcagggtagtaagtattccagttatgcactacttttaggatgatataccaggtatcttaattacttcgaaacagcttttcttg

SEQ ID NO: 26553 - DNA, 1652 bp, Oryza sativa
  ref <308>: DATABASE ACCESSION NUMBER: AK101995
  ref <309>: DATABASE ENTRY DATE: 2002-08-28
gtccgcgcgcctccaccaccaccacctcctcctcctccccctccgcaccagccatggcgctcaagcagaaggggaccgacgccgccgccgaccccaagaagcgccgccgcgtcggcttctccggcatcgatgctggcgttgaggctaacgagtgcatgaaagtgtttattgcaagaaaccctgacgaggcaggctcagcaaatagcacttctcttcaaccatttgacctaaatcatttttttggtgaagatggcaagatatatggctacaaaaatttgaagatcaatgtgtggatcagtgcaatatcatttcatgcatatgctgatatctcatttgaggaaacatctgatggaggaaaaggaatcacagatctcaagcctgttcttcagaatatttttggggaaaacttggtagaaaaagatgaatttctgaagacattttcaaaggaatgtgaatatctcagcaatgtggtgacagatggcaatgtcattaaacatgatgcttcaattgatgaagattcagcagttgagattgttcgagttgaactacaaggtgctgctgcttttctttattgtcgtctggtgccacttattctgcttttggttgaaggttcgacgcctatagatataactgagcatggatgggaaatgctcctggtagtaaagaagtcagcacaggcgtcatccagctctaactttctagtgctagggtttgcagctgttcatcatttttatcactaccctgagagcactcgcctgcggatcagccagatactggtcttgccaccttatcaaggtgaaggccatggacttcgtcttcttgagacgatcaattctatttctgagtctgagaacatatacgatgtgaccatagaagatccttccgattaccttcagtacatacgttcatccattgactgtctccgccttctcaccttcgatccaatcaagccagcgctctgttccatggtctcatctctgaaggataccaacctttcgaaaaggaccagcagcttgaaaatggttccaccttccgaccttgctgagacggtccgacagaagctgaagatcaacaagaagcagttcctccggtgctgggagattctgatctacctaaaccttgacgctgaggaccgcaagagcatggacaacttcagggcctgcatctacgaccgcatcaaaggcgagatacttggcacttccactggccccaacgggaagcggctcgtccaaatgccgagcaatttcgacgaggagacatgctttgctgtgtactggacacaggacggtggggatgcagatgaccaaactgttgagcagcagcctgaggatctcaagacccaggagcagcagctgaatgaggtggttgacagccaaatggaagagatcgtcgagatagccaagaacgtcacctcacgcggcaaggataaactgagcgtttcttgctccgtatgacggtacgagtggtaacttggaaaaaactgaatgctgcattgcagccacagctcgcctgatgtctctttgtagctcaagacttcagggtagaaactagaggctagaaaattttcaggtctgagaattatgttctgcgtattctacttgagcttttccgagatgaacttccttcagcgtagtaatcttagttatcattcg

SEQ ID NO: 26554 - DNA, 1800 bp, Oryza sativa
  ref <308>: DATABASE ACCESSION NUMBER: AK101996
  ref <309>: DATABASE ENTRY DATE: 2002-08-28
ggcgattggatctgttatccttcgcttgtccatggacatggctgccccgactgttccctacaggaccacggctcctccccttccagagtccggcggccatgaagacggctcatcagggggcatggtcctcctcgacaggtggtgcctcatcgctgacctgcccaacgccagcaccggcgtgggcaccacgagcaccggcttgcgcatccaggcgaccttccaccccgcccgcccgccgcttctctcccgcttctgcgtccactgccccggcctcgacttccgccgcgtggtgcctaagatcatcgcctccgacgccgatctcgtcctcctctgcgtccccgtcaaccccgacagcatcgccaacgcacgaggtttggactactttgtctacaggccgcgcgcccatcggctagatctgctcccgaacccgcaccccgtgtacctccacgactctatgactgccctcctcagccgccaagacggcgcctggtatgcagtcgccgccctgggtcttggccccccggtgtacaaaggcggtgcgcccgttagctgggatttctacctccacctctacagatccacctccagttccaaaggttggacctccaagcggttatcggtgaccgagttcatcagagacaagtttatccctatacctgcctctgtcgacaggctgtaccacgagacagggaagaccatcacggtcggcggcgagggtggcaccgtcgcctgggtggacctctggcgtggcatcttcctctgcgacgtgctcgatgagttccctgcgctccgggacatccctctgccgtgcccagcgaggagcaacagggatctcttcctgatacaatatgaccccagctatttccgggatgtgaccatcagccgaaacagagactctatcaagtatattgagatggaaatgtggtcaccaaaagagccgatgaataccaccagcactcctgtttcttatgtggattgcgtgctcaataacacaaggaaatcccaggtaatccgtgacgactggaaggccacaacatggagcatgccaatgccggtgattggttcttcgtgcgagcactggcaccgtgactgtgaggttggtgttaaagacatcaccttgggtgccagcaacccatgtcgttctaacttgagcttcagcgagatcgtggaaatgttcaaggaacttccaatggtaaaccccaccataagcatggatgatgatgttgttttcttgctttctagaaccagtcccagtcccatggacaagttgcatttggtgtttgctattgatgtgaggaagaggacgctgcaaggattaaccaagcttgatgtccagccgcagaactccgtttgcatggtcaccttatgcaccagtgagatttgcaggtatctgaggaatattacagtcacaggcgaagcacttaatgaactggaaattagctcttaaattggccaggacaaagaagcgtgtcagatgatgcaacttgagcttgttgatttatgaaaattggccgtgtttagtttcacgcccaattttttttatacggacacacatttgaaatattaaacgtagtctaataataaaacaaattacataatcatccgcctataaaatgcgagacgaatctattaagtctaattaatccgtcattagtaaatgtttactgtagcaccacattgtcaaatcatggcataattaggctcaaaagattcgtctcgcaatttacatgtaaactgtgcaattgttttttttttcgtccacatttaatgctctgtgcatgtgtccaaatatttgatgtg

SEQ ID NO: 26555 - DNA, 1231 bp, Oryza sativa
  ref <308>: DATABASE ACCESSION NUMBER: AK101997
  ref <309>: DATABASE ENTRY DATE: 2002-08-28
ggagtggccatgagcctatcctaagataagatatcaaccaaatctcctgagtaatttggtcacatggaatatctgttcatctctcctcaactaggccagatccctatttggaatgttaaggagtaccaagctgccattcatctttgagctctgcatttctgccataattcctgtgagatgtgacagtaatcaccttgacactgtagtagtcagagagaaattcttcattctccaatcctgcatacgcatgcttctgtaaagttgcaacaagatcagagtttacccctatatatagtgaacttggagtcttggatcatcatccatcttcttcttcccattgagtccattcatccacatttttcttctgaactcgcacacaagaggtcacgagaactgctcatgagggctctgaactgggtgcagacaaggctccacgggacgaggaaacaagatcacactgcagtgtcatctcgacgcgctcatacctccggtgatctccaccggaacggcgacgagctcgacgacggctgggcggcggcgatgctgtccataggcacgttagggggaccgaagggccgtcatggttctggcacgccgtggacgacggcggcggcgggcgccgacgagctcgacaggctgcaggaggagctcaggctgctggttcgagctcaggcggtggtgaccggaggcgaggacgacgacggcggcggcggcggcggcaggcaacgcaggtcactgagccgcacgtcgagctccacgaatggcagagaggtggtggccaagctgaagcagagatcgatcaggaagatcatggccgctgctctcggtggcctcctgcaccggccgagctgcagggagacgatgcctgaagcgactgtcagtgagattatatggtcattgttgcacaagaacacgcatcctgaaaaaccggcgttgccacatactgtgatgaaaggtgatccaacggttccgacgccacagaaggataaacaagagggcaccaaatggatcagaacagattcagagtacattgtgttggatctggagatatagacacccccggtggcagtaaagaggcaacaagaacaatttcctggatttttttttcttttcttgagagaggagactagcgtttcttttttgtacgaccgtacttcagtacatgtacatgtctgtttacaaaacgtgttgtcaacttctattacaaaaaagggtttcccttttgcttacc

SEQ ID NO: 26556 - DNA, 954 bp, Oryza sativa
  ref <308>: DATABASE ACCESSION NUMBER: AK101998
  ref <309>: DATABASE ENTRY DATE: 2002-08-28
gaccgcaaagcaacccccccttgctttttgtactcttccatctcacaatctctctatctctctctctcttccttacgcggcaaaacacaccgtcgtccatggacagttctaataacaacaacaacaacaagagggcgcgcgacgccgaggatgaggccgacgaggccaagaggctgcgggcggaggacctgctcgacatgctcgacgatgataccgacgccgggggcgccgccggcgacctggcgtccgtcatgcggagcttcgaggaggagattgttgctggggatgtcgccggggacgttgcccccacgacgcagcccgagctcgggttccttctcgaggcctccgacgacgagctcggcctgccgcccgccaccgcgtcctcgtcggaggaggaggccggggctggggagcccgaggatgccatcgggttcggcggacagatctgggggttcgaggacgagattggcggaggcggctacgctggcttcgccctcacctcgccggaggcggtcgccgccgccgccgccgcggcggagtgggacgacgacggcttcgacgccggcttgttcggcttcggcgacgaggtctcggcgcttcgccacgagaccatgccggccgtctgatgggcctgggccgaagtggattagtttttttttattttcctcgttttttttaaatttggctaaccttagctctacccttgtttaaccttggatgtaaagtttctagtagaaggttaaaaaaacagaggggaggaaacttggaaaaaagtttcatggatggagaggagaaaaaaaaaacagatgtaggcatggttaaaagaaaaaatctgatgacaatgcctcacgaacaaaaatgagaagaatggcttcatgccttcataccagtactacgaccttacaaatattttatttcaagcaaacgaaagatttaatttaatcagctgccacg

SEQ ID NO: 26557 - DNA, 2572 bp, Oryza sativa
  ref <308>: DATABASE ACCESSION NUMBER: AK101999
  ref <309>: DATABASE ENTRY DATE: 2002-08-28
gggaggagacgggtagggggggaggaagccgaggaggcgacgcgactagctgctgctgctgctgctcctgctccactccgccctaggtcaggtagtgcaataagggtttctcgggatgcctgaggaagacccagcatcggcaatggaggagaccgctgtagcgaatggaggagcagctgatgatgttgctgctcctgataaggacaatgacattaaagaaaaagctggcaagggcaacgaggtagcagtagagaataagaatgctgaagagcagaataaaggaggctcagagaatggtaccaagggtccatctgatggagatgttgagatggcggaggctgagactgcaaaggagagtgatgtgaagcagttggacactgaggatgcgaaaaaggatggtgcgcaggatgcagatgcaaatgaagaaaagaataccaaggacacagaaggtgaagatgtcaagatggctgaggctgaggccgaggcaggaaatgccgatgtcaaggatacagcagagaaggaagataaagatgagaacaccaatacggagaagcaggaattgaaagatgcaaaagaaagtggttctgagaagcaggaggaattgaaggagcaagataaaagtggttctgaaaagcaggaggaattgaaggagcaagataaaagtggtttagctgagtacgaggaaaagaaagcagaagaagagagtggtgctgagaagcaaggggaagaggaagcagaggaaaagggctctgctgataatgacaacgaggaaggagacaaaaatgcaaatatcagtgatgaacatctgaaaaaagatggtggaaaggatggaaacaaagatgaagcagaagaagaggaggtcagtgaagcagacaagaaggtagaagagaataaggaggaaacaccgaagaacaagaaggcaagaagtgcaagggatagaagccaaggtaaggataagaaacaggatgggtccaaatccagggaagcgaagagcttactgaacaccgccagcccttatggtactgatcgccctcagcgtgagaggaaaacagtggagaggttggttgaagtgattgaaaaggagcccaacaggaacttcgtagttgagaagggtcgtggtactccgttgaaggatataccaagtgtggcgcacagaatatcaaggaaaaaacctgctgatcttaagtttcttcacaatgttctttttggcaggaaaggcaagacttgattttaaaggtcatatactccagttctctggtttcgtgtggcatgaaagtgatgaaaagcagagggcgaaggctaaggagaagcttgacaaatgtgtgaaagacatgttgttggaactctgttggatccttgctattccgactccaaaagcaaacatcagaaaggaagatattgtggcaaagctgttggatttcattgctgaacctcatgctatggctgattccgggcattcggatgatcaggggtcgaattctcggaaacgcaagagaggaagcacacccagagttctagcaagaaatttgatgatgatgacgacataactccaagtaaaaagcggaataaagctctggaatatgatactgatgaagatgaggatgatgcggatcccatgaagtcagatagtgaggaagatgactatgattctgagaaagagaaggcaaagaagaactcctcagatgcaaaagataccgctagtaaaaagaaggctgcaacagggagcagccacaagacaggtactccaaggacagtgagcaagagttcaagcaaaacaccatcttcaaaagtttccaaggaaaaggagagccctgaggacagtgcaaaagtcttctctaggaagaagaaatctgtcacaccaaagcgtccttcaagctctgaaaaggagataaaagacaagaagtcatcaggtaaaaaggtgacaaagggtaaaggagaatcagcagaagtaggtctacccagtaaggacgagctgaggaaaaccataactgaaatccttaaaaaagttgatttcaacacggctactttcagtgacattcttaaaaagcttgaggatcgctacaagattgacctgacaccacgaaagtcagctatcaaaatcatgatccaagaggagctaaccaggctgtcgaaagaagacgacgatgaggatgaggacgaggatggaaatgaagacgctgagaagaaaaaaccacaacatcaagccaaggaggtggtggcctgagctgagcattggtgaaacctcgtaggtttagcacccgctgttaattattatccgctgttaattattattttgtacctgcatgtatgccgaaccttgtgcttgcatcatgggcagcccccatgttaattattgttaatccgtgtccacagatagccaaaaaccatatccctgtttggtaatgtcaaaaacaaggttcgcttaggcagccctacacctgtagctgacttgggaggcaatttcttaggtaactgttgatgtccaaaaactctgcaatgggatgtggcagagcatcatgtaatgaatcatgttcgtcataggtttgaataacaagtggacgtattaggctgt

SEQ ID NO: 26558 - DNA, 2545 bp, Oryza sativa
  ref <308>: DATABASE ACCESSION NUMBER: AK102000
  ref <309>: DATABASE ENTRY DATE: 2002-08-28
gggtctgaactcccaccccacgcaaccatcgcaaaaaccccactccacctctcacctgctctctccgccgccgcagcggcgcagcgcctccactctcactcgctcatccattccctccctcctcacgatcgagaatgttctactcgcaccagctcctcgcgcggaaggctccgctcggccagatatggatggcggcgacgcttcactcgaagatcaaccggaagcggcttgacaagctcgacatcatcaaaatctggtgagcgaattagtccgaatccagttgtctctgatttcttcgtttcgaacttgacggttttttttggggggattttgtgcgtgtggtttttgggttagtgaggagattttgaacccgtcggtacccatggcactaaggctctccggaattctcatgggtggtgtggcgatcgtgtacgagaggaaggtgaaggctctgtatgatgatgtgtctcggtttctggtaaaattcgagttcgattttcacctaattttggtgcctcctccttgatccatttgcctgtctatgctaacatggttcagattacgcttgtactaactcctcacacagattgagatcaacgaggcatggcgggtcaagccagtcgcagaccccaccgtacttcccaagggcaaaacccaagccaagtatgaagcagtaacactgccagagaatatcatggatatggatgtggagcagcccatgcttttctcagaggctgatactacaaggttccggggaatgcgtttggaggatttggatgaccaatacattaatgtcaacctagacgatgatgacttctcgcgcgctgagaatcatcaccaagctgatgcagaaaatatcaccctggctgataatttcgggtctgggcttggagagactgatgtgttcaatcgttttgagagattcgacataacagatgatgatgcaactttcaatgtcactcctgatggacacccacaggttccaagtaatctggttccttctccacctaggcaggaagactctcctcagcaacaagaaaaccatcatgctgcctcatcccctcttcacgaagaagctcaacaaggtcaattcaaacacatggtttggtctatttgatcctaaatttggaaaggggggggcatctgtaaaaaatgagcaagagcagcagaagatgaagggtcagcaacctgctaaatcatcaaagagaaaaaaacgtaggaaagatgatgaggtgatgatggataacgaccagataatgatcccaggaaatgtatatcaaacatggctgaaggatccatcaagcctcattaccaaaaggcacagaatcaacagtaaagttaatcttattcggtcaatcaagataagagacctcatggacttgcccctcgtttctctaatatcttccttggagaagtcacccttagaattttattatcctaaggaacttatgcagctttggaaggaatgtactgaagtcaagtccccaaaagctccatcttcaggagggcagcagtcatcatcaccagaacaacagcaaagaaacttgcctcctcaggcatttccaacccagcctcaggttgataatgacagggaaatgggatttcacccagtggactttgcagatgacatcgaaaaactccgaggaaacactagtggggaatatggaagagattatgatgcttttcacagtgatcatagtgttactcctggaagtcctgggctaagtcgcaggtctgcttcaagctctggtggctctggacggggatttacgcagttggatccagaagtacagttgccatccggaaggtccaagaggcagcattcatctggaaaaagctttgggaacctcgatccagttgaagaagaattcccattcgagcaagaacttagagatttcaagatgagaaggctttcagatgttgggccaactccagacctgctggaagaaatcgaacctactcaaaccccatatgaaaagaaatccaatcctatcgaccaggtcacacaatcaatccactcgtacctcaagctacactttgacaccccaggggcctcacagtctgaatcattaagtcagctagcacatgggatgactacagcaaaggctgcccgactcttctatcaagcatgcgttttagcaactcatgattttatcaaggttaaccagctggaaccatacggagacatcttgatctcgaggggaccaaagatgtgacatcctaaatgtttaatagttggacaattttctgctgttgtggttcttgcacatctcgtgttatgtatggtgtttaagtttgcacatgaagtttagaaaaacttcgaaggaaggcttgtaggtacgttgtattggggcatgtatttaacactagttttgtgtaggaaagaaattttgtaagtatgctgaatggcttgatagctggtgcaaggttaaagttatacgatacctttctttctgtatatttaagatgatgaaataactggttttacctcttacctggtgtttgatgcactttcttgacaattacgtgtaatttttgaacattc

SEQ ID NO: 26559 - DNA, 2189 bp, Oryza sativa
  ref <308>: DATABASE ACCESSION NUMBER: AK102001
  ref <309>: DATABASE ENTRY DATE: 2002-08-28
gtcttcttgttcccgcctcgcccgccgttaacccccgaaaccccgctcaaaaccccccgaagaaaatggcgacccgccgcgcgccgccacccgccgccgccgccgccgcggatggcagcatcgaggagaacgcgatggccatcctcgacaccgccggcatcaaggacgcccgcgacctccacgacgaccgttgcgccttcctggagaccgtgcgctccgcctgccttgccgccgacagcccctctcccccttcgtggagaatgtataatgccgttttccagattcttcaagacagcagctcgctggagcttaccatggcaagtctccacctcttaatggagttggggaagcaataccctagagcatatttgaccgattctggttctggccaagctttagtggcagttaaagaggcatggtcaccatttcaccttcgcagcgatgttggttgtggtgagattgggggaaacaacaggcacttagaccacctcttcgattctgcaagattttcatcattaatcgaggatatggttgaaacagctaatgacacagatgctaataatggaattgagcatataaagaacatggtgctgcttgaatatcttgtcagcacccttgaggctgattttgtacctcgtcagattgcatataaagagtcattagactgggtaattttcagggaatctcttctacagatgcttctggtttcacggaaggtggcattcaaatctttagtaaagaactgcatatcttttctgctcaatcaatataatcagggagttgaagatggcatatcttccaaagaaggttctgctaaatcagcacctgatctagaatcttccttagctatcatatcttttgaattcgaaagaaaagctcttgcatcagttcagaaacttttcactatggttatgaaccttgacttgattagaaaagaagcagacacaatgggtctgacttcaagagctgatgggtgcaggaatcctatcttggacgttattttagatgagctaacttacaacataagctatttatctccatttcttctgatctttgtggaatggaagtggaaattggagattatacttcagtacttttcaaaatattgtggcaagcctgcagttcgtactcggagatctgataattcacaacacgatttgacattggaaaatgtactgactttattttcaacggctgcaaccacaaaagccattgttaaaaagatgagttcagaagttgtccagctgctcttagcaaacgcataccaggtctgccttcatctggaatgtgattctagcaaagatagtgatacaacaaagaagattggagcgactctcctacagatatctgagagttttgtatctgcttttcataatatgagaaaaatcaacccggatatgcagctctcgccgtttgagaaagaagctctcttcactgctgcgtcaatggctagagttctaaagaacaaacaaagatagggagcaggctttggaagtgcacattcgtttgatgatttgctctggcaacttgttttggtctttaagatagtagcatcctttgccatctcatctatcgtatgcataattatgcttacctctgttcatattagtttatcctactactatctatctggagttaatgtacataattggagcatctgtgttgaatatccatttcacttaacacttcctgatatctgaatgaggatatcaactgcttggaatttcctgattggttaaaaattcccaaaatgtgcttgctcagttaattcctctctcaagggggctgaagggaattggaggaatcaatggttcacgtcataataacagtcaaagcaaaacttgtatttatgggcatgtcaagttgtcaacgttgaggtagtgtactaagcttcaatccacacacacaaacacacacgagccatgcatatgtgaaggaacaacttctttctcctgtggttgtactattatgcatacgatttgcatttcattgtagtgccaaaagaacagactctttatatggtagctcactttgtacgggatattctattggttccggtgtcatctgtctcttcaaagcaaacatttaggaaggttagaagaattattgaagaacagagatcatgtcttgcactcgagataaatgatgcaatcttttatcgtaaagactagatggaggtagatcaatgg

SEQ ID NO: 26560 - DNA, 759 bp, Oryza sativa
  ref <308>: DATABASE ACCESSION NUMBER: AK102002
  ref <309>: DATABASE ENTRY DATE: 2002-08-28
gagagcttccccccgccacgccggccacctcaccactctcgtttcgtttcaggcggcgagagcgggagagcaagcgaattctctcagctcgatttgtgttttttttttttgagggggaggaggtgagtgcaacggcgatggtgatgacgaggaggagggcggcgctgctggtggtggcgatgtgcgcgtgcgcggcgctgccgtcgaccacgacggcgaacaagttctccatcaactggaagcccaacaccaactactccgactggcccgcccagcacggccccttctacaagggcgactggctcgtgttctactacacggcggggcaggcggacgtgatccaggtggacgcggcggggtacaatacgtgcgacgccaccaacgccatctccaactacagcaagggccgcacctacgccttcgagctcaacgagaccaagacctactacttcatctgcagctacggctactgcttcggcggcatgcgcctccaaatcaagaccgagaagctcccgccaccgtccccgccggccgccgccaaggacaagtccgccgccgcattcaccgcctcgcgcgcctcgctcttctacgccgccgccgccgccgtgctcgccgcgattctcaggatgttttagctgctagtagtagtagcgttgtctgctgtcttcgtctgatttggaggtcctcccctgatttttttagtgtgtttggaaccctggaaattttagtagaacctcgattattagtgtggatttgcgc

SEQ ID NO: 26561 - DNA, 947 bp, Oryza sativa
  ref <308>: DATABASE ACCESSION NUMBER: AK102003
  ref <309>: DATABASE ENTRY DATE: 2002-08-28
gaattcctcctcgcctcggttgtttcgtcccaggaaactcgattctgcttctgaatcggattttcccagggatttcgccggcggctaggatcgggtcgggggtccgccatggccgacgtgttcgagggctacgagcgccagtactgcgagatctccgcctccctcgcccgcaagtgcaccgctgcctccgctctccaaggagagaagctgaagcagaaggcgtcggagatcaagtctggcatcgatggggccgaggcactgataaagaagatggatcttgaagcaaggaaccaacagccaagtgtgagggctgggctgctggcaaaactgagggagtacaagtcagatcttaacaacctgaaaggaacgttgaagagggtcaccaccggtaacgcgcagcaagggtcgagggaagagttgctggagtcaggaatggctgaaacgttgggggtatctgctgatcaaaagtcaagattgctcaggataactgaaaagcaaaataaaacaaccgataggatcagagatagccacagaactatgctggagactgaagatcttggagtctccctcttgcaggacctgcatcaacagcgtgaacgtctaatacatgctcatggcacattggataacgtggatgacaacatcgggaagagtagaaggatcatgggtgccatggtgaggaggatggacaggaacaagtggatcataggtttcattatagctctccttgtgttggtgatcctagtaatcctgtatttcaagtttgtgcactgagggactccttgaccatccaaggactgatgaactgtgtgcgttctttgcatattcgttttgtcttatttctttttttgggtttggacgaaaccatttcatgtggtggttgtgaatgtgttttggtcatgtaaaaaaagtgagaaggttttgagtatctgatagtttcatggatc

SEQ ID NO: 26562 - DNA, 1127 bp, Oryza sativa
  ref <308>: DATABASE ACCESSION NUMBER: AK102004
  ref <309>: DATABASE ENTRY DATE: 2002-08-28
gacggggaaccatctctctctcctcgcccccgccgccgccgctgctcctcctccgatcggtggagcagcagccttcatgaagggcgaggcgggtctcgatcggtggagggggaaagatttctcctccagttttcctctagttttgatcctggaggaggtggctgctgcatcttcttcttcaccgaagattggaggagtggatttcgtgtggttgttgcggccgaccgctttcttgctctcttggctcgtcggcctccgccgccgatgctgcgggatgccgtcccccgacgccgccgccggcgatattgagagcgccctcgacgacttcgcccgcgccgacgccgactgcatcgccgccgccctcgcctgcggccgcaccagcttctcctaccgccgcctccccgagccgcgccgcctccgcatcaccgtccgcaagctcgacgactcctacttcgatgtgcaaatcgcgaggtcagccgcggtgtgggagctcaaggcggccatcgaggacgtgttcgccgcgctctacgatgaaacggacaacaaggccatctcttggcagcacgtgtggagccacttttgcttatgtttcaaggacgagaaattgacagatgacaaggcaacatgcgtgcatttggtataagagatggtgatgaggttcattttgcccagcatctttctgttgaatacagaccctgcaagtccctttccctcagaaggtcaaggacttcattggatgatttcagtgctaggtcaaggagtttgttggacgatctcggcgaagatgatggtgataagtttatcgacacgaggcattctactagtgttttggaggaagggctatatgtttatcagcacgatgaggagcgcatggaagagagtcgcaagaagggaggcttctttagcggttggttctcctattctagattgaggggcaacagtaggacacattcagaggatgccatccaatcctcctgcgaaaagagagatactcgaactcggccaaagctggggagatggttgtcttccaaaaaaactaaaggcacatagcaatctagattgccaactgtatctcacacgtgttgctttgttcttctgaaatgaaaatcaaaattacattcttgtcg

SEQ ID NO: 26563 - DNA, 2519 bp, Oryza sativa
  ref <308>: DATABASE ACCESSION NUMBER: AK102005
  ref <309>: DATABASE ENTRY DATE: 2002-08-28
ggctgtccccttctccggatcccttcgaattctgaaatccccaaattcttctccgcctctcctcccctccccctacagtatttcaaaatatttcaaatcacactacactctccgtcgtctcctctcctctcctctcctccccctctcctccgcctctctcgcatctgaggctccgatcgccggcgaccccagccagaatccgccgccccgtctcgccctccccgctcgacgagaccgcgccgagcggcgaagaggcctagtgttcttcgcacctcgcgatgagtagcgcggtgaaggaccagcttcaccagatgtcgacgacatgcgattcgcttctactggagctcaatgtgatttgggatgaggtcggtgagcccgacacgacgagggacaggatgctgctggagctcgagcaggagtgcctggaggtctacaggcggaaggtcgaccaggcgaaccggagccgcgcccagctgcggaaggccatcgccgagggcgaggcagagctcgccggcatctgctcagccatgggcgagccgcccgtgcacgttagacagtcaaatcagaagcttcatggcttaagagaggagttgaatgcaattgttccgtatttggaagaaatgaaaaagaaaaaggtcgaacgatggaaccagtttgttcatgtcatagagcagattaagaaaatttcgtctgaaataaggccagccgattttgttccctttaaagttccggttgatcagtctgacctgtcattaagaaagcttgatgagttgacgaaggacctggaatcccttcagaaggagaagagcgatcggctaaagcaagtgatagaacatttgaattctttgcattccttatgtgaggtgcttggcatagatttcaagcaaacagtatatgaggtgcaccctagcttggacgaagctgaaggatcaaagaacctgagcaacactacaattgagaggcttgctgctgccgcaaacagactgcgtgaaatgaagatccaaaggatgcaaaagcttcaagattttgcttctagcatgctcgagctatggaatctcatggatactccacttgaagagcagcagatgtttcagaatataacatgcaatattgctgcttcagaacaagagataactgaaccaaacaccctctccacagatttcctgaattatgtcgaatctgaggtgttaaggcttgaacaactgaaagcaagtaagatgaaagatcttgttttaaaaaagaaagcagaactagaagagcatagaagacgtgctcatcttgttggcgaggaaggttatgcagaggagtttagcattgaagctattgaagctggagctattgatccctcactagtacttgaacaaattgaagctcacattgcaacagtgaaagaggaagcttttagccggaaggatattcttgagaaagttgaaagatggcaaaatgcttgtgaagaggaagcctggctggaagattacaacaaagatgataatcgttacaatgctgggaggggagcacatctaacactaaagagggctgaaaaggctcgtactttggtcaacaagattcctggaatggtagatgttttgagaacaaaaattgctgcatggaaaaatgaacgaggaaaggaggatttcacatatgatggtgttagcctttcgtcaatgcttgatgaatatatgttcgttcgtcaggagaaagagcaagagaagaagagacaaagggatcagaagaagctccaggatcagctcaaagcggagcaggaagctttgtacggatcaaaacccagtccatccaagcccctaagtacaaagaaggcacctaggcactctatgggtggtgcaaaccgaaggctatctcttggtggagccaccatgcaacccccgaagactgatatactgcattcaaagtctgttcgtgctgccaagaaaactgaagaaatcggcactttgtcccctagtagtagaggtttggacattgccggattgcctatcaagaagttgtctttcaatgccagtactctacgtgagacggagacacctcgtaaaccttttgctcagatcacaccaggaaacagtgtctgtcgacgcctgtgcgccctatcaccaataacactgaggatgatgagaacaggactccgaagacatttacagcactgaatcccaagactccgatgactgttacggctccaatgcagatggcaatgactccctctctggccaacaaggtttcagcaactccagtttcccttgtttacgacaagccagaggtaacattgcaggaggacatcgactactcctttgaagaaaggcggctcgccatctatctggccaggcaaatggtttaactgttgatcaatttatgtacgtagttgaaatctgactgcattttcttgtcggtggccattgcgtatgttggtcaacaatagtcggcctttccagtagcactattctgatttactgcaattgttttaatgttttctacaaccagtaaaacagctctatacattagcttgctcc

SEQ ID NO: 26564 - DNA, 2291 bp, Oryza sativa
  ref <308>: DATABASE ACCESSION NUMBER: AK102006
  ref <309>: DATABASE ENTRY DATE: 2002-08-28
gagaccatggcggcggcggcgctctgctccgcctccccggccatctccacggcggcagctctcggcgacggcgtggccacgctccgcctcgcggtcctactgcgccttcgcctctccaccgcgggctgtgggctgtggctgcggtggggaccccatcctggcaggcgcgtcggcggcttccacgactacggaggaagagggatcaggtgttagagatgatgatcccgacggcttcctccgctccgagaaggatcgaaagtgcggtatctgaagagtcacatgatgaccgcacagagaatgaacatattatacatgaccatgaacaccgtcatcaccatcatcatcatgagttcatgaccatgaacacaaacatgatcatcatgcacacgagcatacccatgatcctggtgtttcttctgtaagcattgtttgcaaaggggagatggatcttgaaaagggagtgcacatcattttccggggaagaataatgtgggaaccaaatgagccatgcatcaacaagattgtattcatagtcaataatctcaaatggggaagaactggagaaacggcttcaaagattgcctactctactgaaggaataagcgagaaacgggactccaacaggtggtgtatacttcaatccaaccaatcaaccacatgaaagtgcagcagcctaaagcaactaatataaggaggaggtgatcagtctaatgttttcatgtacacagcctgaaagcaagaagaatgcatgaatgggctggctatccgctgaggtcaaggagatggtccgtagaggctccggagccgggccaacttatctacaatgacagctgcaatgaagtcatgagtgtaggcggcgtatggcacccgtctgcagtcggtgaaccccaagctgtaccagtcctcagccggcctccgtcccagccttgctgccccatgccaagacttgaacacggccactgcgaccccccttcagacgggcgtggactagatcatccatcgcaccaaaggtggtggacagccgagcctccagatctgcgcggtccgtgtacattgggatacctgagaggatcaaggacctgtccgggaagctgctgctccagacggtagcagggttcgcgagagcacacagcgcgatgagcttgtgcacgatccgtctggcctcgaccaccctgttcacatggtatcctggtcctggagacatcaactcgtcggatagccagttcttggcttggcagtaggccacgggacccgcccagtccctcgtgctgaagctgagctgctgcggcggctgctgcggcggcggcgtcaggaaccgggaaacgtgcagccatgtcatcatcagacagtgaggagaaagcccccatctcatctcatcatcatcatcatcatcaccccatctcatcccaggagcgtgcagccatgtctcgggaggctcctgcagcagaagctcgacatcctccggactcccgagcacgaccaccacgacacccatggccctgtggatcacgacggcctccacctggtgcctcagctccacccggtgctccagccagtcggcgatctgggccgcgtcacactgccaccgctctgtgcccagccctctcagcagaatcacccggctcctgtactcttcctgctgcgccgccgccgcctgcgtgatcacgtacggcggaagcaggagacggagcaaggacgacgtgccaccctcgtccgggagcagcagcgaggaggagtccagcatccggaggcccgtcctgacgagcaaccgcggcgccctcctggcaaccaactccgtggcgtccgcgtcgtcgtacacgagcacgccggcgtccccgcccctccacgccaccacggcgcacgcgtactcggccccggcgaggtggtctctcgccgcgcggcaaagaccgtaggctcctccaccaccaccatcggacgtgccagcgacgcggacgacgaagacgcacctcaggtggagatccgcgtcctcgtcgtccagcaggtaccgaggcggcacgagcgaccggaggagcccaggctcgggctcagcagtggtcctccgcctctccgcctcatcgtccagtgcgtccaagatgtatccgcgcgggtcgccgcgtccgctcgcctgaacaaatccacattcacattgtcacggagtactagctagtagtagtagtagtagtaattagttcacaaaatgtaactagcctggcaacatcatctcggctaattgagttgtttactgattcatttcttgtgtaataaaaagcgcagaatcatgccttgaatcc

SEQ ID NO: 26565 - DNA, 2983 bp, Oryza sativa
  ref <308>: DATABASE ACCESSION NUMBER: AK102007
  ref <309>: DATABASE ENTRY DATE: 2002-08-28
gaagaggagaagagaagggaagagcccaagcaaaagcaaaagcccagaaagaaggaagggaaaccccacgcggaggcggagagcggagtggcggcgggatggactccacctacgccctccacctcgccgtcgccaccctcctcgaccctccttcgccgccgcctccgcctactatatgcaccgcaagaccctcgaccagctcctccgcttcgcccgctcccttgaccgcgaccaccgccgccgcaaccgccacctcctcgacgccgacgacgacgatgacgacgaccctcccagagaccacgatcgccgcaccacccttcccatcccaccgggccttccgccacttcacaccggccgagaaggaaagccaattatctcaccagcttccaccaaaagagttggacctttggttagacctactacaccaagatcccctgttcctactgtcagtgcatttgaaactattgaagattcagatgacgatgatgagaatattgccccagatgccaaaaacaatgccgtttccttgctcacaaatggaactattggatcagatccccttccgggtaaagcaagtcagaatggggacacaaaaccagtaccatcaacaaacatgattagatctcaaagtgcaacaggcagtctgcatggggcccagcacaatccagttgcagctgatattcttcgaaaggaacctgaacatgagactttcagtaggatcaatataacagctgttgagactccatctcctgatgaaattgaagcatacaaggttcttcagaaatgtcttgagctacgagagaagtacatgtttagagaagaagttgctccatgggagaaggaaatcataactgatcctagtactccaaaacctaatcctaaccctttctattacgagcagcagactaaaactgaacatcattttgaaatggttgatggtgttattcatgtataccccaataaagacgctaaagaaagaatctatcctgttgctgatgctactaccttttttactgatatgcactatatccttcgtgtgttggctgctggggatattcgaactgtatgttataaacgtttaaatcttctagaacagaaattcaatcttcatttgatggtcaatgccgatagagaactacttgctcagaaagctgcaccccatcgggacttctacaatgtcaggaaggttgatactcatgttcatcactctgcatgcatgaatcagaagcatctgttgagatttatcaagtccaagttgaggaaagaacctgacgaggttgtgatttttagagatggtacctatttgactcttaaggaggtttttgagagtttggacttgactggttatgacctcaatgttgatctcttagatgtgcatgccgataaaagtacattccatcgctttgacaagttcaatttgaagtataatccttgtggccaatcccggctgagggagatctttcttaaacaggacaaccttattcaaggccgatttcttgctgaattgacaaaagaagtattttctgatcttgaagcaagtaaatatcagatggctgagtatagaatatctatctatgggagaaagaaaagtgagtgggatcagatggcaagctggatagtgaataatgaattgtacagcgagaatgttgtttggttaattcagattcctcggatatacaatgtatacagggagatgggaacaatcaattctttccagaacctccttgacaatatttttctgcctctttttgaagtaactgttgatcctgcttcacatcctcagctccatgttttcttgcaacaggtcgttgggctggatttagtggatgatgaaagcaaaccagagagacgcccaacaaaacacatgcctacacctgagcaatggactaatgttttcaatccagcatatgcatattatgtgtactattgttatgctaacttgtacacgctgaacaagcttcgtgagtccaagggtatgacaacaatcaaacttcgtccacactgtggggaggctggagatattgatcatcttgctgcagcatttcttacttctcataatattgctcacggggttaatttaaagaagtcccctgtcctccagtatctgtattacctagctcagattggtcttgccatgtctcctttgagcaacaactcattgtttattgattatcaccgaaaccctttcccaacatttttcctaagaggccttaacgtttctctatcaaccgatgaccctttgcaaattcacctgacaaaagaacctttggttgaagaatatagcatcgctgcttcgctgtggaagctaagttcatgcgacctatgtgaaattgctaggaattctgtgtaccagtctggtttctctcataggctcaagtcacactggattgggagaaactactacaaaagaggtcatgatggcaatgacattcaccagacaaatgttcctcacatcaggattgaattccgacacactatttggaaagaagaaatggagctaatacatctgaggaatgttgatataccggaagaaattgataggtgaagacctggcaagaattttgcaaaccctgaagttacttggttgttgatgatggtcctggaaggcaccccatcttcctaccataaactttccaggtacaaccaagaccgtgcggtttctacttgcttgcggaagggaggagaaagggatctaggatgattctacttttcgatgaatctccgtagcgtgttgcgttccctagtagtaggattttgataaaagaaattatgttaggactgaggccgtaccataaaataagaaagatttgagtcatggaatactggaagtttaaacatacgcatgcatcgggggtcatatagtccaaaataacaatggaaaattgataaaccccaactagccaagggtctagtgaggttgcacatgtgctgtaagctattactagtacacgcgtacatttatacatgtgatgccgttcgatac

SEQ ID NO: 26566 - DNA, 2606 bp, Oryza sativa
  ref <308>: DATABASE ACCESSION NUMBER: AK102008
  ref <309>: DATABASE ENTRY DATE: 2002-08-28
gctcgactccagttggggaggcattcttttctttttctttttttttcactctcgcgtccaatccctgaatccgctggcccgcgtcgaaacctaggggcgcggtggcggtatagccgacgttcagatccaaatgggggcggcgccgtcgacgccgaggctgggcgcggtggcgggggccgcggcgtcgcctggggcggcggagcagatgttcgcggcgctggtcggcgggaaggcgtacccgatctcctccgagttctggaggcagctgctcgagctgcccctcacgcagcagtggccgcgggaccgcgtcctgcaggcgtgtcacgcgttcgcccagaacaactaccacacaaagcatctcgcaaagattttgatccatttggtttggtgcttgcaagagtgcatggcagagtcttctcacgcggcgtataggaaggctatcaatgctgcatatatatcatccatatttctcaaattcattattgaaaatgcaaagactgataattggcaagagctaagtcttgaaattgacaaggatgagaaggggctgggaaattttccttctgaacaaagcgtggaatattttctgatgagaggtgttctgaactacattggtagtgtagatgtaagtctggagtcatgctacctgcaccatgaacttctaaacttgatgctagtacttatgtcaactcaattgtgttctggaccatctcctgaaccaaaagatgtgcatcctttcattgatgcggctatgcttcaggacagttccatagtgtcctcggtagttcaaaagttgctgctaaattttgtaaaacgaccacggattcctttaaacagttcacaccctgctttctctgatgatggtggacctggtgttttgcagcgagttggttcagttgctgcaaactttgtactactgccatattatactttcaactaccttgtgagctcaaacgctgaaggcgcatcaagtcaattggcagacaacagtttacttgttctgcttattctgatccactaccggaagtgcattacgatgagcgaatcctttccaagcagtaatgtctacacaagcgatttaaataccaatgtcaaggatgcaccggcttttcatgataatccatattacaaggccttaagcaatgccaaagacagtcaatatgatcgtgctgatgttgaaggaaatgctcaaaatgggctagttgtcaggttgtcttttgcatcgctatttgacgctcttggcacatgcttaaaagatgagagctcggttctactgctctattctttggtccatgggaactgtgactttcaggaatatgttctggttcgaacagacctggatactttgctgatgcctatcttggaaatgctctacaatgcatcaagaaagacctccaatcagatatacatgctattgatagttcttcttatactcagtcaagattcaaccttcaatgctagtgtgcacaaattggtgcttccgagcgtcccttggtaccatgagcgccttatgcatcaaacttctttgggatctttgatggttgttatactaatccgaaccatcaaatacaacctctccaaactgcgagatgtctaccttcatacaaactgccttgcaattctagcaaatatggcccctcatgtgcataggctgagtgcatatgcatctcaaaggctggttagcctctttgacatgctctctcgcaagtataccaaattagccgagttaaaaaatgacaaagctatcaaagttatatctgatcagattgaagcagacaacatctcagatgatacgtccacagaacttcacatctataccgacttcttaagaattgttctagaaatcatcaatgcaattcttacatatgcattgcctagaaatcctgaggtcgtgtatgctatcttgcatcgacaagaggtatttcagccattcaaaaaccatccccgcttcaatgaattgcttgagaatatttacacagtgttggatttcttcaatagtcgaatggacatgcagcagttagatggagaatggtctgtagataaggttcttgaggttattaacaaaaactgccgttcatggcgtggagaaggaatgaagatgtttacccagttacggtttacatatgagcaagaaagtcatcctgaggagttttttatcccatatgcatggcgcgttgtcctatcacgaggattctctttcaatcctggtgcaataaatctgttccctgtggagattcatgttgatgatgaaccatccggtgaacaaaaggtctaagaataatcttgaatgttgagttctgactacagcaggatgacatgttccatccaccgaggcaaatagatattgtacataggaggcatataccagacgatcgacatgtattcttattcatttgtgtatatttccgtttcctcataatgtaataccagaggtcagcgggaggagagagcggtatttaggtggcagagaactatgtagggtacaacgaacaattctttcataagttaatctttgtatttttttttcatctcttatcacctctgacgcgggaaggccactctggtgttttaacatgtctaccgtaccgtcggtcggttttcctgcg

SEQ ID NO: 26567 - DNA, 1975 bp, Oryza sativa
  ref <308>: DATABASE ACCESSION NUMBER: AK102009
  ref <309>: DATABASE ENTRY DATE: 2002-08-28
ggggggcaactaggaagttcctcttcctcctccgagaacgagaacccacacctccataacttcaatttccaagttatatatatataaaaaaggcaatggcggacgatcctctctccaactccaccaccaacaacaagagggcagaggggatccagctccagcacggcgactgcgagagcgagagcactgcgcccttgctgctcgcgccacacgagtcctaccgcctctccgccgcaatcctccccttcctatttccagctttgggcggccttctctatggctacgacatcggagcaacgtctggtgctaccatatcgctcaagtcatccaccttcagtggcaccacatggtacaacttgtcatcgctgcaaaccggccttgtcgtcagtggctcactctatggtgctctcatcggttccatcttggcattcaacattgccgattttctaggacggcgcagagagcttattctttcttctgtctcatatttgattggagctcttctcacagcagcagcacctaacttccctatcatggtggttggccgctttttctatggcataggaataggattggctatgcatgctgctccaatgtacattgcagagactgctccaagtcagataagaggcatgctcatttctctcaaggaattctttattgttcttgggatgcttcttggctacattgcaggcagtctctttgtcgaagtggtttctggttggcgctacatgtatgccaccagtacaccattatgtctcatcatgggaattgggatgtgctggttacctgcttcacctaggtggcttctgttatgtgccatacaagggaagaggaatattatggagtcaaaagaaaatgctacccgttgcttatgtcgattgaggggtcaagcttctcctgatttggtttcggaacaagttgatttgattctggatgaactgtcatacgttgatcaagagaggcaagcaggcttcagtgagatctttcagggaaaatgcctcaaagcaatgataatcggatgtggcttggtgttctttcagcaggttactggtcaaccaagtgtgctatattatgctgcgacaatccttcagagtgctggattctctggtgcatctgatgctactcgtgtatcagttcttcttggcttactgaagttgattatgactggtgtggcagttcttgtggttgacagacttgggagaagaccattactgattggaggtgttagtgggattgctgtttccttgtttttgttatcttcgtactacaccttattgaaggatgctccttatgtggctgtaatagcacttctactctatgttggctgctaccagctgtcattcggtccaattggctggcttatgatttcggaagttttcccattaaggctgcgagggcgtgggttgagtattgctgttcttgtgaattttgcctccaatgcactagtcacttttgctttctccccattggaggatttgattggaactgggatcctcttctctgcgtttggggtgattgcagtggcgtctcttgttttcatattcttcatcgtgcccgagacgaaagggctcaccttggaagaaattgaagccagcctgtagatccagctgccctgcggctgctggcacgtaggagaactgcttattattcagagatgttgcaagctgttggactgactgactgactatctttgtggtgtggtaaggtaacacagtgagatccattgagagtgagttatgttgctttcggtcgttgctttggttggagaaagagtatagttcaaacatatatgtccatactgggttgttgttcataatacatgagcacatcattttttttccttgagaacgatatatgtgtgattaatgctgtacagcaggagcagttggcttatgccatgttattgggcacctgctgaatatttggcatgatctaaaaataataatgtcttcgtcccagaataattacattt

SEQ ID NO: 26568 - DNA, 1427 bp, Oryza sativa
  ref <308>: DATABASE ACCESSION NUMBER: AK102010
  ref <309>: DATABASE ENTRY DATE: 2002-08-28
gagcaaaaagcaagcaacctcaccgaggaggggaatggaatggagctgagccttctccccgccccacgcgtgtagccgccgccgccggcgagcaggtttggagtgggggcgacgcggccgtggagagcaggtctcgtgtccggatcgaatcgaagggcgtttctagtgtcaaaaagagaggagggatggcgatgacggggtacaagtaccaagctcaggagttgatgagagactacttgctggctgatccactggttccgtacacctcggtgctcgtaggcattgccctgtgcaagatggcatatgatctcacaagggtactgagctcattttacttcaagggatattcttcactgacaaagatacaacgtgttgaatggaacaacaggggtatgtccagtgcacatgcgatctttatcacagctatatcattatatcttgtcatgtctacagatcttttctctgatcgccttaaggggcctatcacattccgcaattcaatcatctccacttttgcattaggggtttctgtgggctacttcatcgctgaccttgcaatgatcttctggttgtatccttcccttggtggaatggaatacatcgtccatcatactctttctctagttgcaatagcttacacaatgttgtcaggggagggtcagttctacacatacatggttcttatttcagaaacaaccacccctgaaattaacttgagatggtttcttgacacagctggactgaaaaagtcaagtgcttacttggttaatggtattctgatgttcgttgcatggctggttgcaaggatacttctgttcatttacgtattctatcacatctatttgcactacagtcaggtaatgcagatgcatgcttttgggtactacttgacatttattgtgccatcggtgctctttgtcatgaacacaatgtggtttatgaagatcttgaaaggcgtgaagaaaacattggggaagtggtcatgatcgatccaggaatgcagatcctagaaccgccaacaagagttggtattccagcgatcatccgtatgatcttgatgtgtaaagttatggacatatatcaggttaactaggtaaagcgaatatgtaaagtgctagtagcaaaaacaagtttagattaggccaaattgccgctattttcagcaagctggaatttcctagcctgtttggcacggtactgaagttcccagcacgctgtttctcccctcccgcatcgtgtgtatatctgaagaaatttctgtggatcagttgcccaacagtacaacctcaaatgctatagtatttgtgacaattacagtatttacctgttctcgctcaactcctgtaggaaaagacatgtaaaaacggtagcatatctcgttgctgatgtttgaattcgccaaaacacgtcctatgaaaattaatcat

SEQ ID NO: 26569 - DNA, 532 bp, Oryza sativa
  ref <308>: DATABASE ACCESSION NUMBER: AK102011
  ref <309>: DATABASE ENTRY DATE: 2002-08-28
ggccgccgccgccgccaccgccgccgcactctgcaaccgcgccgcgtggagggagggaaggacgaaggaggaaggagatggagcgggtcggcggcggggagaagcagctggaggactgcaccgtgtccaatgctctcggcacctggttcttctcagttgctggtgctcttgttgctattcctgtggggataaagaagaaatccttggcaccactggttttctttggcactactggaactatgcttgatatcatcatgggcattagccaatgcgagcgggagcatgctgagcggcagatgaagcttttagaagctcaaaacctttctgccaatgcttcagcagatggtgaaaactgatcaagttctttgattattaggacaagcaaaatgcagctgttgtttttcgtaacttactagttgatctgtaattggcatgatcttctgctcttgtacaaatttgtccatccaaaatacggaaatcttgatattttaaatattctccaataagtatattgagcagtggttaatccttg

SEQ ID NO: 26570 - DNA, 2055 bp, Oryza sativa
  ref <308>: DATABASE ACCESSION NUMBER: AK102012
  ref <309>: DATABASE ENTRY DATE: 2002-08-28
gggcgtccctatcccatccgtcgtccgtccccgtacgtccgccacccagtcgccttcccccctccctccgtctccaccgcttctcccgccgcctcttctcctccaaccaccagacggcgaccaccgcggcacacacacagagacccccagatgcttccgccgactccgatcagcagccgctcgccaccagcccaccaccagtgagtgacgcgacgcgaccggcggcggcggcgatgggcagcgtggacttcggcctcgtcgagatccaccccggggagatccggttcgaatttgaggtgaagaagaaaagttcatgttatgtctgtctagtgaacaaatcagaggaatatgttgcattcaaggtcaaaacaacttctccaaaaaggtattgtgttcgaccaaatgtaggagtcattcttccaagggcaacatgtgtttttacagttattatgcaagcacaaatgattgctccaccagatctgcaaataagagacaagtttcttgtgcagaccacagttgttccttttggtacagctgacgaagacattgctcctgcttttttttccaaagaagtgggaagatatatcgaggagaataagctgagagttgttcttgtcagtgcgactcaacttgaagaacagcaactcattgcaggagttcccagtgctaagactggtgttgaggttcgtgtggcaaaagagacactgaatattgagagtgaagcatctaatgtcatgaacgaagttcatcattccttgaaaacaaacttcccccctctgagagaaaatccagctactttgaacgaaatgcccttccctgtaaaacaaacaactattctggccccatcaaaagaagttccagctatttcagcagaaagtgctcaccattggaaagaaacccctgctgaaagcttgttttcaagtaatgcagttcatcattcgctgaaaacaagtttcccccctctcagagaaaatccagctactttgaatgaaatgcccttccctgtaaaacaaacaactattctgcccccatcagaagaagttccagctatttcagcagaaagtggtcaccattggaaagaaacccctgctgaaagcttgtttgcaacgaatgcacttcctcattccctgaaaacaagctgtcttctcagagaaaatccagctattttgaatgaaattcccttccctgtaagacaaacaactattttgcccccattaaaagaagttccagttatttcagcagaaagtgctcaccattggaaagaaacccttaatgtttctctagaatctcatttttcatcaacagaaacaaatgttgtctcgagtgagtgccctgaaacattggaaaatacttctccttcaaaagaatttgccatcttaagagatacacttgtcaatgcagagaatcttcactatgtaactgatgatgttcagaatctaatgacaaaactcagtaacctagaagcaaaactagaagaggctgaaagtgtgatagttaaactgagggaggacaccagaactaccattagggagcgggataagctaaagcacgaaatggtcgtcttgacaaggaagggcgcttcacggagccaggctggtttccctttgctgtttgtggtctacatggcgatccttggcgcgtcactcggttacctgttgcacctatgattctgattgattggtgcagctggagacgaagtaacagtatcacagggagtacgtgctgagctttctcacagcagctggagtaggaaaagaaaagaaatcagaggcaggtagcctcctcttggtactgaatcagggatgaactcttgtcacgtgacgatcgtcacaacaattagttcaggcgtccacttactaggtgattaaccaattaaacggagtacataaaacagcatgattttttatttacgctgtacataacctctttatataagtttcctgcccgtggaccgtggtcgctagagataatccaggatgttgttcagagttaaaacctttgtcactactactagttgccacggaaactagtttgatgctgttgacttttttttcc

SEQ ID NO: 26571 - DNA, 710 bp, Oryza sativa
  ref <308>: DATABASE ACCESSION NUMBER: AK102013
  ref <309>: DATABASE ENTRY DATE: 2002-08-28
gacgaacgcctcgtcgcaacagctacaaacgcccacatcacacgcagaaatccgcatcaacagccagccatggcgtccacgctgaccaacgtcggcctgtctaccccggcggcggcggcgtcgtccctcgttaggccggtcgccggagctggacgcgtggtgtttccccgtgttggccgcggcgggttcgcggcggtgagggcgagcgggccggcgacgccgccggacatctcggacaagatgtcggagagcatcgacaaggcgaaggaggcgtgcgcggaggacacggcgagcggcgagtgcgcggcggcgtgggacgaggtggaggagctgagcgcggcggcgagccacgcgcgcgacaagctcaaggagacctccgacccgctcgaggcctactgcaaggacaacccggagaccgacgagtgccgcacctacgacaactgattcttaccattatatgtttgctaatctctctgtaattaattataagttactgggttgaaaagattatttgtcgtagaagacagaggggagtttggtggaatggtggtatttacggatagttcaagggggaaatgggaaaaaaaaggttttttacacttgtttgtctggatgaatttgtatggaacttttctgcttgataattttcgcatgtgttagtatttgtatatgatgatataagtgggaaataaatcatcaaattttccagc

SEQ ID NO: 26572 - DNA, 1878 bp, Oryza sativa
  ref <308>: DATABASE ACCESSION NUMBER: AK102014
  ref <309>: DATABASE ENTRY DATE: 2002-08-28
gacgcagccgtggaactctctcctccctctcctcctcacctacgcatcccgcgcccatggccgccgccgccgccgccgcctccacgccgccgtgctgagcccacccccgagagacctagctcacgccgaggacgctaccactccggcgcgggcggcggcctcgggatcggggcggatcagatgctctccctcggcgccatccgcaagctctgcgccgcgttcgacgccatcgcgctcaccgtcatcgcggcggggctctcccggacctcgcaccacccgttctccgcgcacgcgcactactcccagccggacttccccaccatcgcctcctgccgcgccgccgtcgccagctccaagtggcggcgccgccacccctccaccaccaaggagtccgccggcgtcgagcctgccgagccccccgttctggtcaggatcaagaacgagagggacccggtgcggctgtacgagctgttcagggccaacgcgcacaaccgcctcttgattgagaaccggttcgcgttcgaggacgcggtggcgcgcctggcaggtgctcgacggaatgacctagtggaggagatactcgagcagcacaaggcgttgcctcaggggaggcgggaagggttcgtggtcaggatcataggtctgtacggcaaggcaaggatgccggaccacgcgctgagcacttttcgcgagatgggattgtatggatgcccgcgcacggccaagtcactcaatgccacgatgaaggtgctactgcgagcgcggctgtttgatgaggtccttcagttgttcgagagttcagagacatatggggttgagttggatgacatttcgtacaatacagtggtgaaaatgatgtgtgacttgggggaacttcgagcggcatttcgggttatgcaggaaatggagaaggcgggggtgagaccggatgtcatcacatacacaacactcatggatgcattctataagtgtggccagcgtgaggtcggggatggtctgtggaatctcatgaggttgagaggttgcatgccaacacttgccagttacaatgtgagaatccagttcttggttaacaggagaaggggctggcaagcgaatgatttggtgaggaaaatgtatgcatcaggcttaaggccagatgagatcacgtataatctagttattaagggtttcttcatgatgggcgagcatgagatggctaagacagtatttggtgcgatgcatgggaggggatgcaagccaaatgctaaggtttaccagacaatggtgcattacctctgtgagagaagggagtttgatttggcattcaggctgtgcaaagacagcatggagaaaaactggtttccaagtgttgatactattaaccaactgctaaaaggcctcatatcaatttcaaaggacaggaatgcaagagagataatgaaattggtaataggaagaaaaccttcctattcaaatgatgaagtgaaaaccttccaggacatattgtctcttgggaacaccagaagataatttgagtatttgactgctggatggaattttttgctgtatgtccaccacatgtaattttaacacttggttggcactcattttatgcctgactgaatgggagaacagtgaggaaataatgttgggaatacaggacagcggaaactatggggaatgaaattttggacttgtggttattcaagcagcattgttctcagaatcaattgatgacacaaggcaggcattttgttgacagttccatttgttctgttggcttggagcactgaagggaaaaaaaaaacgtatagatcaatctccgggaagtaaatttttctcggattggtggcagataaacattttgtacctcaacgttttgtagcatgtacaagc

SEQ ID NO: 26573 - DNA, 1754 bp, Oryza sativa
  ref <308>: DATABASE ACCESSION NUMBER: AK102015
  ref <309>: DATABASE ENTRY DATE: 2002-08-28
gggggcttaataatcttcttcctcttgttcttctataagtagagacttggcgactctgatctgccggcctccttgcagcaacccttcttcttcttcttcttcttcttcttcttcctctgatcctccattgctgcaaaagaagaagaggtagacgaaggaggaggagatcaggtgatcatggggactcaggtggcagataactacccaccggccaaggatggccggagcgcgcaggagaaggcgatcgacgactggcttcccatcacgtcgtccaggaacgccaagtggtggtactccgccttccacaatgtcaccgccatggtcggcgccggcgtcctcagcctcccctacgccatgtccgagctcggctggggacctggcatcgcggtgctgatcctgtcatggatcatcacgctctacacgctgtggcagatggtggagatgcacgagatggtgcccgggaagcggttcgacaggtaccacgagctcgggcagcacgcgttcggcgagaagctgggcctctggatcgtggtgccgcagcagctcgtcgtcgaggtcggcgtcaacatcgtgtacatggtcaccggcggcaagtcgctgaagaagttccacgacgtgctctgcgagggccacggctgcaagaacatcaagctcacctacttcatcatgatcttcgcctccgtccacttcgtcctctcgcagctcccaaacttcaactccatctccggtgtgtccctcgccgccgccgtcatgtcgctcagctactccaccatcgcgtggggcgcgtcggtggacaaggggaaggtggccgacgtcgactaccacctgcgcgccacgacgtcgacggggaaggtgttcggcttcttcagcgcgctgggcgacgtcgcgttcgcgtacgcggggcacaacgtggtgctggagatccaggcgaccatcccgtcgacgccggagaagccgtccaagaagccgatgtggaagggcgtcgtcgtcgcctacatcatcgtcgcgctctgctacttccccgtggcgctcgtcggatactgggcgttcggcaaccacgtcgacgacaacatcctcatcacgctctccaggcccaaatggctcatcgcgctcgcaaacatgatggtcgtcatccatgtcatcgggagctaccagatctacgccatgccggtgttcgacatgatcgagaccgtgctcgtcaagaagctcagattccctcccggcctcacgcttcgcctcatcgcaagaacactctacgttgcgttcaccatgttcatcgcgatcaccttcccgttcttcggtggattgcttgggttcttcggtggattcgccttcgcgccaactacttacttccttccctgcatcatgtggctagcaatctacaagccaagaaggttcagtctctcatggttcaccaactggatctgcatcattcttggagtgatgctcatgatcctgtcaccaatcggaggactccggcagatcatcatagatgccaagacatacaagttctactcgtagattacatgttcatcatagtaatctcatgtggctgcaagttcaagttctactcataggcacacatgatgaaaccagttactgcaaaagtttttttttagccaacaaaggaagaagaaagttcaacaccaagttcatacattgtcactacgacgatgatcttttgagacgtgtcatgcatgcatcagtcgttaattatgtgacttaattaaaaacaaagaggttgtgtttgtgct

SEQ ID NO: 26574 - DNA, 2085 bp, Oryza sativa
  ref <308>: DATABASE ACCESSION NUMBER: AK102016
  ref <309>: DATABASE ENTRY DATE: 2002-08-28
gagccctaggctttccgcattgcggcgcggcctcagcggcggccggcggcgtgggctccggcggctcgagctccggcagcgccggcggcggacggcttccttttggtcttgcgcgcgtaggaaatcgaagccttcgtttgacgattccttcccaaagctaagcccctaccaaatggagaagttcctcgtggcggcgcctccaccttccggcgatgctccggcggcaccggttcctccgagacggcaccggtggagccgcgtcgccgccgagctggacggccgcatcgacgctaggtttcggcaccgggagtccgttcgcctgcgcgattcgttctccgagataaggaccttcagtcacaattactacatggaaggccaggagcgatgtacaacatatatgaatcgagttgttaacgattcagtcctgggatttcaagcagtaagagaggggatttcagcaatggaatttgataaaaagggaatataccttgcatcagttacagcctcgggatgtttaaccgtgcatgattttgagaccttatactgctccacatatggtccatcacggggtttgccagatgaatcatcaaactatttgctacatatatcaaactcaatgcccctatgtgctgtccgatggaatccagcaaatcaagatgagatagtttgtgtatctagacaaactgacatggttctcctgtttgatattggctgtgtctcgtccacgccaactgaaattttacggaaaggaagatccagatatcctgtgctctctgaattccgcaaaggtttgactgatgtagctttttcttcagatgataagtcatggttatttgcatctggccttgatggagcggtcttcatgtgggacatgcggctaagtaaaaaacactgtcttgagctcataggacatccagaatctcaatttagcagtgtcaagctaaatatagataaccggaccgtgtttgctgcaactaaagagggcaccgttcatgcctgggatctccgtggagggagggcatcagctgcttttcaaagccataatgaggttcaacaattatcatcagtgaagatatcaactttgttgggcaaaattccatcgctaaaggaccaaacgaacattgtgtcgagtgaaattctttcaatagacttcaaccctagttgctcatatcagttagccttccatcttgacaatggctggtctggagccttgaacattaacaccctcagtgtgagtcacctgcactgccctcctcctgattggttggagcacatgaacttcatgtggcaaaagctacatagaaaaccgacctggttgccgacatcttcaatttatgcagttggatctgcctccaatactgttggcatgcatctactggattttcatccagatacaagttcagcatgccatgtcgactacaatgaggaaataagaggctccgatgaaaagaaacctgcagcaaacaagtttattccttcatctcagagagttgtttcctgtgcagcacatcccttctgtcatactatacttgccggtactcagttttcatctttgctcgtgttatcgcaaaagcaagagtctatcaaaaactcggagtagcggtgtcatggaacaatcttgatttgcctccaagacaatatctccaaatgcagtcacagtgctctacattagctcgtgggccgtcctgcatcggagaatgatcagccgcatgggagcacaatctattggtcccaccacagaggctcccaacctgatcgaccggtcaaaaagaactaaatctcttggcgttacatgattcgatcttctgccagtgcattgcctccaagatgggcgacagatttctgtgttgcaaccgaccatgtatgtactttcatggcatgctcctaggggctctgaaggttcgcttacctgtacatgatttcccccgttccctgaactccctatctctgtagatcgtacataagttgtgtttcccagtttctcgcaatgtcggtgtatctcctggatgtaatactgtataatgaactgcttcatccgttccaaaatataacatactggtactagattatacataacctagtgcc

SEQ ID NO: 26575 - DNA, 1205 bp, Oryza sativa
  ref <308>: DATABASE ACCESSION NUMBER: AK102017
  ref <309>: DATABASE ENTRY DATE: 2002-08-28
gacctccgatttccaatggccctagccggagcccctcgccgccggcgagctacacgttcgcgtctcccccccactctcctcctcatcgtcctcctcctcctcggcggggctcctcgtgcttccgcgctccgcgtcccgcttcgcgaggtcgccaccctcctcaacctctcccgctccctcctcaaccgcgtcgccgccgcccgcgcggcccgtggagacgactttgcggcgtcccgcgcgcgcaggatcgcctcccatctctccctcttctcatcccgcggcgcgtgggcactctcttgggactacctccgccactacgccttctcgtcggctgccgggtgcggcctctcctgcgccaccgccgctgctcgcctcctcgctgctgctgcggaggtctcgcgcctgcattccgccaccgacgccgcccagtggctgcgccgcaattacggggacgtccgcgacgcggccgcgcagctcctcaacggtctccttgttgccttctccgagcaggggcctttacgagaggtggtgatggatgtgaagtgggaagtggaggaaggggagctgctgaaggattgcctcaaggtgggagctaaggacttggaggggttgcttgtcattgccaaagatctcttatttggggccacaaggacttcttcgcgccacaacgaactttgaggtttggtacattggagactcgctgtgctcctgttctttcatttgaactaatgaaattaaacttaagttcagtattagaaatccagaacttcggttaacattacatcctgcagaccacctagtaactaccggtgtgatattatacccagcgtttcatacccgagaaaatttttgtgtgaagatgcatagttgaaatatactccctccgtcccaaaatacttgtcgttttgagtttttgtttgtaacgtttgacgactagtcgtattcaaaagattatggaattattatttattttgtttgtgacttgctttattattaaaagtactttaagtatgacatttttttttaatatttgcactaattttttaaataagacgaatggtcaaacgttgcaagcaaaaagtcaaaacaacatctaatttgggacggaggtagtatcttctagtggttaatgaatcgtagtcattgcgaagtgttcattatcgatacacatattctggtggataattaatgaaaagttgataacc

SEQ ID NO: 26576 - DNA, 4801 bp, Oryza sativa
  ref <308>: DATABASE ACCESSION NUMBER: AK102018
  ref <309>: DATABASE ENTRY DATE: 2002-08-28
ggcgctccttcgcctgcgccgatctccatctcgcgtgcagagcaggggtgccgtcgtcctgctgcatcctgggaaagtcttcctcaccctggaagcaaactgttttaaaagatttattgtgtcacatgatatgaatcttaagaatttatttatcttggggcagtcacatttctgctgatactgggtagggactacctacgacatgtcacagtttcgcccttcacaacatggtagtgatagtgatgcccagatgtggcaacgacagatgttgtataagcagctacaagagttccagaggcagcaacagcagcagcagcttgatcatggaggtagaatgcagaactcttttgggcagttccaagcccctgcaaaacaatccctagctgatcagtttccaaccatgatgaatgaaatgcctatgaatgagccatcaagttatgcatggtcaaatggtatttctcttggtggctccaggttaggaagcaactctcagattttaaataatggtaacccacattgggagcaacatcatggtgcttctcttggcacaagcagctttgcaaatggtgcagtgtactcaaacatccagaatctcatgaggccaatgggatcagttaataataaagtaaaccaatcttctcattcccttcctgctagcatgagcaaaggttctgggaatcagtactcccagttcccaggatttcctgctaattcccacaatgcaatggcaagagctggttcagaccagtcagatatgacagcaaggtttgcaaggctcaattaattcgttccagaatgaacatggtctttgtgaacaagttacatccaataatttgcagaatttttgtgaaaatggaagtgtattaagtgattcttcgactcaaagtcaaggcggtaacttgaagacaggcagtcctgttctagttaatcacttacaacatggttttcatgttcaacattttaatggctggatgaaccaagttgaatgtcagtcagcgccgcacgtcggaccagctagcagtgctgctagccttgatcccacagaggagaaaattttgtatggagatgataacaattttactggtttattgggagaggatgattcatcagatggagttcctggtcatgataactcttcaggcaatggcaactcaagcatccctgtgtcagctcaagggggtagctggagtgctcttatgcaggaagcattacagtcgacaagcagtaaaaatggcctccaggaagagtggagtagcgtgaatttccagaatagagaccaggcatttacaaataaaatgacttctcctgatctggaacagaggcagcatgcaactttaaatagcatgaacctacatagtgcacctccaagtgcacaaccttctccctcacatgatggttcttcaggaaccatgaataatctgaagttcaccagttttcagcgtgcaacgaaatccgtgtatgaccatcaggaaaaattttcttatggatctacctccgccgctatcaataatcacacaactacaggagctaatgatgggctttttcaaccgagtttaaagcaaagccattctggtgactgtggatcaccagaacatgtcaacttatcaattggtgtttgggcacaacagaaacctatgctgctgaaacgaaatttgaactcaggtggtgaacgttttatgccacagaacgcacaaggacttggggtattgcaacaaagcagttataaccataattttaacggggagtctagtaataaccaaagcaactggaatggccgaaattccaattgcgtcaatacatattcaattaataattttcagcagtcaaaccctgatgtgaacactgttcgagtgccaaatgatggttatagcagtaaaaatactgtcctgacgagttcaagcacaggaatgtttagcccaggccaacatcaaatgatgcttggtcagagcgggggaaattttggaagcaacaatgctccagggcaaaggccacttccagagacttcatgttcacaaggaaataatgcagagtatggacttgctggcttcagccagatgtatactaatgcaatttctgctgaaggacataattcaaataatggtcagcatttaggcatctctttttctgcaaggggtaattcctttagtggaatggatgcccataatttgggccaatctgaccagaaaacgatgggtccatctgcactgctgaatcatcttagtgcaacatctggaattagtactggacattttccaacgaattctttgtgcaataataagttattgtcagagtcaattcagccaccaaataaccaagagaacctgctgggtgggagctgccaacttgctggtcatgttgggtcaacaaatgagaaaattgcaatggtagaggaacaacttactcaacattctactgccagcaaatactcgaatgaacctcccttcagaggatatgatggaacgttgttgcaaaacccaaataaaatagttcaaacaagtcaacatatgcttcaacaatttcttcagaaggtggacagcacaaattctgttgtttctagcaatatgcccatcagatctgatattactcctaatcaacttaaccagccccctttacaaggatttggattaaaattggcaccaccaatgcaacaacaactaacttcaggtaatttatggaccagtcacacctctgttgacatcaagccagctgataattcagtaccaggggaagaccagcgacagctaccttccactcctggttcgacgacttcatctggctacccgagtcgatcctcaccattttactcatcagatgctgataatactggactgtcaagtgggtgcctcccccaaactaaaagcttaggccagcaatacccagttgcagagccaaagtctgctcctgtaaattctcttcctcagcagtctctgcaaggtactgcagcaacaatgctcaagaatgtgtggacaaacatctcagcacagcgcctggggggtatccaacataacaagataactccaaatattctccagtcaatgatgttcccaagtactattggtgattccacattacggggttgtccgaaagatgattatcaaagaatgagggtagcaaatctatctgatgatgccacaactactaccaactcaggaaggcaagaaataaagcgagttgtggaaaatgatggatctgacataccaaatatggatcaaatgggagatattttattaggaaagaaaaatgcccttcagagacccttgatgcagcatggcatcataaactcgtcacaaggggaaaatatggcagcaaacattccaaatatgggttcttcctttaacaaagtttccacctatggtggcatcagtctgcatggaagcctggcaccatccaattcccagcagataaattattctctactgcatcagattcaggccattaagcctgttgattctgatccagaaaatacgtctggaaagaggcttaaaacaactgatatgagttgtaatgcttcacaagttgaatggcccggtgccgaaagagctccacatggagaaaataatccattgagattatgtacagataaaactgaggtcccaagaatctcaaacttgttgccatcagatcagatgttaaggtttgctcccaggaacagtgaagatgtaacctcaaccatgccatcgcaggttcagttgagggagttaacctccacctccaatgatatggccactgcaagaactgatcttcaaaatcaatgctcatctcttggcacaagctcaacagaaaatttaattgaaagtggtgacaaattaatgatcaaccctcagatatcaccctggtttcaacatggtagcaacagaaatggtcataatcttgctatgtacagtgtcaggaaaactgcatcaccgtataatcatccaaaagttccctggagcatggacactagcagtgtttctgggcatggacttgaatgctctacttctgtcagacctgaaatgccttctggtctaaaggtatcttcttcggtgcgaagaccgaagaagcggaaatttaaagctcctgtgcttgtttcttggaatcaaatcattgatggccaccaaaagttggcggacatgagcactctgggtatggactggcctgaagcaactaatagattaatcgaggtggaagatgaagctgacattcaagaagatgctctcatattatatttaccacgtaaaaggctaattatgacctctcggttgattcagcaacttctcccttctataccagcggctattcttagggcacaagctatatcaatgtaccaaagtgtaacatatactattgctaagttgacagttggggatgcatgcagcatgccttcaaattcatctttggacactggcactctcataagtagtggggataagtcatatgaacaaattgagaatgacaaaatgagagacagattcacaaaggccgttgaattttttattccaagatttaaaaagatggagaatgattttgtgagaaaatctggttgggaaagaagaggtgtatggtattgaagagagttggacggggtagatatgtactagtagaatagacatacagagtttcctctttgcttgccttagaaagagacctgcatccctcttttctgaaggaccccctgaagtaattaactagcttgattgtttactgaacgcacttctcactaatttgattttcaagttcactgcagaggtgctagtgccaccttttgtattgcaacaattgatttttaattttatatatttcagacatactttatttatgtctt

SEQ ID NO: 26577 - DNA, 2756 bp, Oryza sativa
  ref <308>: DATABASE ACCESSION NUMBER: AK102019
  ref <309>: DATABASE ENTRY DATE: 2002-08-28
gcttaccggcaacctcccccccgcggggcagccatgggcgccagccggaagctgcagggcgagatcgaccgcgtcctcaagaaggtccaggagggcgtcgacgtcttcgacagcatctggaacaaggtctacgacaccgagaatgcgaaccagaaggagaagttcgaggccgacctcaagaaggagatcaagaagctgcagcggtacagggaccagatcaagacgtggatccagtccagcgagatcaaggacaagaaggctcttatggatgcccgaaagcagattgaacgcgagatggaacgatttaaggtttgtgagaaggaaactaaaacgaaggccttttccaaggaagggttaggtcaacaaccgaaaactgatcaaaaagagaaggcaaaagctgaaacaagagattggcttaacaatgtggttagtgatttggaaaaccaaatcgataacttcgaagctgaggttgaaggactttcaattaagaaaggaaagcaaagacctcctcgattggtacatttagagaaatctatcacacggcataaagctcacataaagaaattggagtcaatattaagacttttggataatgatgagttgagtcctgagcaagttaatgatgtgaaagatttcctggatgactatgttgaacgtaagccaggaagattttgatgaatttagtgatgtggaagagctctatagcacattacctatggagaaggttgaagcactagaagacatggtttcacttgccccttccagtcttgtcaagggtgttgcttctgtttctactactgcagttttgagtacgaagagttctgtagcaacttcacctactcaggctactgtatcagcaggctccttcgctaagtgtatcacaagatcaagcagaggaaacggcttcacaagaaagcaatcctgaatcggcaccacagacaccaccttcaaaagttggaagtcaaccttcagtgccagtcgtgccgactaccatcagtactagtaccgctgctgtctctgtttcagctgaaaccattagttcccctgtacgcccaattgttcctaccacaacagctgcagtacttcctgcttctgtcactgctcgaagtgctccagagaacataccagctgttacttcagctcctgcgaactcatctagtaccttgaaggatgatgacaacatgagctttccttcacgtagatcatcacctgcagtcaccgaaattggccttggcaggggtattactcgtggattaactagtcagggattaggttcagctccaataagtataggtccagtatcagggaatggatcagttagtgcacttactgacttgtccaaaagaaacatgttgaatactgatgagaggattaacagtggtggtatttctcagcagttgatttcaccacttggtaataaagctcaacctcagcaggttctgaggactactgatacaattagctctgattctagtaacacaaatgagagtactgttcttggaggaagaatcttttctcccccagttgtttctggggttcaatggaggcctcaaaacactgctggtttgcaaaatcaaagtgaagcgggccaattttgtggaagacctgaaatttctgcagatcaaagggagaagtacctgcaaagattgcagcaagtacaacaacaaggcagccttcttaatgtttctcatataacgggcataagtcagaagcaatttccatcacaacaaccaaacccgctcttacaacagtttaactctcagagttcctctatttcctcccaagcgggtattgggcttgggcaggtacaagtaccagaatctgggcatacaaaaagtgaggaacaacaacaaagttttgcagaagatgttagtgtggaatccgttgcaacagctggagcaaacaaacacatgagtgaagatgatacaaagattccattttcgaatccgtcagcatccataacagaaggtactcaactatctagagaccctgatctaccagctgggcagcctttgcaacctggcatgtcatcatctggtgttggtgttatcggccggaggagtgtatctgatcttggtgcaattggtgataacctcagtgtagcttctgcaagtactagtcatgatctgctttataatctgcaaatgcttgaagctgctttccataggcttccacaaccaaaggactcggagcgagtcaaaaattatattccgaagcaccctgcagtcacccctgccagcttcccgcaaattcaggcacctgtagtatcaaatcctgccttttgggaaagaatgggtggcgattcattatctacggatttgttgttctttgctttctactatcagcaaaacacataccagcaatttttaagtgccagagaactaaagaagcaatcgtggagatttcacagaaagtacaatacttggttccaacggcacgtggagccacaagttacaactgatgagtatgagcggggatcttatgtgtactttgatttccatgtcatagatgacggcacaggatcaggatggtgtcagagaatcaagaacgacttcacatttgagtacaacttccttgaggatgagctgtcagtacagacaaattagagagccaggatattagggctaatcaaatcattttcaccattgtgaatcttgtaacttttagaacggaactgctggaatctggaacacttacagattaactttgtggttggatttaaaagctgttctgtgccttcctttccattcatatcc

SEQ ID NO: 26578 - DNA, 1314 bp, Oryza sativa
  ref <308>: DATABASE ACCESSION NUMBER: AK102020
  ref <309>: DATABASE ENTRY DATE: 2002-08-28
gcctctcctcctctctctctcccccgctcctcgcgccgccgacatcgccggagaaaatgagtcaacaaggggagtaccacgccgacatgatggcggagttcctgcgggggagcggcggcgcggccgtgattgacggcgggctggcgacggagctggaggctaacggcgccgacctcaaggacgccctctggagcgcccggtgcctcttcacctgccccgacctcatccggaaggttcatttggactatcttgaagctggggcaagtgttctgataacaggatcatatcaggccacaattcagggcttcctttcaaagggattttctcaggaggaaagtgaatcattcctgaggaggagtgttgaactagcatgtgaagcacgggctatttacctggaaaaatgttctaacggttcggacgaagccaaagacgtaacaaaatacaggaagcgcccaatactaattgcggcatcagttggttcttatggagcatacctagcagatggctctgagtatagtggtgactacggtaatgagggcactttggagttcctcaaaaactttcatctgagaaggcttcaagtccttgctgaagctggtcctgatgttattgtttttgaaactattccaaacaaaattgagactcaggcatatgttgaactactagaggagtgtaaattacgtattccggcatggtttggtttcacttcaaaggatggagtcaatgtagtaagtggtgattccctgatagagtgtgcctctattgccgattcatgcaaggaagttgctgcagttggtattaattgcactcccccaagatttatccatgaattagttttatccatccggaaggtgacaagtaaaccaatattaatatacccaaatagtggtgagagctatgatcctataagaaaggaatgggtggaatgctcagggatttcaaatgaggattttgtttcatatgtcaaaaaatggcatgaggctggggcctcactgatagggggttgctgcagaacaagtccagatacgataagaggaatatcgaaggctctgcatggagtttagttgatggagattgagtagagttgatagccagtttttggacagagtcgctaactcactctgtttgcccgatgtgacacaggtcttattggtcaggtagtcagatttcttatggaatttgaatagctattgaggacaatgatttaggaaaaaaaaaaaactaatgctgtgttgttctttcattagcttgtaccagcacctttattgatgaggaaatgatgccaaatgttggcctagaaggagttgctactct

SEQ ID NO: 26579 - DNA, 2426 bp, Oryza sativa
  ref <308>: DATABASE ACCESSION NUMBER: AK102021
  ref <309>: DATABASE ENTRY DATE: 2002-08-28
ggctgctgtcccaactgtagcagtagccaccaccttctccatctcgtcggctctgattagatttcttgatgtcgtgttagcctttccctgttcctttagctaaagaatttaacggcagtggggcagagacggattgatgccattgttcgattctttctcctccttttgcttccttttaagcattgcttttcctggccatccttttccattcccatttgttttgtaggctagctgccatagcctttttctcgtcttccagggctagtatctcagtatctccacttgcttctcattcttataatcgtcgtcgtcgtcttcctctgtgatctgtggttgccttctctgcttcgcctccatttctgttcttggctgcttgttcttcttcttgggcgttgttagccaagaaagcgaattcgtttctttttttcttgagcgatttgagctcggttctttctgctttggacagcgattgagtgaatgagtgagtgagtgagtgaactcagggcctttcctgctttcttcatggacagctcactctgcacagctcaaggttcttgctgagtgaagcagagaactttagctgctgccgccatggatagggcgtcaagatcaggtgttctttcagagacggcttctttcgccgacactccgaggtccatctattcgtcctgcaatctccagcatcttcagtcacagagtatccggaagatacatgaaggtgccttggatatatcgccacgattctcctactgcaaacctaatgctagtcaggacaagatactgcacagaagattctcacttaacttgccagagcatatgccaggccattactccaggacagtaactgaaagaaatcaaaaggctgcttcaaagtccatcacagatctagtcgtggagattgcggcccttgagcaggaagtcgtccgaaaggaattgcatctgctatccctctatagaaaagcatttgatcagtatttatcggagtctggcagtgttacgagtgaggtggatcaagaattgctgaaaaacattgacgagggtgcccttcgtttgaaagacatcaagcaatctgcagccttcaacttaccaatagtctcagatactaaaagtgaggtatcaagatcaccttcaaggcattccagccttgttaacttcttgagtgcatctatttctgaatatgtacccaagatctcttgcaaactatcagaagacattctgagctgcatagctgctgtctactgtaaactcggaagcgtgccactgcaagatagcgaatacataacctcccccagtccttctgtttcatcttcaagtactttttctccgaggaaccgcaatgatagctggagccctcggtacaacttcgatatcaccccgagccctcgccaatatggatacgagaaagagaataatgaacaaaagaacataggcatgataattgtcccaaggatacgaatagatgctgacaagtttgattacgcctcaaaaatgcttgagactatcaggtccctgattcaacggcttgaaaaaattgacccaacaaagatgacacacgaggagcaactctgcttttggattaacatccacaatgctttagtcatgcatgcatttttggcctacgggctgcacgataaacgcatgaaaagcacggacatgattctgaaggctgcgtataatgttggtgggcagtcagtaaacgctcaaataatccagaactcaattcttggatgccaatcccatcgtccttcgctgtgggttcgggcgctgttcgcaccaacgaagagatccatggcagggacagccaggcatccatatgcccttcagcatccagagccagttgctcattttgccctctccactggagcattttcagatccacctgtgaggctgtacagtgcgaagaagatacaccagcagctggaggtggcgaggacggagttcatccaggcgaacgtggtggcgaggaggcaggcgctgatgctgcccaaggtgctgcactactacgccaaggacgcggcgctggagctgcggcatgtggtggagctggtgtgcgagagcatctcggaggcgcagcagcgggagatccagctctgcctcaggaggaggatcgacaagtgcgtcgagtggctgccctacaagtcctccttcagatacgttgtacatagggacctggccgagtaggcatgcagcaaaaaaggatttgggttcgttttattcttcttcttcttcttttctttgttttcttttcttttttgtttgaaattcaaatttcaaattgcggtttggatgtgcagtgctgtctcgttgtggtgtaagtaaaagaacggatttctggtgagggcaatggcgtgggttgggtttgtaatggattttgcgttgtgtgtgtatgtgtgtgtaaatataggtgatttgtgagttgtgatgct

SEQ ID NO: 26580 - DNA, 1618 bp, Oryza sativa
  ref <308>: DATABASE ACCESSION NUMBER: AK102022
  ref <309>: DATABASE ENTRY DATE: 2002-08-28
gatagtgagtctcgtcgcagtgagagagagagaggagtcgagtagatagatagatagatcggcgtgggagaagacgacatcgccggcgacgagaccagatcgatcgccgaggtatcgcctccctccccgaccgagcagggtcgccgccgttcgttcctcttgctgcttccgccgcatccatcctgcggggactaaaccttgaagcatctgggctgttgtttcaccattgtagtggattccacttcggaactgaacttttctagttgtttccgtgacaatgaaaactcacgagagagctgctaatttggcccttgcaggtttgagcttggcaccccttgtggttaaagtagagccaaatgtgaacgtcatattgacagcatgtcttgctgtctatgtgggctgttaccgttctgtcaagccgactccaccctctgagacaatgtccaaggagcatgctatgcggtttcctttggtgggaagtgctatgcttctctctctgttccttctattcaagtttctctcgaaagacttggtcaatgctgttctcactgcctactttttcatccttggcattgccgctctctgtgcaacattgctgccttccataaaacgattccttccaaaagaatggaatgataatgccatcgtttggtgtgctccatttttccactcgctctcagtggagtttaccaagtctcaagttgttgcatcaatcccaggatttttcttttgcatatggtatgctgcgaagaagcattggctagcaaacaatgttttggggatttctttctgcattcagggaattgagatgctatcacttggatcattcaaaactggtgctattctcttggctggcctctttttctatgatattttctgggttttcttcactcctgttatggtcagtgttgcaaaatcatttgatgcaccgataaagcttctatttccaacaggagatgctgcacgcccattctctatgcttgggcttggtgacattgtgatacctggtatatttgttgcgctagcactgcggtttgatgtctcaagaggaattaagaaccgctacttcaatagtgcatttttgggttatacggtgggtttgaccgtgacgataattgtgatgaactggtttcaagccgcacagcctgccctcttgtacattgttcctggtgtgattggttttgttgctgttcactgtttatggaatggagaagtcaagccactcctggagtacaacgagtcaaaggctgaagaggaagatgctgttgaagaagatactgatagcaaacagaacaaaaaggaggagtagcactctaacagcagggcaagaaaaggcagaaatttcatgtaaggtcgtcggcagctaagtaggctggatgacctctcggataccagctcacttaagaacttagaaatgattcgcatgatagaaacccttttttgatttaagaattgtttggtctggtgattagaagagaagagagtagattcttaagaggcctgccaatatggtccagtggcttgactttacccggtaccccttttgctttagtactgacttataatggtggtacaaaggatttacctgaatttttggtctggcaaatagcggtttgtg

SEQ ID NO: 26581 - DNA, 1285 bp, Oryza sativa
  ref <308>: DATABASE ACCESSION NUMBER: AK102023
  ref <309>: DATABASE ENTRY DATE: 2002-08-28
ggctgtgcaagccgcctcctcctcctcccccctgcctctctctcctcgcccttcttaaccccgtctcgcgagagaggagaggagccaccaccaccgcctcgacgccgagaaccagcctcgccgtgacccccggtcgccagggacaggttactctcatctttggtgcttgtgaacaagacgacagccaccgctcatcaaagagcaagccatggaggaatccaatgatcagggccttgcacagaagagcactgcccccactgggttcttcagggtccccggcctctttgtgaggctgagcagcaaaggattgaacgcagtggaccctgattctgcctggagcccaacctctccattggatttcaagaacctgtcatcgagcactggaagcacaaatctcaaatcctctgggctactgggtgtcgaggctgatcagaagttcagaactaaccctcccagagtcggcctcggcctcgtcgacgccctcaccgccgacgagagctcctcgtgcttgggtgtcacgagctcgtttcttgattccatcaggccatttcttgagctcgggttgccgaaggcggcgagtgatgctgcaatgcagaagaacggttcaggtagcgtcactctggacgagattgcagactttgctctgtctgaagagtacacctgtgtgatcgagcacggcccgaacccgaggacgacgcacattctgggagacgagacactggaggtgtgcaagggtgtcccaaggagttccaagaagtcaatcttcaccatcgagcccatcggcgagctgccgtcgacgctggcgtgtgctgtttcccgctcatgctgctactgcaggaagaggctgcagcaggacagggatatctacatgtatctgggagagaaggcattctgcagcaacgagtgcaggagggactacatcgatgaggagatcgaggaggtggaggagctcatgatgctggattctgccggttcttctgccctcttggcttggtgaaaatcggcagtagatgactagaagtagtagtagtagtgctggtgagtggtggtgcaggaaagcgactactacctcttttggatggagattcaggttttggtagggaaaggaaggaaaacatgcttcccgttctagtttttctgaatggagaagtttttaatttagccggtttgtgcaaacagaagtgcaacggctaaatgattttcatggattgtgtggggattccccattttgcctgtaagacgagcaaaccccccataatttcacagcaaacagttctccctgctg

SEQ ID NO: 26582 - DNA, 1930 bp, Oryza sativa
  ref <308>: DATABASE ACCESSION NUMBER: AK102024
  ref <309>: DATABASE ENTRY DATE: 2002-08-28
ggcgcgaaccaacccccgccgccgccaccgccaccgccgccgccgccgcatcctcctcctcgcgcctctcgctatccatggcattgcacgcgccggtgctcgtgctcaaggattctttgaagcgggagtctggcaccaaggtgcatcatgccaacatccaggcagccaaggctgtggcggatatcatacgcacaacattgggccctcagtcaatgttgaagatgcttcttgatgctgcaggaggtattgttgtaactaatgatggcaattgtatattgcgggagctagaccttgcacacccagctgcaaagtctatgattgagctaagccgcacacaggatgaagaagtaggagatggcacgacatctgttattgttcttgctggtgaaatgctccatgttgcgcaagcattcatcgacaagaactaccatcccaccgttatttgtagagcatacaccaaagctcttgacgatgctctatctgttcttgataagattgctattcctgttgacgtggacgaccgtgttgcaatgcttggtctggtgaagagttccatcggtacaaaatttactggtcagtttggtgaccttattgcggatcttgctatcgatgctaccacaacagctggtgttgacctgggtcaaggcattcgtgaagttgatatcaagaagtacatcaaagtagagaaggttcctggaggccagctggaagattccaaggttcttaaaggagttatgatcaataaagatgttgttgctcctgggaaaatgagaagaaaaatagttaacccacgcatcattctcctggattgccctcttgaatacaagaaaggagaaaaccagaccaatgctgagttgatgaaagaagaagattggcaggtgatgctacagatggaagaggaatatatagagaacctgtgtgcacagattctgaaattcaagcctgatttggttataacagagaaagggttgagtgacctagcagtccattatttaggaaaggctggtgtaagtgcaattcgaaggctcaggaagacggacaacaacaggatcgcaaaggcttgtggagcagttatagtgaataggccagaggaacttcaagaatctgatgtaggaacaggagctggcctctttgaggtcaagaagtttggtgatgagttctttgccttcattgttgactgcaaagatcccaaagcatgtactgttttgttgaggggagcaagcaaggatgtcttgaatgaggttgagaggaacttgcaggatgctatgtctatggcaaggaacatttggaaaaaccctaaactgctacctggaggtggtgctactgaattaactgtatctgcaacattgaaacaaaagagttcttcagttgaaggtgtagagaagtggccctatgaagctgccgcattagcatttgaggcaattccaagaactcttttacagaattgtggcctgaacgttattaggacaatgacacaacttcagggaaagcatgcaaatggtgaaaatgcttgggttggcattgatggaagcagtggtgatattgtggatatgaaagagcggaagatctgggactcgtacagtgtcaaggcgcagacattcaagacagctattgaggctgcctgcatgctcctgaggatcgatgatattgtcagtggcatcaagaagaagcaagctcctggagccagttcagctccaaagcaacctcaaatagaacaagagggtgatgcagacaatgaacagatgatcccagagtagaatgtcacatgaatgcatcaatcacacttaacctaacatataaatcagtctgttgaaattctttaaatttttgtggtagcctttataatcatttcccaacacaacttttgtatctgtcagtttgtatggctgttagccatccatgtttatgttggtcacatagttgagtactc

SEQ ID NO: 26583 - DNA, 2134 bp, Oryza sativa
  ref <308>: DATABASE ACCESSION NUMBER: AK102025
  ref <309>: DATABASE ENTRY DATE: 2002-08-28
gaccagccaccacggcggcggcggcgccatcaccaacccacacccacacctactactacgacgacacaagtagtggtcgtcgaatccgcggcggcgctcgcctgagcttgcgctgcacctgcacgcggcatatgcctcaccgccctcacctggctcagctccgccgcctcctcctcctgccttgctcctccgtccccgtccccgtccccgcccgccgcctctcctcccctcgcgccatggcctcctcctccgtctccgccgccgccgccgccgcgcaggcaggtggtgctgtggcggcagcggagtacgaggacgtgatggggcggctctcctcgctcatcacgcagaaggtgcgggcgcacagcggcaaccggggaaaccagtgggacctcatggcgcattacctccagattctggagctggaggagccgatcgcgcggatgaaggtgattcacgttgccgggaccaaaggaaagggttcaacatgcacattcacagaggcaatcctgcgatcatgtggtttcagcacagggctgttcacctcaccacatttgatggatgtcagggagcgattccggctaaatggggtggatatttccgaagaaaagtttttgaaatacttctggtggtgctggaataagctcaaggagaagactgatgatgatattcccatgccaacctacttcagattccttgcattgttagcattcaagatattctcagctgaacaggttgatgttgctgttctcgaggttggccttggagggaagtttgatgcaactaatgtggttgaagcacctgtggtttgtggaatagcttcccttggatacgaccatatggaaattcttggaaacacacttggagaaattgctggtgagaaggcagggattttcaagaagggagttccggcctacactgctccacagccagaagaggcaatgattgctctgaaacaaagggcttcagaattgggtgtttcactccaagttgcacatcctttggaaccccatcaattaaaggatcaacatcttggactgcgtggtgaacaccaatatgtaaatgctggccttgcagttgcattggctagtacatggcttgagaagcaaggacatgtggaaagaataccactgaaccgaactgacccgttaccagatcagtttattagtgggctgtcaaatgcctctttgcaaggccgagcgcagatcattacagattcacaagtaaactcaggagaggaagataaagactgttctttggttttctatttggatggggctcacagtcctgaaagtatggaaatttgtgctagatggtttagccatgtcactaaagaggataggacagtaccatcttccatggtgcagtctcagtcttgtggcaactctcaaaagattcttctattcaattgcatgtccgtgagggatcctatgaggttgcttccgcatcttctggatacatcaactcaaaatggggtccactttgagatggctctttttgtgccaaaccaatcacaatacaacaagcttggtaccaattcatcagctcctgcagagcctgagcaaattgatttgtcatggcaattgtcgcttcaaagagtgtggcagaaattacttcatggtgataaaggtatgaacaacacaaattccagtgagaacagtctggtttttgaatcacttccactggcaatggagtggctgaggacaaatgcccgacaaaaccgatcaacttcttttcaggtcctggttactggctccctgcatctcgttggtgatgtgttgagattggtcaagaaatgatacttcttcttggaacgatatacacttagaagttcaaattgacgctgagccaatttcgcggtttacgtttgagatcccctgacggcaaccgggcggttacaggatacaacaatttcaatttcaggtgttttggattctatgctgaccaggcagcgagcatatcgcgtatactcttcttgttatgtgtttcatggctcctttttgccactaatccgtattctttacccagaaaacttcaatgcccattacaacaagtaataaattgaatacatgaataagatggtggcaatcatgaataggatacacttttctaagcttctggtgaagatgttcgattc

SEQ ID NO: 26584 - DNA, 979 bp, Oryza sativa
  ref <308>: DATABASE ACCESSION NUMBER: AK102026
  ref <309>: DATABASE ENTRY DATE: 2002-08-28
ggttgtctcctcctccgctcctttgcgccgccgccaacacacagggcagggcgcgccgatctccatctggcgagcagagaaggggaggggaggggaggggatcctgtttgggggttcaactgaaccaccatgtcccaagttggatccgcccctgctttcaggactgggtcacctaagaagcatgaactgaagtccaaacagaagcttgagaagaagctcagcttctacacaaaagtgaaagatgcagtaacctccctaaatgctacaaagactatctgcaagaaatctaaacagaggagccgccagaagaaactgaaagcatatgatctctcaatgctctctgagttccttcctgaaacagatgcctcaaatctgcacaccgaagcaaaactgaactgcaaatcgaagcaagctttagtgcaacgggaggctgcccaactgaatgctgtgctgaccaatccgcagttccagctcgacccgtttgcggcgatccatcagcacctgttgtcaacacagccaccctctgcgagaaaggagagcaattccgccaagcaggggaaggaccctaaggacaagaaaagaaagaacaagaagaagaatgcttcatcggcctccgaggcaatggatatctgatatggcaaagtaccctaccaaaggaatggggcgcaattatcgtcaacctcagtttgaaatcgtgtgatctcttaaaccttgtcaaattctgtttcagcatcggcactctcctcccagaggtgtgaggttgggtcaaattttgtttcagcgtcggctctcctcaggttttttttttgacggaaaaacagttggagaggctcctactgcaatatattacttgagtgtacaagagactttacctcctcccagcgaactgcttgtagcgtggctgaagtttctttgtgctgatttgtacatatgatgtttatgatgttttggttaattgttcatgtacctggttctcgcc

SEQ ID NO: 26585 - DNA, 2441 bp, Oryza sativa
  ref <308>: DATABASE ACCESSION NUMBER: AK102027
  ref <309>: DATABASE ENTRY DATE: 2002-08-28
gagtcatggccacagccatggagccataggtgatcaaatcaatcagttgggtctgttgggtgggtggggggaagactcgagtcgtctccatttctcacatgagtctcctacatagcgcttagcaagcgtgcgagtgtgcctatctcagctaggatgtacaatcagatcagtggagcagaagcttagctgaaggcattaagattgaatcaagatggcggatccagtgagtagcttgaagcatatcacgcagatggctctgaagatcaaggaggcggtggacacggttcggagaaacaaggaggattgccttcagatcagaaggcgagtagtcagagtgagtgatatcctctcgcagctgcaggaaacgggaaacatcatgagcaatccggcaatgagcgccgcgctggaggatctctccgagacgctccgccacgcccacacgctggtggtctcctgccaggagaagagcgtcatgtgcctcctctgcgcggctaccgcgctctccaagaagctgcgtcgggtgaacgatgacatctcggatcagatgatggtggggatctttgtgaccaccgtccacactaccattgctctgagccaaattcaaggcgatgcccaacatgatgtaatatatgctcttccccgtacagaaataaccgacgacatcgaagcaacgcttccgaaaaaggaagagcctaagccgccatcaccaccaagggaagctgaaccagaacccgagccaccacttccaccaccagaggaaccaacacccctagtgcgaaacgaaccatcgcccgctcccacaccggagaaaccagaggctactcaggtagtagagtgccatccatcaccagaaaggaaatccacatacactgccccacaagagaaaccagaggctactttggtagtagagtgccatccgtcaccagaaaggaaatccacataccctgccccaccggagaaaccagaggctaccatggtattagaatgctatccatcatcagacgaggaacccacaccccctctgtcaccacagataggagaagtgcgagcagaggatagtggctttcactaccgtactgctaggggcgaatgtaaggggcgatgcggaaataccggtattcaagaacaagtagcgcatcaagcatggcatcatcacggcccatttcaggaaagcagaaatttcaaaaacggactttaatgaagttaggtttttctgagatggagattgctacacatcactttgcaacaagaattggccaaggtggttctgctactttttacaagggtgtgttacgtgatgggctcgaggttgccatcaggaaacatgaaaatgcgcatcctaatcgatatgacgacaagccggaaatgcatcgtttgattcatctctgctcaatgcttgaacacaaaaatatagttaaggtcctgggatattgcgatgaaaacaggggagttgatttgtccaacgaaaatacgccaaaagaagtcgttggtgcaaaagaagaatttctgttgttggtcgaagaatatatggccaatggaaacttaagcaacttcatctatggggagcagcttgactggtcctcccggttccaaataattcaagggataactctgggaattatttaccttcacacacactctgggaaacctactatagtccatctggacctgaaaccagacaacatcctcctggattcagacatgaaccctaagattggtgattttggactagctaaagtgctagaagatgatgagattaatgcaagcgttcgtggaacattgggctatatgcctccagaatatattgttgaaggtgttatctcggtaaagaatgatgtctacggttttggcgtaacactgcttgagaccattagcggaatgagcaagtctggacgagatactcgtcatcaagcttcgattgagtgggcatggggaaaacggaactctggagtaatgaacaagttattcgatccctcactgtgtgacaactctcaactgaaagagataaagagatgcattgagattggactgctctgcacccagaaggaactcacggaccggccaaccatgccagatgttcttcaaatgctacagggcacgaagaaggttccaacccccaagcaaccaggctacatcaaacgagtacgggaagcagaacgttataaacaagtgtaggcagaacgtctgtaagatggcacaacaagattggaagaaatagaccaaccaaagaggggcgaatggttatagtcctcaaaaaccaaaaattttagcggaactaaaagttacccacgaaaatgatggagatcggtttgaccggtgcgatgctgctggtccgaccgccgatgtcatgcctattggactgccgaacttgagcaaacacagatgtaagagctctaatgtacattgaaattttattacttctatttgtggttaaaaaatgc

SEQ ID NO: 26586 - DNA, 683 bp, Oryza sativa
  ref <308>: DATABASE ACCESSION NUMBER: AK102028
  ref <309>: DATABASE ENTRY DATE: 2002-08-28
gccttttcccccggctgtccccaatccaagccgcgcgtccgccgaccgccggtgggggttgccggaggggtttcagcaattcccacccgcagcgcttccttccccgccgccccgtgctccgccagaaggttctccagattcgtagccaggagtagcggcggcggcggcgggaccaatccagggcccaaaccaggtgacgatgagagcaaggctgtgcttgacgccttcttccttgggaaggccttcgccgaggcgctgaccgagaaggtggagtcggtggtgggcgaggtgttcagtgtggtggggcagtggcaagccgagcagcagaagcaggtccaggagttccaggaggaagtaattcagagagcccaaaaggcaaaggagagagctgctatggaggtcgttgacgagaagagcccgaagactttaagggaaccttcaaaaacatttgtggcgcctgcacctgcgacatcgacacctcctccccctactcccacacaggaagaatagctataggtggtgatgaagagttagtgctgcatgaagatgctttttgtaatccaagtaagagattctccggtggcatgtaaccctgaaatgcccttttcttcgttagtgaatatccggcatttcaattaaaagaatggatggtttaattttcacataatgagatttataagttt

SEQ ID NO: 26587 - DNA, 1275 bp, Oryza sativa
  ref <308>: DATABASE ACCESSION NUMBER: AK102029
  ref <309>: DATABASE ENTRY DATE: 2002-08-28
gacctcctcctcctccctctttctccgcgagagagaggccgagcagcgaccgcggcggcgctctcccccctcccgccgcctccacccaccccgtgctcgccggcggggcgaagcctccggtgacaatccccgatccgatcgccgcgctcctctcctctacccccatcccctcctcctccgacgcctccgcccgcccgccgccgtacccgcaccaaccggaaagcgcagctgatccgatggatctcaaggatagcctctccaaatttaagcagcagcaagagaggtgccaatcatctttggccagcatagctgcatcgacctcaaaaccaaagcacagggcccaaccggttaatgctccatccgctccagcaaggccactacaacctattaagttttcaaatgatacagaaaggctacaacacatcaattcagttaggaaatctcctattggagcacagatcaaacttgtcattgaattgctgtacaagacaagacaagcttttactgcggagcaaataaatgaaacaacttatgttgatatccatgggaataagtctgtctttgacagtctgaggaacaatcctaaagtacattatgatgggagacgtttctcttacaagtccaagcatgatttgaagggaaaagatcaactacttgttttggtaagaaagtatccggagggtcttgctgtggtggaagtcaaggatgcgtacccaactgtaatggaagatttgcaggcactgaaggcagcaggtgaagtttggctgttatcgaacatggattcccaggaggacattgtgtatcctaacgacccaaaggcaaagatcaaggtcgacgatgacctgaagcagctcttccgggagatggagttactgcgggacatggtggatatcgagaaggagctccagaagaatggcatcaagcccatgaccaacacagctaaacggcgggctgcagcacagatcaatggggtgcagcccaaggctaagcctaagaagaagcagcgtgagatcacacgccggaccaagctcacgaacgcccatctgcctgagctgttccagaacctcaacacttgattgctctacgcttattcgacgtcaagtggagatatttatttctgtcctcactctacctactgcaatgctttatatacctgctacccttattgtgtatgttataaatgtaattccggcctccgggagcataatctgagacggtcagctttgtaaaacataaatcaattcaagagcttgagatggcataccttcgcctgtc

SEQ ID NO: 26588 - DNA, 2128 bp, Oryza sativa
  ref <308>: DATABASE ACCESSION NUMBER: AK102030
  ref <309>: DATABASE ENTRY DATE: 2002-08-28
gtcgtgaagctgatggaggagcagctggattcatcggagatggacatggacgagcccggcgccgccgcccaagaccgccaaggcttgcgccgccgccaagaagccgagatcggtgagctccgacttcggcgaggagctggacctggagcagctcggtgccaagcagcagcagcagcagcaggagaggaagctgtcgaggcaggaccgcgtcgagctgagccgctcgttccagcacgcggtgagctcccacgactgggatggcgcggaggcgctggtgcggagggccgacgcgcaggggctcaacgacgtgctctgcgtcgccgtcgacgccatctggttcctcagcgacaaggaggagctcgccgccgtcgtggccctgatccggaggatcgtgtcggagggcgccaacgacttcacccgcgccgcgctccggacgtcgttcctcgcgtcgtgcgtgtcggcgtgcagggggagaacgaccagcctcgccgacgctgtgagcttcatggggcaaaagttgaacgagcgccttcaagaatcccatggcgacgaggtattgaaggcagaagcaagcgcaaaggtgcacaagttcacagagtgggctctaaagtgtatcgggctgcattcgcgtgtgcgggagaacaagggcagaggaaaccatggcacgatcattgaggtccaacttcagctgtctgctttcaagacatttctggatcttgccgataatgatcttactgggaaggatttcacggaggcctttgacgcggcatgttttcctcttacactcttctcaaacacctttgaccaaggttgggcatcaggtatctcggcagctgcaatacaaggactcttagagttgttagtagagggtggtgccgataatgtgaaccagtgctttcttgaggctgctcgctatggaagcactgaactcgtgcgcatcttacttcagattgctcgaaggaatagcttggacatcgatgtggatctagcccttggctttgctgctcactatgggaaactggataccatggggtgcttagttgaggagggtaatgcggttgcctttcttggccctttaatgcgggcagctgaacggggatgccttcaagttgttgaatggttcgtcaaccttggttgtcgggatatggagctttgcttagcccttactgctgcaacctctagtagccaggttgcagttgcagcctatcttctccctctagtcccaaagcatgttcttgcacccctcagcgtcgaaattctcaaggctgctggtgagaggagcaccggttccctgcatggtgtggacttccttctccgctcaaacttcctcaatgacccagctgccacatatgctgtagcagacaacattgcaaaatctgccgatgaggcagtggatgcaaagcttagatctttcatgctcgagcattggtcagaggcagctttttctgagggattcgcgtctgcgcaagagcacttcgttaacttcatgaggataatggaaaagggtgagtcgccgatctgcctgagggacctcccacttgagctggtgattgccatggcctacctaccactgtacagggagtgcgtggagtcaggtgggcggctattgccgcagaagctgagagggcagcttgttgaggcggctggtagactcgagggccggcaactcgacagggctagccaaggcacagagctcctggccatcttggagcaccacctcccgtgtttcatgatccagacttgaaaggtcagcttccacatgatctgcattggtcgctgcaagaagcaaagtaacaagggcaatgcaccatcttcagtgttttccagtgctgtcatgttcctgcttggggacaatcatctgaaacgatggcaccttgaggtctctgagagcatagtgactgaagaactctcctgctggcgctgttcggagagtatataattttggggagaaaatggtgtgtaccttcttgtcgagccaagtgttgagtagatcttattgggatcataatcttgatgaaaatgatataagcattgagcaaagtgttctccagttttttctgagtgctagccatgggcgtcatgtttttgttttggactaatgagtttttgaacatggactagtctcatc

SEQ ID NO: 26589 - DNA, 673 bp, Oryza sativa
  ref <308>: DATABASE ACCESSION NUMBER: AK102031
  ref <309>: DATABASE ENTRY DATE: 2002-08-28
ggaggtgagagacagcgcgcgccaccgccgccgccgccgctattttcgtgttttttgatttcacggtgcgcgcggtggccggccggagatgcaggcggtggcggcggcggcggggatgatgcggcgggggagcctgacgatagacccggcgggggaggaggaggcgccggccgagagggtggggcggctggtgcgggagagccccgtggtggtgttcgcgcggcgggggtgctacatggcgcacgtcatgaggcgcctcctcgccgccgtcggcgcgcacgccaccgtcatcgagctggagggcggcgcggcggaggaggaggaggcggcgctgggcggcggcgccgcgctccccgcgctcttcgtcggcggcgaccccgtcggcggcctcgagggcctcatgggcctccacctcagcggccgcctcgtcccgcgcctcagagaggtcggcgccctctgcacctagcccgcggggccgccacgtgtcccatcgtcgtcttcctccgtcctatcctctctaccatggcttagctccatgccttccatgtacataagctgggttatctccgccatttcagaaatctagagggggtggggtgaaaaattccacgccgaaataatactaaattttgtttgggctcatgtgttcttctggaaatcaaaggggtttgtg

SEQ ID NO: 26590 - DNA, 1293 bp, Oryza sativa
  ref <308>: DATABASE ACCESSION NUMBER: AK102032
  ref <309>: DATABASE ENTRY DATE: 2002-08-28
gatcagagtttgacattgttgcctgcatcactttcacaggtatggtgaggaagctcatcctagctctggccgtgttcttgccggcgctggtgtaccagcagctccagcctccgcctccgaagatctgcggctccccgggtggccctccggttacagggacaagaacacagctcaaggacggtaggcatttggcctacctggagtccggcgtcccaaaggaccaggccaagtacaagatcatctttgttcatggttttgactcgtgcagatacgatgctctcccaatttccccggagctggcgcaagagctgggcatttaccagctgtccttcgatcggccggggtacgccgagagcgacccaaacccggcaagtacagagaagagcatagccctggacgtcgaggagctcgcggacaacctgcagctgggccccaagttctacctcatgggcttctccatgggcggagagatcatgtggagctgcctcaagcacatctcacacaggctcgccggggtggccattcttggccccgtgggcaactactggtggtccggcttgccgtcgaacgtgtcgtggcacgcctggaaccagcagctcccgcaggacaagtgggcggtctgggtctcccaccacctgccgtggctcacctactggtggaactcccagaagctcttccctgcctccagcgtcatcgcctacaacccggccctcctctctgaggaagacaagctcatcatgcccaaattcgccttccgaacctacatgccgcagataaggcagcagggggagtacagctgcctgcaccgcgacatgacggtcggattcgggaagtggagctggagcccgctggagctcgaggacccgttcgccggcggcaaagggaaggtgcacctgtggcacggcgccgaggacctgatcgtgccggtcagcctgtccaggtacctaagcgagaagctgccctgggtcgtctaccacgagctccccaagtccggccacatgttcccgctcgccgacgggatggccgataccatcgtcaagtcgctgctgctcggcgatcagccacctcaggcctgatcctgattcgaactctggtcctccccgttcaccaatgtggagtgcgtttcttggtgcttcgttaagtacatattgctggcattgacagcgtagttaatcggccggtcgtcagtaaaagaaaagcagttcgttgattatactgttgtggttgtatcttcactgaatttttcatccgatatctggatagtttatcaacgtcttgttttcctattggctc

SEQ ID NO: 26591 - DNA, 3106 bp, Oryza sativa
  ref <308>: DATABASE ACCESSION NUMBER: AK102033
  ref <309>: DATABASE ENTRY DATE: 2002-08-28
gtgttccaaactttagaatcagtgagtttcagctctcttttacttttgaggagaggaaaagagaagattgagaaggcacgcaaaacgaggtaagccattaccacatgattaattgagtttcaactattttaaatttcaagaatggattaatatgatttttaaagcaactttcctatagaattttttttttttttgcaaaaaacgcaccgtttagtagtttgggaatcgtgcacgcggaaaacgatgtgctttctctccaatcacccaacgaacgaacgctctgactaatttggagtattaaacatagactaattacaaaactaattacacagatagaggctaatttacgagatgaatctattaagcctaattaattcatgattaattactgtagcactacattgttaaatcttggactaattagtcttaatatattcgtctcgcaaattagcctccatccgtgtaattagttttgtaactagcctatgtttaatacttcaaattagtgtccaaacatccgatgtgacagagactaaccctgtatccaaactaccccatagtaacgatatgtctaaccctatcttcctttgtatgaaggacatgcaatacattcgtgtgttcttgaaaaagtgtgtaaaacatatccattctaaattcgggggaaagctccatagatttgattttggtcagtttgtaaagagcggtagatctctggtttagaactcagacgatcttcatagtcaaccttcctagagtaacttgggagtttaaaaaactattgaatcaatgttcctatttttggaggctagaaaaggagaaaacatgattgttgaccctgtaaactatggtctcccactgttgtctgtggttttgtttttcaaagaatccttacgctttgatagctcaagtgaaactgatcatgcaatgggttttatgaattaggaagtcttgtattaaatcagtatactgtgagcaacaagtataattagttgtttgattctcaacatgattctatttatctgtctatcaccattgttttatgaaatatcgccatagcattagcacgttcatattactagtatagtaagtcaattagtaggcatctactctctctgtttcatattataagttgttttgactaatcaaactttaagtttaatcaagttagcatagcattttaaatacaaaacaaatatgttattaataaacttggttaagtttgactacggaaaaagtcaaaatgaattaacaaaatatacccagatcattcctaaccgttggatcctctcatctaacgacctacgttgtgagttggattagccgatggattagtagcaggattagtgaaaccaatggacaacctccctgcttcgagcaccccacgcctccacttcgtcgccgccttgaaccacccctcttccttcccaggtggctcgtcgccactgccatcccccagccaatgtcatcgccggctcgccaataggcccaccaccgtgcgccttagcccaccaccatcgcctcgtctcgtgtcgccatctcccctcaacacagtgcgctgtggctgctacacattaactccgctcgacatcgccgcctgcccaccgctgtcggtgctgtcgatttgtcgtcatcctcaactctgcatcttcgccataaggaaggcagtgagcatgagttgagggctgagcgcgaccctagggcaagcaaagcgggattagatagtagatcgcaacgtcgtcaccataagaggaggaagagatgaaatcttataaaattatccatcgtcttccgttcatccccatccatctatcactacagatgcaatggatggggatattggcggtttcctgtggacaaaggggaaagatggtagcgacaatagcggtggtttcctgcggacaaagggggagagatggtagcgacaacggctggcagcacgagcttgagtcgcctgacagttgctgtaactgatttgccaaggctttcaaattttttcaggtcttcacatcccttgccaactcctatgcggttgctcctaccgtctgctaaaaaaaatgagttcaatgctcttgctttgcttggtaggggcgatttgctgccccgctacaggctacagctacagctacaactgttgatgttgttgctgctgctgctgctattatgttactgccaccgcattgctctttctgatttgttgtcgatttgcttctgctctacgttgacctcatgatgtatgtgctgctgtgcactgctgctatggccagagaataggaggatacaaagagaacaaggaagaggaggaacgcattagaggtttttggtgctcaaggactgctcgatgaaatgtatcttgaggggctcatcccaagtatttgtctcttctatcgattgacatgtagtgatttagtgccttcctctggattgtgcacacaagaactgttggccaggttctccctccattttagcttaaactcaattggtgatgatgaacaacccacaaccatggagatcaactattattactataaggtacactttgttctatgagcgtaagggggcatgtgcccccatctgtgctccgctccgttgcatcgttgcaacgacggtgcggagagggcaagataaaagaggtgctaatagtcgcggttggtcgcgttgtgctcatctacaaagaatcgtgcgtatgcatgtcttgatggatatgcttaccgaccttatggagatttgtctttgtggatatatggtttgcggtgctttcgggttgctggatttgtcttacagagatgtctcggtggatatgtggtttgaggtgctttggagttcctggagttgcttctccaattagcacaccaattcttttgtggcgtgagacacatatccactaccctacttatcacgatggtcatgatcaacatgatatgttcactggctcaaataatctccttgtgccgaggattgtattacgactatgtacacatctacgtctcatgctgaggattgcatttcatagtaagtttgatatccttacactgcaaatgataatgtattctttatatttatttgtgtaagttgattttcaggtgtgatatctatcaattcttatttt

SEQ ID NO: 26592 - DNA, 1312 bp, Oryza sativa
  ref <308>: DATABASE ACCESSION NUMBER: AK102034
  ref <309>: DATABASE ENTRY DATE: 2002-08-28
gaagctagctaagcacacacacacttactaattcagctaaggatttggaggatcggagatggtgatggtgaagcttaacgcggcggtggccgccgccgccgttgtgctgtctctgttggtggtggtcgccgtgcatccggcggcggccgacgccggcggcgattggtacggcaagaagagcatcgaggagacggtgaggaaggaggtggagaaggccatcaagcacaatcccggcgtgggtgccgcccttgtccgtttggtgttccatgactgctgggtcaacggttgtgatggatcggtgctcttggacaagacgccgtacagcagcagcacggagaaggcggcggcgaacaacatcggcctggacggcttcgacgtcatcgacgccatcaaatccaagctgggcgccgccgtctcctgcgccgacatcgtggtgctcgccggccgcgacgcctccgccatcctcagcggcggcaggatcacctacgacgtcggcacgggccgcaaggacggcgtcgtctcctccgccgccgccgccgacgccgtcctcccggagtccaccttcgacttcgcccagctcaaggacaacttcgccagcaaggggctcacccagggggagctcgtcatcctctccggcgcccactccatcggcgtcgcccacctctcctccttccacgaccgcctcgccgccgccaccgccacgcccatagacgccacgtacgcgtcggcgctcgccgccgacgtcgaacggcagaagggtgtccagcgcacggacaacccggcggagaagaacaacatccgcgacatgggcgcggcgttccagagcgccgccgggtacgacgccgccggcgtggacacggcggcggtgggggcgctggacaacagctactaccacaacaacctgcagaaccgggtgctgttcaagtcggactgggtgctgcgcaccgacggcgacgccgccgccgacctcgccgagtacagggacaacgccaccaagtgggacgtggacttcgccgccgccatggccaagctcagcaagctccccgccgagggcacccacttcgagatcaggaagacttgcagatgcaccaaccagaactactactagtagtagtagtaactagtcaacgatcgagtcagcggaaaaaaatacgacggtattatactagtatacgcgtagtgtacgtacattaatacgactacttgtacgtacctactgtaatatcaccttggtttaaaattattactactgcatcgttaatcttaagtctttgattaattttgtagctaatgtataataagggcttataat

SEQ ID NO: 26593 - DNA, 2291 bp, Oryza sativa
  ref <308>: DATABASE ACCESSION NUMBER: AK102035
  ref <309>: DATABASE ENTRY DATE: 2002-08-28
ggtacccatcccatctgcaaaccgaatttccgatcgatcctcccttcccttcccttcccttcccttcctcctgcgccgccgccgccgcctctcatcttcggttccaatccaatccaagtggcaatttcttcgggttcagcaatgcccaacgttaggtcctcccctgtcgcagatcttcctggatggccattgttttcgcctcctaagcttcagttgcaaaagtgtaccaagtgtcccagggaattttgctcctcaatcaactacaggcgccatacccgtgttcaccgccgaactctccaaattgaaaaggatttcctgaagaacagagacaatattgctgcattctgggacaaacttacgttggatcaggccaaaacaattttgtccttggcagatgtggatatagagggtgtcactggtccttccattttagcagcactgtccacatggatgtgtaagccggggtatgcttcattaccgctgccatatgccagagctggcaatcaacttctggacctaattgaaacaacagcttcaaggttacctgtatcatcgaatgaactatttagcatgcttgacgaagcaagtgagaatacgtttctctctactaacccaaccgcctgtatacaaaagtttatatttaacggggaggctgacaaagttgcacctgagttgaaaaatgctgttgcatgcactagttatatgcttgaacaaacactggtcgaagcatggtctgctgataaggctgctgaagcattaagatgccagaagttgctcgtggaggaagaggaagctgctcagaaaaggcaagctgaactgatagaaaggaaacggatgaagaaactgaggcagaaagaacagagattgaaagacttgaaggatgaggatgtcacagaccgttttcctggatctgtggatgggacaacagattcttctggaatactaagtctgaaggaagccacttcggatcctggcctttatgagcaagaagatacacagttgccaacgccagtggcttcggaagataatagtagttttgctgacctacctgtagaacatgacattcatgatccaggccatgaagtgaatccaagtgttactttgaatcaacaagtcttttcaagacatcgtgtaggaagaacagaaaactttgcccaaaatagctttgcctctggtggttctgcaattggttcaaagcatccagcttcagtaaggcattcacattacaggggtgcaaatgccggtgcagtgtcaaatagaaacaaaacatggacatggaaagtgcgaactgagattgaagagcacagcccaaaagatgagttgaatatagatgatgggcaagagattgttctgaacaagaagtctcgtgtattaataggatccataagtgttgccattgaagacggcagcgaatgcttggaggataaccaatattccaaggaatacccgactcctgcttctcaattgaatattggcaaccatcctgtaacgaaggtgatgcagccatttaaccatggagaagagggaaacggatacaatgctcataatgatgttgaagttagtattactccaacagcacaggatcattcttcatccggcgttatgacagatggaaacaattgttcaagctgctgcaatgcagggttggcagagggtggaggcttacgaggcgccatcttttccagtaaagaagcagctgccttcctttctcaaagatggaaggaagcaataaacgcagatcatgtgaagcttgtcctgtgccctgaaggctgaagcaagtaacgtgggatcctgttgagccggcgaagtagcaagggttgagtctgcatcatcaaccaatcggagttactagaactagtgaagttggcagaggggggttcctggcgtgtgggcactactccgtaggaaatgaagtgatggctttttgttagacgagcagggaattaagctgcattttaatttggtttggagtagatgacagccggggttcatgaacattgaatttatttgtttatatatacagttatagttatatgatatgacagccggtgcgtgcgttaacattggattcgttgcaaacatggacaagattagtgaatgttgtgctggttttggttttggttttgggttgcatgtatgtaattgtaatatactccatcatatcatatcaggagtaaatggggtatttactgctccctccgtttcttatgtttttattgtaaggcgtattttgtttcgtttgatcgacgatgactgaagaatagcaattcaagagcaatgttttttttttc

SEQ ID NO: 26594 - DNA, 894 bp, Oryza sativa
  ref <308>: DATABASE ACCESSION NUMBER: AK102036
  ref <309>: DATABASE ENTRY DATE: 2002-08-28
ggcggcgtccatggccgtctcctctaccctacggcgagctcgatctcacccctcctgggcggccgccgcgcgcggcctcctcgccacctggggcgccggatccggcggccgcgttcgtcatccgcggcatggcgccgcgtccgcgtcgttgttctcatcgttgtccagttctcagacgagcgccgccgacgcacagctcctccgggtcataaacatggagatctcctacgcccagaaagattgcaagaatcgcaactggtcaaaggaattaggtgaaggctttccttttgaaatccaagataaggatggtaccaacatgatgacgcttaagaggagtgaccataaagaacaaattgaagtggaagtgttcttgccaagcgctgtcaatgaagctgaggaaaatggcgagccagaggatcagtgtgaagatggcaaacatagaactcacattggcaatggtgtcccggcccagtactgtatccctttgatagtgagggttcgcaaagaagcagcttcatatttgaaaatcagctgtagctcttaccctaacgaactcatcattgagagcttgtcgtttgaaccgaatgatgaatctggtgattcggccagtcttgaagctaagttgagtaatcttcctgaggaatttcagaaggcagtgtattcctacttgaagagtaggtgcatttcgactgatattaccgacttcttacatgcgtacatgataaacaaagagtgccatgaatacttgtcttggctgagaaaagtgaagggtctgattaaaagttgaataaaagtgaggaatgggagcgccatcttgtacttttcgtagtttggccatgtttcttttccttgaaattctgttttcaccgggtttagatgtgcccaaagagaacc

SEQ ID NO: 26595 - DNA, 3221 bp, Oryza sativa
  ref <308>: DATABASE ACCESSION NUMBER: AK102037
  ref <309>: DATABASE ENTRY DATE: 2002-08-28
gcctcacctctcatcgtcgcacgcacgcccgcacctcctcccctcccccctcaaaacctccgccgtgatccggtggtggatgcagcctcgtgggcgatccttcaaccgccgctcccggagcttctcccgcgcccgcctcgccatcgaggggtcttaatctcgccggcctcctcccttctctcagactctcagtcgctaaaccctcccctctaaaatcgcactgaacgaacggtcgaacgatcccgccgagatggacgccgcggccgccaccgctgttaatggagtgcttgaggtggaggagaggaaggcgcagaagagctactgggaggagcactccaaggacctcaccgtcgaggccatgatgctcgactcccgcgccgccgatctcgacaaggaggagcgccccgagatattgtctttacttcctccttacgaaggaaaatcagtactggaacttggtgctggaataggtcgcttcactggagaactagtgaaaacagctgggcatgttcttgcaatggatttcattgaaagtgtgattaagaaggtttaacattcacatctcatttaaaaccttaaaaccagtttggtagctgaactatgattggcttcgctgaactatgattggcttcttttatctctacatgaatgttatgcctgattcatttagtcttgtgtgtcgtttcttgtagaatgaaagcataaacggtcaccacaagaatgcatcctttatgtgtgcggatgtcacatgtccagacctgatgattgaggataactccattgatctgatattttcaaactggttactgatgtatctttcagacgaggaggtaatgagcagatagtacttaataggcctcatatcgtgtctcatttcaaataaataagcatatttaagatctgttgcgatccttctttgcacatctgaatatgtcttgggaaatgaaccctggatgatataaatcgactttgtgttgaaacttggtatgtcttggctatgtcttctgagtttgctaactcatactgttactgtaggttgagaagctagtaaagagaatggtaagatggctaaaggttggcggctatatcttctttagggagtcttgtttccatcagtctggagattcaaaaaggaaagtgaatcctacacattaccgggagccaaggttttacactaaggtcagtatgctaactatcttgtttctggttcccttctatcatttgaatctcaagcttgacagttcaaggttttctactagacttgcctcgttaaatgttacccactttactgaatctaaactatacacacagtatgcttatagcagcactgagcaatgttatttgcgctactttgtaacaagttgtgatgattgaaggctaacagattgatttaaaaataggtgtttaaagagtgtcaagctcttgatcaagatgggaattcctttgaactctctgtacttacttgcaagtgtgttggagcttacgtgaaaagcaagaaaaatcaaaaccagatatgttggctatggcaaaaggttgattcaacagaagatcgggggtttcaaagatttttggacaatgtgcagtacaaagccagtggaatattacgctatgaacgcatctttggagaaggctttgtgagcactggtggaattggttagtaaatgcatgtattttttgtcatttttaaatcagtaatattctaatttgttctaatttgtagtatgcctattcttttatcttcgttcaccagaaactacaaaagaatttgtggacaggctggatctcaaacctggccagaacgttcttgatgttggatgtggaattgggggcggtgatttttatatggctgacaagtatgatgttcatgttgttggtattgatctttcgataaacatggtttcttttgcacttgagcgtgctattgggcgtaagtgctcagttgagtttgaagtcgctgattgcaccaaaaagacatacccagacaacacgtttgacgtcatctacagtcgtgatactatccttcacatacaagtacgttttacacattatttacaacccatttggatgttttgtttcttcctggtttattgctctacagcctacaacagtttaaatattttcagcttgaaatggactgttttaggcaagccctgagaacctgtatatacatttgtagtaattgttagtgggattgtgggaaaaataaattcttggaactatttgaattacctgccactaaatatgttttaccctttctttgatgccagaacaactgtgttttgaccagtgctgtttttgctctttgcaggataaaccctcactatttaaaagtttcttcaagtggctcaaacctgggggtaaggtcctaattagtgattactgcaagtgccctgggaaaccttcagaagagttcgcagcttacattaagcaaaggggttatgaccttcacgacgtcagggcttacggacaggtgcttttgctagctacactctatatgattaatagtactgtttctttcatgaaagtgtagagctatggtaacatctgtttggtaaattatccagatgcttgagaatgctggtttccatgatgtcattgctgaagaccgcaccgatcaggtaatccccctctggagctacactggctgcattcccatattctcttcaactgaaatgtagatatgattttctgtggtactgatcatattcaatcttgtattgcagttcctcgatgttctagagagggagcttgctaaagttgaaaagaacaaaaacgagttcgtctctgatttcagccaggtaatttaggcaaaactgcgagtttagtagctgccttctttccatgttgctggtatgcacatcaaattctttgtttcacttattttcaggaggactacgacgccattgtgaatggatggaaggcaaaacttcaaaggagttctgctggtgagcagaggtgggggctgttcatcgcgaccaagtgatgaatcaagatgcgcagcgtgggggggactcgcaaataaattggtttcatgccgtgtgtccatcatattacatttttgttgtcaagttatttaatttcggattcggtgtacttcttgtggagcttttgatgttgttgggacaaaaaacaaaaataaccagagttcagcccgcgttgttttcgacttcttgagctggaaagttcagttgcataaagaaaattcaggtgtactcggtgtg

SEQ ID NO: 26596 - DNA, 1772 bp, Oryza sativa
  ref <308>: DATABASE ACCESSION NUMBER: AK102038
  ref <309>: DATABASE ENTRY DATE: 2002-08-28
gagtcttgcatgagcgagctagtagtgcattaaacgaaaatggagctgaagaagaggagctatttggcagatttggtagcactggttctggggttcttagtactactggttctggatcgatgtcaaatcttggacagagtcctggtttgaataatggccccgtgcctttatatccttcaggcactgataagaactcgggtgaaacttggtatgaagtggggcgcacactgacatatacaccaactgctgatgatattggacatgttctaagatttgaatgcgtgtctgtggatgctgaaaaaaaggtacctgttggacctccaacttcaattatgacatcccgtgtgattccagcaccaactccaactccacgtcgccttatccaagtgaatggagatgttttgagtcacttagatttggacagccaaacatctttcgggacattctcagtgctgtcctacaatattcttgctgatgcatatgctacaagtgacgcgtatagctactgcccaacatgggcactttcttggacatacagaagacagaacttgatgcgtgagattattggttatcatgctgatatcatctgtcttcaggaggtgcaactgaaccacttcgaagattttttttcacccgagcttgataaacatggatatcaggcactttacaagaaaaggacaacagaggtatatactggagctcctcatgccatcgatggctgtgccacctttttccgtagagacaaattttcacacgttaaaaaatatgaggttgagttcaataaggctgcacaatcattgacagacgcaattattccctctacccaaagaagagttgctttgagtcgattgattaaggataatgttgcactgattgcggttttagaagctaaattcggcaaccatggaactgacaatcctggcaaaaggcagcttctttgtgtggcaaatacacacgtaaatgtccatcaagacctcaaagatgtgaagctgtgggaggttcaaactctcctaaaagggttggaaaaaatagctgttagtgcggacattccaatgttggtctgtggggatttcaattcagtccctgggagttctccacatggacttcttgctatgggcaaagttgatcaattgcatccagatctggccatagatccccttggaattttacgccctgcgagcaagttaacccatcagcttcctctggtgagtgcatattcttcatttgcaagaatggtcggtgtcggctatgatttggagcaccagcggaggaggatggaccctgcaacaaatgaaccacttttcacaaactgcacacgagatttcactggaacggttgattacatattttacacagcggattcattgtcagtggagtcgttgttggaacttttggatgaggaaagtttaagaaaagacacggcccttccttctcctgaatggtcttcggatcatatagcactcttggcagaattccggtgcaagcctagaatcagacggtgacaccttaggtcgcgaatagatggttaacttcagcacccatgcggtggaacattcttccatggtgtgtgggacttgaggagggatggacgaaagcggatcctcggggaaggaccaccagcaccagcaggcttagggtagtggcctcatgaaagggaggcttgtaatgttgattacctcttacatttccaactcatgatgtttttaagcggccccattgtaatatcactttctatagaaggaaagatctcctgagagagagacatttttatg

SEQ ID NO: 26597 - DNA, 859 bp, Oryza sativa
  ref <308>: DATABASE ACCESSION NUMBER: AK102039
  ref <309>: DATABASE ENTRY DATE: 2002-08-28
gacttaatcacagtagctctcagctagctagctaaaccagtgctaattgtgttgctaatttgtgttgatttgtgattttgatacgagatggccggagtagggaggacgatgatcgcgccgctgctggtgctgaatctgatcatgtacttgatcgtgatcgggttcgcgagctggaatctcaaccactacatcaacggcgagaccaaccacccgggggtcgccggcaacggcgccaccttctacttcctcgtcttcgccatcctcgcgggggtggtcggcgccgcctccaagctcgccggcgtccaccacgtccgctcctggggcgcgcacagcctcgccgccggcgccgcgtcggcgctcatcgcctgggccatcaccgcgctcgccttcggcctcgcctgcaaggagatccacatcggcggctaccgcgggtggcgcctccgcgtgctcgaggccttcgtcatcatcctcgccttcacgcagctgctctacgtcgccatgctccacggcggcctcttctccggcaaccacgccgccggcgccggcggctacggcggcgactaccccgccgaccaccaccacaagcccgccgccgcggccagggtctaactgaatttgaccccgacacaccggccaatcgatcgatgccatccatcatgcacacgactgcctatatatctcggtgtgatcgagctttgattttctcgtaatttcttcactttgtgtttcccgctcgtgcattgctgctagatgcaatggcaatgcacgaacaacgctgttcatatactctccgtatgtaaacttctgttctctgtatcgacgttcgtaatcatatgtatgtaccgtttggtttggtttt

SEQ ID NO: 26598 - DNA, 1694 bp, Oryza sativa
  ref <308>: DATABASE ACCESSION NUMBER: AK102040
  ref <309>: DATABASE ENTRY DATE: 2002-08-28
ggcgtacacgcacatccataatggagcgcgacgcgtggctgctatgtgcagcgctcgccgcggcgacggtcgtctactacctcgcctgcacgacgtcgcgccgcgcgcagcggcgtcgtctgcctcctggcccgacgccgctgccggtgatcggcaatgtgctcagcctgcgcggcaacatgcaccacgcgctggcgcgcctcgcgcgcgagcggtatggccccgtgatggcgctgaagctgggcctcgtcaccgccgtggtcgtctcctcgcccgacgcggcgagggaggcgttcaccaagcacgaccggcgcctcgcggcgcgcgccgtcccggacaccagccgcgtgcgcgggttcgccgaccggtccatgatatggctgccgagctccgacacgcgctggaagacgctgcgcggggtggtggccacgcacgtcttctcgccacggagcatcgccgcggcgcgcggcgtccgcgagcgcaaggtgcgcgacatcgtcggctacttcgccgcgcacgtcggggaggtggtcgacgtcggcgaggccgtgtacagcggggtggtcaacctcgtgtcgaacgccttcttctccggtgacgtggtcgacgtcggcgaggagtcggcgcacgggctacgggaagccgtggaggacatcatcttggcgatcgcgaagcccaacgtctccgacctttttcccttcctccgcccgctcgacctgcagggatggcgtcgctgggcggagaaacgctacgacacggtgttcgacatcttggacaacataaccaacagccgtttggccgacgcctcggcaggaaaccacgccggcgacttcctggactccctcctcggcctcatgtcctacggcaagatcgctcgcgacgacgtgacaaccataatgttcgacgtgttcggcgccgggacagacacgatcgccatcacggtgcagtgggcgatggcggagctgctccgcaacccgagcataatggccaaggcgcgcacagagatggaggacgtcctcgccggcaagaaaaccatcgaggagaacgacacggagaagttgccgtacctccgggccgtgataaaggaggcaatgcggcttcacccggtggcaccgatactactgccgcaccaggcggcggaggacggcgtggagatcggcggctacgccgtgccgaaggggtcgacggtgatcttcaacgtgtgggcgatcatgcgtgacccgacggcgtgggagaggccggacgagttcatgccagagagattcctgcaaagagcagaggtagatttccgaggaaaagacttcgagttcatgccgttcggggccggaaggaggctgtgcccggggttgccgatggcagagcgcgtcgtgccattcatactggcgtcgctgctgcacgcgttcgagtggaggctccccgacggcatgtcggctgaggagttggatgtcagtgagaagttcaccacagccaatgttcttactgtcccactgaaggccgtccccatacttgcctctagtgctagtgaactacaagcaagctagcaggatagcctacctcatggcgcatttgcggggctacatttaaagtttaaatatcgaataatactatcaaataaagcacagcttcggtgcatatttatcttttgtttctttgtaatcctacttgtttttatattaatgaaatcagtgtttaat

SEQ ID NO: 26599 - DNA, 1207 bp, Oryza sativa
  ref <308>: DATABASE ACCESSION NUMBER: AK102041
  ref <309>: DATABASE ENTRY DATE: 2002-08-28
ggtgggagaataggcttctatagtaaaatccccctccccgacccctcttccccccgattccggtggttcgccgccggtgagggccgaaggaggggccaggccaccttcccgtactagtataaagtaggttaggtcggagttcttccgtagtcaggtcttcctgtagctcgggtttgtcccttttggagtttcgccggtgttgcttcatggcgatcggagaagacgatggtggcggtggtgtttgtggccgtggctgtcccagtgtcgtcgctgaagatggatggatctggggcgtttggcgtcctttccatggcgacaagggcttgcggtggtggatccggtgcagctggcctctgttcattgcttgcccagagtgatggagatggatgtggtgtttctgggccggccgtctcaggctccctgacaaggacggatggtggtggctgcaagagctgctgctgctcatgctcgttggtgggctgaatgagctgctccagcttgttagttggttgaatctccacatgcttctgcttgttgaagctcttggtggcaagcttgttggttggttgctcaggctcctgcttattgaagctctctgcggcaacattttcccttccatctccggtgttgcgtacctccgccaaatcgttacaagacaggggttcagtcgccgccatcctaattcttgcatgttcaaggcaagttggagtatggagactttcttcaaatctacttgcagtagtattcaagttgagggctccattcgggttgagtatagaccgtctagtcggctcttgtcgataggattgcagtctgtgctcctcagatttgatggagaactccttgacaatattttgttgagtccggtgaagcttaagaaaaatttacgactcaacaacaaacctcgaatagcgccgtttccgtggaggcagccgaaggggtcaccggtctgtcaagcggtgtgcgcgtcttcagtagaggctcgtggacgtggtcgtcgcggcattaccgcagtcccctgtcgatcgcgttctttactgctgtttggattatcttggaggatgtttttcttagttcagctagctttaccttctgaatggatggtgttgttttttatgtcttatcttttatggcgatgttctggggatgccatttcctttgagctctgtctgtaatcctcactatatgaataaatttatgagttttc

SEQ ID NO: 26600 - DNA, 2213 bp, Oryza sativa
  ref <308>: DATABASE ACCESSION NUMBER: AK102042
  ref <309>: DATABASE ENTRY DATE: 2002-08-28
gacgagtggtgttttctggtcacctgcggcagccgtcgtggtccgtgaaacgaaacccctgtctttcgtccgcgaaaattttccattcttgcgcttccaagtatcgagccccaacttcctagaagaccgcgaaccctagaagcaagagaccaagagtcgaggaggaggaggaggagttggccggaatccccgtgtggaaggttgggatgattttatgaagtatgggttgttcaaagacacagactcaggaagactctgaattcaatcaatgcaatgaagagcgctccctgtgcttacactcattttctgacttgtcacatgtttctgcagctacttttatgtatcttttgaaggactgctacctatatggaactgacaaagcaaccccaaagttcaagatccttcagctgcaggttaaaagggtattaaataatgatcctcagccaggcccattcacgtatgttgttcaatgcatgtatattgtgccactgctggggaaaacccatgctgaaggcttcagccatatgttgatctcttctctaaggcatttgaaatctgtggaatctgtacagaaagatttcttagatgcaaagcatcttgctgcgcgacttattcttgatattgttgcttctattgtgccccatgaggaacgcatactgataaagcttctcgaggcatatgatatcgagttgagagatatggctgatgcattatatggttcagagttgggtgatgaagatctagtgaaagcaaaagaacatctcaaacagtatgtacaatgcttaatggaatcagaatcttatgtgaccgctgtgaacctgataacacgattttctattcaatgttatgatgagtcctttcttacaaaactgattgaaaataatcacttggaggcagcagagaagtgggcagttttcatggggaatgaaatgatatgtttgatcatccaaacgtatctggatataaaaatgctaaagagggcaaatgagttggtaaaacaacatgaccttacagaaaagttcccagatgttaactatttgtataaagagagtgtactgaagaagctggctgagaaagggtgctgggatattgcagaggttcgggccaagaaggaaacaaaattgatggaatacctggtatacctagctatggaagctgggtacatggagaaagttgaagaactttgccaaagatactctcttgaaggctatgtcaattctttgggtaatcataaacaccaacgttatttatcatacattaatatctgtagtcctgcagttccagaggagatttgttgtgggtctgactacttagatcttaaagaactgattttggaagacattatctgggttgatgagattgatggacttcttaattcaataagttatattgaagcttgtaaaattattggtgtggattgtgaatggaagcctaattttgagaaaggtagcaaacctaataaggtctctattatccaaattgcgtcagataagaaagcttttatttttgatctgatcaagctgtatgaagatgacccaaaagtgttggatagctgcttcaggcgaattatgtgttcttcaaacatactaaagctaggatataatctgcaatgtgatctgcatcaactatcacaatcatatggagaattgaaatgtttccagtcctatgaaatgctgcttgatatccagaagctcttcaaagggactactggtggtctatctgggctgtccaagaaaatattaggagctggtttgaacaagacgcgacggaatagcaactgggaacagcgccctctcacccagaatcagaaagagtatgctgcccttgatgctgtggtccttgttcatatattccatcacgtcaagggacagcctcagtttggtgtcaccgagggatgcaaagtggaatggaagtcccatattgtttctcgggtgaagaattcacggagtacattacgcttctaaaattaagggctgatcaaagttgactgtggacgtagtatcttgctaaagtgttagccaggaagaagttaagaatcaatctgttcatatctttctcacatcttacatgatctcagcagctgttgctgccatctgtaaatattatatgctcagatttcttccatgttgtgttatcgctaattaggagctatgagcctatgacagttcaggcatgcatctttttggtggcaatggactttattatcaggaagc

SEQ ID NO: 26601 - DNA, 2273 bp, Oryza sativa
  ref <308>: DATABASE ACCESSION NUMBER: AK102043
  ref <309>: DATABASE ENTRY DATE: 2002-08-28
ggagtggctcccccgagcgcgcctcccttccgcgagccctccttccaccaccgaagcacgacctccacctcgctctccgctctactggactgtagccgagtggagattggcggcaagcccaaccatgctcggattattctgagagtgagtgtgtttgttcatccagttctcttcatccaatccaaatctttctttctaggagggagggagtgcccagttcgccgtggatttcttttcttgcgtcagtgatactgatacagtgatacatacagtttgttctccaaaaagttttgggggattcagctgaatctccatgctccggtcagtgccagccgctcgccacaggtggcttccatggaatggccttgccaggggctcatccagaaccccacattgtcatgctgctgctgctgctgtcagttcttggcatgtccatgattcatcatcaccatgtgcgtcgagctggagctgggccagtcaggttggtgacaggattcagctgcggccattctcggccgctccggcgatcgtcggggatgggattgaggatgtggatgatcggagggtcaagcagatgcggaggaggcgcgacgcccgcatcgcgcagaaggcattcatggagtacctccatgtcacgcgtgggatttgcttcagtgatgccgagcacatgagcaagcgctcgccgatcttcatcagcaagctgctggagaaggtgaaggatgcggcgaaggagcccacggaggagggggaggaggtgcccttcaggtcgaaggtgaagaagagggagatgagggatgagagggtcagcaaggcgttggtgcggctgttcaacttccaccctatcaacgagttcgagccgttcttcgagagtatcggcatcgcgccgggcgagtatgagccattgttgcctcgtgatctcatgtttctcaatgatgatgagacgatgctcgacaatttccgggtgctttgcaactatggcatcgcgcgcaccaagatagggaggatatacagggatgctaccgaagtgtttagttttggccatggagttcttgcgtcgaagctgaaggcccttgaggatcaagggttgagtaagaccagtgtgatcaagctagtgatgtcgagccctgtcatactggtccgtgatccaaatgtggaattgaagattctgcgctggctagatgatgttggaattcagagagactggcttggccgattcttatctgtaaagaagtcttataactggggaaagatggtccaagtccctcagttcttcagtgatttaggattcactaatgaaggtattggcaaattggtcagacagaatcccgatttcttgtttagtggttcaggaaagatgctgttctcggcagtcctcgtcatgctaaaagctgggtttggaaaaaaggaattggttgatctttttctgaatttcccaaatttgtcagtcgacaatttcacgaggaacctgcgaaggggcatattcttcttagctgagattggtgttagtgaagaggacattaagaaatttgtggtgtctaacggttcaatacttggttccgtccaattgaagaaaccaaacagcattatgacacatctcagtgtagggaagaagcgcctttgcaggatggtaatggaggatccacaactgttgatgaaattctcattaggggcaaaggtcagccgcataccgaaagttgatctccatgaagcatccttcaaggagaaggtgaaatttttacagaacttaggatttatggaaggatccgaacgaatgacgaggggactcaaagcatttcgtggtaaaggtgacgagctaaaagatcgctacgacttcttggtcaagaccggtttggacccggaacatgtggtgcagatgatcactatggctccacatgttctgaatcagaagatccatgtccttgaatccaagatatccttccttgtaaatgatatgggatatcctctgagtaccctggtaattttcccttcattcctctcgtttaccgtggagagaaccaagcttaggtttttgatgtacaattggttgttggagaaaggagtgattgctactggactagctcttagcactctcctagccactgcagacaaacatttcgtaaaacgttatgtagtaaggcaccccatgggtttagaagtctgggagaaattcaagacagaggtagcttcaacaaaaaacaacacaccctgtactccagatgattagcctgatatgttatatttttctttctcatcaacttacttttttgctggcg

SEQ ID NO: 26602 - DNA, 2277 bp, Oryza sativa
  ref <308>: DATABASE ACCESSION NUMBER: AK102044
  ref <309>: DATABASE ENTRY DATE: 2002-08-28
gagaggatttttttggaggcggagatgaacctgaggcggctatgggaggtgtggggggagtgggagatccgcgtgctcgtcctgtccagcctgtccctgcaggtcttcctcctcttcaccggcggcctgcgcaagcgcaaagccgcttggtggctgcgcatgccgctctggctcgcctacctcctcgccgactacatcgccatctacgcgctgggcaacctttccaagaagcagaagctctgcgacggctcattcgatggcgagatgcacctcctcgtcttctgggcccctttcctcatccttcatctcggggggcaggacaccatcaccgccttcgccgtggaggacaacgagctctggctgcgtcacttcctgagcctgctgtcgcaggtcgcgttagccgggtacgtctactggaagtcgcggcccagcatgcggctcatgtccccggcgataatcatgttcgtcgccggcgtcaccaagtacggcgagcggacgctggcgctcagggcggcgagcatggactgccttcgcagctccatggtcacgcagccggatccgggcccgaactacgccaaattcgtggaggagtgccagtcgaggacggagtccggactggtcgccaagatcgtcatcgtgcaggagcggcctccagatgacgaggaccatgtcgaagtcaagcgagaggagtacggcgacctggtgtacagtgcgcacaggttctttcacaccttccgccgcctcttcgtcgacctcatcctcagcttccaggaccgcatcgacagcctcgccttcttccggaggttggagatggagcaggcgtacaaggtggtggagatcgagctggtgctcatgtacgagtgcctccactccaaggcactcgtgattcatggtcttctcggccgcagcctacgcttgttcagcctcgccgcgccggtcgtgtcgctcgtgctcttcacccgcgcgttgggcgacatgcgagaaggctacaaccaggttgacatcaacatctccttcgtcctgctgggaggagccatcttcttggagacatacgcgatcctactgatcttcatctcctcctggacctacaccgacatgcgcggcagagaagcgctccggcccgtggcggcggcggtgttttggctgatcgccctattccagccggagaagaggcctaggtggtcgaacaagatatctcagtacaacctgatcagctattgtgtcaaggacaagtcccgtcggtacaagaaacccatggagtggctggagtggaggtggaacttccgcgtgaagacgatgtgggacagctggaggtacaagacgagcatcggcgtgtcggagctgctgaagagccacatcttcgaacagctcaagagcaaagcaagcagcatcagcaaggaccccaagagctaccggaaggctggcgagcaccgtggccagtgggcgctccagcgcaagggcctctaccagaagctgggctggagcgtcgactgcgagtttgacgagagcatcctcctctggcacatcgccacagacctctgcttctacgccaatcatccggcggacaaagatgatgacggatgctgcagctgctcctcgtcgtccaagtgtctccgttgcctctgcagctccagctcgggctatcctgatgccgaggctcgagggcgtgactcgaataagctggcgacgatgagcagggagatatcaaactacatgctgttcctgcttgtcatgcgcccgttcatgatgacggccagcatcgggcagatccgcttcggcgacacctgctcggaggccaagaacttcttccggcgagacgacgaggagatcggggacgaggagcggtgtgccaagaggctcacgaaggtggacacgtcgattgcagagccgcgggacgtgaagggggacaggagcaagtcggtgctcttccaggcgtgcaaactcgtgagacagctcaacgagctggagggcatcacggaggagaggaggtggaggctcattgctggcgtgtgggtggagatgctatgctacgcggccggcaagtgcagcggcaatgcccacgcgaggcagctcagccagggaggcgagatgctcaccgtggtgtggctgctcatggcgcatttcggaatgggagaccagtatagggtggagtctggccacgccagggccaagcttattgttcatcataatcatagtaccatgtaggcctgtttggtccattttctctgttcagccatccaccatggccagcagccgcaggatatgctttgagattcg

SEQ ID NO: 26603 - DNA, 1682 bp, Oryza sativa
  ref <308>: DATABASE ACCESSION NUMBER: AK102045
  ref <309>: DATABASE ENTRY DATE: 2002-08-28
gagttatagttgcccccctctctcttcctcctcctcctcctccgggttattacccggcttcctctcctccccttgccgccgccgccgcctcgccgtggaggagcagcggcagtgtgtgcctatcctagaaactttcttgaataggcgcaggtgaactttatcatgagcctcgaggtcgcaggtgcgggggcacctcaggctcaggggaagttcttgggtatacttgtctgctgggttttgggaaatggaagcctcttcgcttggaatagtatgctcaccattgaagattactattcaattctgttcccgacataccatccaacaagagttcttacaatagcttaccaaccttttgccttcggaataacctgcatcctgacataccatgaagcaaagctcaacacaaggaagaggaatctaattggatttgcacttttcttaattagttcttttgcattaataatgctggacattggtactaaaggaaggggtggacttggtccatttatcggtgtctgcataatcagtgccttatttgggacagctgatgccagtgttcaaggcggtttggttggcgacctttccttcatgtgcccggagtttattcagtctttccttgctggcttggctgcatcaggagttctaacatcagccttgagattaattacaaaagcagcatttgagaactcacaaaatggtcttcgtaatggagctatactgttcttttcgataacatgcttcttcgagctagtgtgcctactcctttatgcgtatgtctttcccaagttacccatcgtgaagcactaccgatcaaaggccgccgctgaagggagcaagactgttgcaagtgatcttgctgctgcaggaatcagcaatgaacattctatacaagccgaggaagatcccaaaaaatgcgatcgtttaagcaccaaagatctgttgatacagaacatagactacgcatttgacattttcctgatatatgtcctgactctatcaatcttccctggatttttgtctgaagatactggagcacacagcctgggaacatggtacgcgttgacgctcattgcgatgtacaatgtgtgggatctgattgggaggtacctgccactgatcaagtgcatcaagctgacctcccggaagggtctcacgggggcgatcctggctcggttcttgttcatccccgcgttctacttcactgccaagtacggcgatcaaggctacatgatcttcctgacgtccttcctgggcctcaccaatggcttcctcaccgtgtgcgtcctcaccgaggcgcccaaaggatacaaggggccggagcagaacgcgctgggcaacgtgctggtggtctgcctcctcggcggcattttctccggcgttgtgctcgactggctgtggttgataggaaaaggctggtgatcgtgttgtaatatctctggcatgagagacccattggttctccctgctcggatgagcggggctgttttaacatcagaatggcaggaaagaaaaaaagaatcctcctataaatctggctgttagcaactcgtatgggaccagattgtgtgccattttgacgacttttggctgcaatgtgttagtgtagtgctgtagttcaaccccgtcgtaaattttggggttcaatataatctgcagcgcttgcgtttgcttggatatatcat

SEQ ID NO: 26604 - DNA, 2629 bp, Oryza sativa
  ref <308>: DATABASE ACCESSION NUMBER: AK102046
  ref <309>: DATABASE ENTRY DATE: 2002-08-28
cactctctctccttcaacactgagctgagctccacactccgcgccgccatccagccaaatgcccctcctccgcggcggcctcgtctccgtcgtcctgctcctgctcgcctcccccttcttcttctccgccaaccccgcagcaaccgccgtcggagattgccctttggattttagttgggccaacttcacattagcttcagccgcgtgctctgatcccacgcagcgggcggcatgctgccgatacatcaatgcattcgtcgccatttccatggctcgctacgccaatgccaccggcaggctgggtgtccctccggccttctctgagatatgtcttagctctgtatccgagacattcaagctacggggaatccccaccgatgctgatgtcttctgcgggctgggacccaagataagggtctcatatcagtgtgccggacgcgacaccgtccttgaaatgttgcaatccccaaatttcaatgacgttgttggaagctgcaggggtcctctatccttggatatcacttgcaagacctgcttgaattacggcattgtttacttgcatcgcctcattggctcggatgataacgttggtcttagcgtctgtcggaacgcggtttttgtcacgcttgcaactcaacagggcattttctcttacgacgacattgtcaagtgcttcttcggtgtacaagggatcacaatttttccagggccatcatctgttacatcgactccagcttcttctccaaatgtgacaacccctgttgatgctccagctccaaagaccaaaactgttctgcagaaacatcaccagccttaccggattacagtgatacctgggatagggatagcggttatattgcttgctgttctgctccaacttgtcttagtcatattgattcgtagaaagaacagggaattgaaaaatgcagaccttcatgctcagaacccagaaaatgcattctgtcagagtcaatcctggagatgtccagaaggtcaatcaccaatgttccaaaggtacagttacaaagagacaatgaaagcaacgaacaatttcagcacagttattggaaagggaggttttggaacagtctacaaagctcaatttagtgatggatctatagctgccgtaaaaaggatggacaaggtatcaagacaagctgaggaagaattctgccgagaaatggagcttttagctaggttgcatcatcgccatcttgtaaccctcaagggcttctgtatcgaaaggaaagaaaggtttcttgtctatgagtacatggcaaacggaagcctaaaggatcacctacactcatctggaagaaaggcattaagctggcagtctagactacagattgcaatggatgtggccaatgctctggaatatctccatttcttttgtaaccctccactctgccatagagacatcaagtcgagcaacattcttttagatgagaattttgttgccaaggttgctgattttggccttgcacatgcatcaagaactggcgccatcagctttgaagctgtcaacacagatataagagggaccccagggtacatggatcctgaatatgtgataactcaagaattgacagagaagagtgatatatacagctatggtgtgctcctactggagcttgttactggtcggagagcaatccaagacagcaggaatttggttgagtgggcacagggacacttatcatccggaaagatcacacgtgaatttgtggacccaacgatcaggggcttggttgacatggatcagctgcatttggtagttagcattgtccagtggtgtacccagagagaagggcgggagaggccatccattagacaagtactcaggatgctctcggagaggctggatccagggaatggcagctttggcgaaggcatggaagatgcagaagggggattttatcctcggaacagcaaatgtggcgtccaccggaacgagctgattccgcacagtggcgacatgaggtctctccattcctcctcgagcacaacaagatcctactgcagccgcagcatgttacttgaatgtggccaggctcactctccgccggaaaccctatgactccacgtcattgcggttcacttgtagccatgaaatttttgctctatcatattcttgaggcctctctgttgcgtacgtgctttcacggtgaagcaagtcatagcatccgacttataccgagagcagcttctggtgaaaattaagttttggtgagagtgaattggcagatggtatgatgtgcaatttgctgctgtctgtgtagtgtggttggttggtgtggcaaagtcagaagccagaagcgaagactactgttattattggttgatactggaggcaaaaccatgcatgcacatactattatatggtgttgcagattaattttaccagatctgctgttctggtttctcaagtctgtactttgcaattctttatagaactgttactgcgacggtgtgttttcttgtttgtattttttttttcttttgctgtgagacatgtcactgtgagcttgttggcaaatggttgcaagcggcacgaggttttgggccagtgggcagagaaacaaatccagacaaaacctcgagatcccatccttgctggatgcatgct

SEQ ID NO: 26605 - DNA, 840 bp, Oryza sativa
  ref <308>: DATABASE ACCESSION NUMBER: AK102047
  ref <309>: DATABASE ENTRY DATE: 2002-08-28
ggcatcatattctgttccgcaccgcatcctcctccgtttcgccggcgacgacgcggatggcgaccgacggcggcggcgccaccccctcaccggcggcgaagaaggccaacctcctcgacccctactccatcaagcatctcctcgacgagaccgtctccgaggtcgcgaagagcaaggggtacccagaggacgcgcggctgagcaaccggaggctggcggtcggcgcggcggtgatcgccgtcgcgctcctcgcgcagttctacccccgcaagttccccgagaacagggacgtcctcctcgcctgcatcgcgctgtacgcggcgctcaacgtggcgctgcagatcgttacatacaccaaggagaagaacgccatcctcttcacgtaccctcccgcgggatcatttaataggactgggcttgttatatcttcaaagttaccaagattgtcagacatgtataccctcacaatagcaagtgcagatccacattctaaatcttccagtgaaccagtccatttcactaagagtgtcacaaaatggttcaccaaggatggggttcttgtggaaggtttgttctggaaggatgttgagaaactgattgatgactacaacagtgaccacaggagcaaatgaaaggatagcttgtacttattgatatcaatatgtcatgaaacaaccaaccattcacctactacatctgttagtttttgcatatgactagcaaggaatcgctttataaaatcaaatcttaactgcattttgttagacaattttgtgacatgtcctggtattaactgctgaaatgatgtgtcaattcctgaggtcctggtattaactgctg

SEQ ID NO: 26606 - DNA, 1046 bp, Oryza sativa
  ref <308>: DATABASE ACCESSION NUMBER: AK102048
  ref <309>: DATABASE ENTRY DATE: 2002-08-28
gagaatttgatgccaagctatagctagagacgacgcggagacggtgtgagagaaacgagacgatgctgctgaggagctcgtcgacgccgttcctgcactccttcctctcgccgtcgtcggcggcggctgcgccgtcctctctccagctgcggcgagcctttctccgacggccacctgccttccctccacccgtcctccgacggtggtggtggtagcaagaacaataccaccggcctccacacggagctctccttctccatctacaacaccttcaacaagatggcgccgccgccgccgccggtgcaggagcaggaggaggctgagcagcagcaggcccccggggagccgaagctgccgctgttcttggcgagaggcctcgggatcgaccgcatcgcttccggcctgttcaccgccggcggcggcggcgacggcgacggcggcaacggtggcgctgggaggatgagcgccgtggaggaggagcacgccgagaaggtggcggcgctcgacgcgcagtacaagaggatgatggacgagcagccgggcgacgcgctgttcctgcgcaactacgcgcagttcctgcacgaggtgaagggcgacgcgaggagggcggaggagtactactcgcgcgccatgctggcggatcccagcgacggcgagatcatgtcgcagtacgccaagctggtgtgggaggtgcaccgcgatctggacagatccctcacctacttccacaagtccgtgcaggccgcgccgcacaacagcaatgtcctcgccgcgtacgccagcttcctgtgggaacaggacgacgacgacaacgacgacctcggagaaggcgagcaggacgtggccgtggcggcgcagccggggcatgtgaggcagctggcttccgtggccgtttgatccgtgcgagacgggctgacaacgtgctaaatgcgctgtgctttctactactaaatgcgctggtgcttacaaaccgaagaataaataataccgcggttggaagttggatgtaactatatcatgaagttctctttttcctttcacgaatc

SEQ ID NO: 26607 - DNA, 4300 bp, Oryza sativa
  ref <308>: DATABASE ACCESSION NUMBER: AK102049
  ref <309>: DATABASE ENTRY DATE: 2002-08-28
ggctctgcctttctcctgctggctgctgctctttggcctgcttcagccttcagcttctccatggttttctttttgtttgctccagcttctccatggttttttttgtttttgttctgagaggaaaaagggattttatatattgataaggtacatcagttgaaagctgtaaggagaaactgaagagccaagagacagtatattgagcaacatggccactttaccactagccactggagttggatgggtagtatctcctgtcatcaagcttatgtttgagaaggtccaatcatatatatcaactcagtacaagtggcagtccaatttggtggatgaccttaaaaagctggagactattttaactgaaattctcttggtagtaggcactgcagaaaggcggagaacacttgattgcaatcagcaagctttactccgccagctgaaagatgctgtctacgatgccgaggacatcatggatgaatttgattacatgtttctgaaagcgaatgctcaaaagagaaagctaagaagcttaggctccagttctatctctattgccaagcgtttggttggccatgacaagtttcggtccaaattgggaaagatgctcaaaagcttgagtacagtaaaggaatgtgcccatatgctcgtcagggtgatgggagtagaaaactttagttcacacatgttacctgagccccttcaatggcgtatctccagctcgatttcaattggtgagtttgtagttggtcgtcagaaggaacgggaagaactagtgcaccaattgctggaacaatctgacaaacctgaatctagaagcaaaggagcaaggtcaacatcattagaggtaattactatagtcggcaatggcggaattggaaaaactactttagctcaacttatttacaatgataaaagaatcgaggataattttgatatgagggcatgggtatgtgtatcacatgtctttgataaggtcagaatcaccaaagaaatcctaacaactattgataaaagcattgacctaacgaattttaattttagcatgctgcaagaagaactcaagaacaaaataaccatgaagaagtttctacttgtattggatgatgtttggtatgatgaaaaggttggggtacccataaatgctgatagatggagagaattgtttgctcctttatggcatggggcgaaagtaatcaagattttagttacaactcgaatgggtattgttgcaaatacattaggatgtgccactccattctgtttgagtggtctagagagtaaagatagctgggaacttttcagaagatgtgcatttagcactagagatccaaatgaacatctcgaattgaagtctataggtgaacacattgtgcaaaaattgaatggatcggcattagctataaaggctgttggtgggcatcttagttcaaacttcaactatgaagaatggaatcgagttctaaaaagtggtctatcgaatgagaaagatattatgacaattttacgcctaagctatgaatgcttgccagagcaccttcagcaatgcttttcgttctgtggtttgttcccaaaaggttattatttcgagcctgacatgttggttaacatgtggatagctcatgaatttattcaggatcgtggacgcacctatggaagcttgacaagcactgggaaaagttattttgatgagttgttatcaagatcatttttccaggcacttcgatatggaggtacagtgcattatgttatgcatgacctcatgaatgatcttgctgtccacgtgtccaatggtaagtgttacagagtagaagccaatgaacctcaagagatttttccagaagttcaacatctgtctatactggctgaaagagttgaccttcttcgtgcctgtaagttgcaaaggctgcgcaccctaataatttggaataaagaaagatgttattgctaacgagtttgtgtgggagtagattttttcaaagagttcaagagcttgagattattggatttgactggttgctgcttaagatatttgccggacttaaatcacatgatacaccttaggtgcttaattctcccaaatactaaccgtcctctacctgattcactctgcagtctttaccatttacaaatgttgtttctacaccggcattcatgttttatatgtgcaaaacatgtcatcttccccaaaaacctggataacctgagcaatattttgactattgatgttcatagggatcttactgttgatttggcttctgtggggcatatgccatacctccgggctgcaggggaattctgtgttgagaagaggaaagcgcaggggctagaggtgctgcatgacatgaatgaaaaaaaaaactagaatattagggaaggacctaatatcaaataattaggaggggtgaggctttgaacccaggtcgtctagcccaccaccttgtggagctagccggaagacccctgggcatttctcctgcatgacatgaatgaactccgagggtttcttatatttacatctctcgagaatgtgaaaaacaaggatgaagcaattgatgctcagttagtcaacaagagtcaaatatctaggttggacctacaatggagtttttctaatgcagatagccaatctgacaaagaatatgatgtgctcaatgctttaacacctcatccttgccttgaggaattgaatgttgaaggatactcaggctgtacatctccatgttggctggagtccaagtggctatctagattgcaacacatcagcattcatgattgcacatgttggaagttgcttccacctttaggtcagttaccatctctcagggaacttcatattgatggaatgaaatcattagagtgcatcggcacatctttctatggagatgctggctttccctccctgaaaacactagaattgacagaattgccagaattggcagattggtcttcaatcgattatgcttttcctgttcttcacgatgtactcatcagtaggtgtccaaagctgaaagaactgccaccagtctttcctccacctgtaaaaatggaagtgctcccatccaccatcgtttacacacagcatactgatcatcgcctggacacatgtattactcaaaaggaggttagcttaactagcctttcgggtatttttcacgtatgtcaccaggaatctgtggaaattgcagaaattagctttgacggagcagacatggtgaatgatgggcttagagatctaggccccaatcttccatcccaccaaggaccatttatctgctggtatgctgatttacaccgtgcgtttgcgagtttaacagaaatgaaaattgttggttgccccaacataacatcgttgttggacttcagatattttcctgtcctcaagaacttgatcatacaagattgccccgaattgaatgaactacaagaggatggacacctaacaaccttgacagaggttcttatagagcactgcaacaaactggtatcactgaggagcttgagaaacctttctttcctttccaaactggagatcagaaattgcctgaagttagtggctttgcctgagatgtttgacttcttctccctcagagtcatgatcatacacaaatgccctgaaattgtttctttaccggaagatggtcttcctctgacccttaaatttttgtatttgaatggatgccatccattgctagaggagcagtttgaatggcaacatggtgttgagtgggagaagtatgccatgttgccgtcatgtttgtttgctggtgaatcgataggatatggtcaagatatagctgaggaaatacttcgcgagaatgatataatccagcggtcaattcaatccagtctactgcatccaactgattcttcagcaagttcttccagttttcttcagtaaactatctgggctgtcctccgaagctgtaggcctgccggtgatcacctacagcttcatcacatctacctgtgtggctgtgctgacctggccaaaaaaaaaaaaattccacctgtgggttctattttaatcaagccaacttattatgaggcttgtgcattttcacatctaaacctattatttatgcattacagaacattcaccattcattgcttgcgttttatactttttctacaagatgcaatgttgccatctgctcaccaggagtatctttcttgtggagttattttttcccttttctttggaataatcagatatgtatcacacaatatgtatgctggcttttgagataaataccggagattgaaatgacattttgagatttgagcatatcacattaagttg

SEQ ID NO: 26608 - DNA, 2009 bp, Oryza sativa
  ref <308>: DATABASE ACCESSION NUMBER: AK102050
  ref <309>: DATABASE ENTRY DATE: 2002-08-28
aaaaacagcctcaaagtgaacccaaaaaccctagcgccgccgccgccgccatggaagaagcgtggccgcctcacgcccccgccggaagctgcggctcctcccggaggaggaggaggtggaggagcatggggcgcggcggcggtggcgcagcggaaggaggtggccgaggagtcgtcggcgcatgcggtgagccggctggtggcgagctgcgccaacacgagcggcgtggcggtggccgtggtggacgccaacgccgtcatatcgggcggagccgcgctctcctcgtccgccgcccgcctcgtcacggtgcccgaggtgctggaggaggtgcgcgacgcgtccgcgcgccgccgcctcgcgctcctcatggcccctgtcgagaccctcgaccctgcccctgaattcgtcaagaaagttgtcaaatttgcccgggaaacaggagacctccagacgctttcagatgttgatatcaagattattgctctagcttacatgctggaagctgagatccatgggactaaccatttgcgggagcagccacctcctctgcgtgtggtgaatgtgagaaacctgaaagaggctccactgccaggttggggctctaatgtgcagaacctagcagaatgggaagagttggaccagatgtctgaagcaggtggggatctcaagtcacgcatacttccactgaaggatcttgagaaccacgaaataccgaatagtgagaccaacagtatttctgacaagcaaggtgatgaagagcatcagcctgcaaagaaagatgtaggtattgcttgggaagatgatgagaataatgaaggttggttgcctgctgttagtcgcagtacacacagaagatatctacgaaggaaggcgagacgtgatgccctcaaggaatctgaacaaagtattgagacaagttctgctgccccatcaattgatgacgataaaattttatctgaaaatggtttgaatccagtggatggcccttccgctgatactgatgttatggagcaccaagaagtgaatgaacctgaaattgttgcagatcattcgcaatctgataataaggacaatggggtaggcaatgttggtgatgttgaggagaccggcggtacggacgcatgcattgaagagttggataatttggatatcaaaagcgactctgaggaaggtgtcgattcatctcttgcagatgatgggagcagtgagcagagttgggcgttgaggtccttatctgaatctactgtagcatgcataaccagtggctatgccatgcaaaatgtcatcctgcagattggtctccgtctcttggcaccaggtggcatgcaaatacgtcagttgcacaggtgggttctgaggtgtcatgcttgctgtaaggtgacccaagagattgggaaaatattttgcccaaaatgtggcaacggtggcaccttacggaaggtttcggtaacagttggtgaaaatgggatcactatggcctcacgacgtccgcgtgtgacacttcgaggcacaaaattttccctcccaatgccccaaggtggaagagatgccataactaagaatcccattttgcgtgaagaccagcttccccagaaggttctgcaccctaaatcgaagaagtcaaacaagcaggacgatgatttcttgggtgtcgaggacatattttcgcacagcggtgaaaagaaagtaccactgaaacctccagtgaggaaggcccttgcaatgttcagtgggaaacggaatccgaatgacaaccacttttctcgcaagaagcattgaatttctgttccccatttgttgctcttttactatcatggttttgtactgcattgtttgacgagagaagtagagtgtatccccttgatggtgattgtggagaaaaaagtcatcctgtagactgaactctgatgaagcatgtaagctatacaattttgcagaacatctatgtaaggctcagttccatagtaccattttcatatcaattacagctggagtattttgagtgcatg

SEQ ID NO: 26609 - DNA, 3042 bp, Oryza sativa
  ref <308>: DATABASE ACCESSION NUMBER: AK102051
  ref <309>: DATABASE ENTRY DATE: 2002-08-28
tggcttatcccttataggcgccgcctcactccaccggcggccgccgccgcgaccctagagggggcgcctcgcttctgcttaccgaggatcgttagggtggatgaaaggtagcccggattcttcatcgacgagagaggagcagaggattgctgcttggctgctactcgtttcctgcgtcctcctatggctatggccattcctgctgctgctgctgctgctctgtgggtgttgccatgccacagatagttgcgtcgctagattccttttgccctctaagttatcttccttaatactgtatggaacaggccgtttccatgcgacagaccggagaggtgatatgccgcctgcacatgtggaaccgggatggactgtcaacagctgccaacagtcactacgaatgcatcaaccgaccccccctttcgatccggacaaatctaacccacttctgctcctgcccatgcgactcatcagaaaggagcagtcctgacaattatgcatctagtgtagcaagtgactcaaatggtggtggcattggagcaaggaacgggcatccgcttcgttattcttcaaatgtccatcttctcgacgagaatgtcaacctcatctcaactgagtctgtggcacagcttgataccgctatgggccgttgcggagagatcataggtgatcacagagaagaactgctcatggtcttcactaacaattcagatatgttgagcaggtattggccaggttgaaaagggattgaggatagcatcaaatacctgattgtcaacttgtgaagagcactgataaagaatagtagatttccagtttcctccatcccattttgcctgttcccttagcttttcctatctgccttttcttattctttagttcttacccaaaattctcatctttttcctgccttttatttctgtgaaagaattcccctggtttccgctgaaaataaggtcatcagaatgtttgtgatccctaggggcctagggtgtcgatcagcgtgggttggaggtgctcggtggtgtagtagtggatatttgtatgttgcttgaattgtggaggtgttagtcaacctagattgttggaaatgttggctctaataccttaaatgataaaaccaacatcagtaaacgaaataaccaatagaatgtattgatgtgattgaataggggacaaatgtatgaagtatgtgggaactcttttctggatccaaaactgatatggtactaaactttagactcttaaaacagactccctgttcttttcagattgttcgccagattattgaaatggattgtttgctccacgctttgaaaactacattttctcaaaaaactttcttcaactgcattacttagatcacttattttaagctgtttgttaactttatttttaattgtcactataatcaagtagataatccacggcaataatcttctttataatctaaatcaaatagggcctcaatgctaaatcttaattattactgcatacagaagtaatctatgttgtttcctaaattttagatataccgtgtgtaatttcttccatgatgcaaatctatggctacctagtcaagctaaaaaactacatagtagttgagtaattaaattgaatggtatcctgaatgcttaccaaaccatccaatttctagttgcatggcttaagtatataattatttttttctttctatttcatttccagttgcaatcatgggacagcttcttgttatgctaaaatcccaggatatgagtaatccaatttgtctttgcttataacaatgctttttttttctaaatatgcaagttttttacccacagtttctaacaagttcaatttttcctagttacagtctcttctatgaatatgatacaccatggattcttggtaaaaacacaaagacatccatggatttttcgaagtgtgaagatcttggaaaagattatcttattatgctgaaaattagcaccaaagttctccagtcgatgttctgtcagttttgtggacaaaatcaaccatttttccaaacaaaaaaagactactttcaacagtttgcaaagtcacctattaagaagatgttggagattgcactttctttcagtgagtcaaactggtctgaggagcatatccgtccaatgctacttgcctatgatacactacaagatgtccttcctaccataagggagttgtctcctgatgaacctgacgagttttttaccagcatcttacataacatgaggaatgcttccaggggaataattgacaatatgaagcgattcatacaacataaggtgcaaacctgggacaacattgctattcatccaacgacatgtttcctcataaatgcaataaagattttcaacgttcacaagaatttattgcattccactctggtccctggtgatggccaagactcatttggttatcttattaatggcgtcattgcttgctggaaattaaagatcaaagagctttccatgttagatgatccagacaaaaatgattcagacggaaacaatccaaacttgttcatattcttattgaataacataaagcattttaatagggatacaaatggtctgctggatgggttattggtccatagggagctcattgaagagtgcaagaatgagttccagagtgacatggaaaattatactagtagatatatgactgcatcttggggtccagccatatcttgtttgaacaatcatacaggcggaagcatacgtcaatctatgaatgcattcatttcaaagtttgaaggtacttttgattgccagaaggttttgaaagttcctgatagtgagctaaagcagaatttgcgagatgatatagaaaatttaatttttccagcatatgaaatatcctttgaggaactgcagagaaattccaattcaggattattttgctcatgttttccgagaaatttaacatgcagcatgtataccccagagatattacgacgttctgtgcaaggcttgtttgaaggatgaactctatttctcctccctctctatatatagttccaacaaatgtacc

SEQ ID NO: 26610 - DNA, 1997 bp, Oryza sativa
  ref <308>: DATABASE ACCESSION NUMBER: AK102052
  ref <309>: DATABASE ENTRY DATE: 2002-08-28
gagcggcccgagacaaacactcgccccgataactggaggccgcgcgcgcgcgcacggccgcacacccccctcctccctccactgctccgcccccgcgcacgcaacaacggcgacaccgccgccaaggcccacgcgagcacgcgccgccgcacgcggccggagagggagaggaagcgatggccgcggccgcgagggaggagcagccgctgctgctgcggcgggaggagggggaggaggagggtgaggaggttgggtggaggaggaggtgggggagcgaggccgggaagctggcgtacctggcgctgccgatggtggcggtgagcctgacgaactacgcggtgcaggtgttctccaacatgatggtcggccacctccccggcgtcctcccgctctcctccgccgccatcgccacctccctcgcctccgtcaccggcttcagcctcctcattggaatggcaagtgcactggaaactctctgtggccaagcttatggggcaaaacaataccatactctgggagtgcacacctacagagccatactcactcttctggtggtgtgcattcctctatcacttctatgggttttcatgggcaaaatcctggtactcattggtcaagatcctttgatctcgcatggagctgggagatacatcgtctggctgattccagggcttttcgcaaacgcgttgattcagcctatcacgaagttccttcagtcccagagcttgataatgcccatgctcgttgcatccgttgcaaccctggtgttccacatccctctgtgctggttgatggtgtttaagaccggcttggggtatactggagctgccttgtcgataagcatatcatactggttgaatgtggccatgcttgtggcttatatcttgctgtcaagctcttgcaaggaaacacgcacacctccaacaatcgaggccttcaagggattggatgggttcttacgtctagcattgccatctgcgcttatgatttgtcttgagtggtggtcatttgagctacttattcttatgtcaggacttttacccaaccccgagctacaaacctcagtgctttcaatttgtctcacaagtataactttactttttaccattccttatgggcttggagctggtggaagcacacgagtagcaaacgaactgggtgctgggaaccctgaaggagctcgttcagctgtctatgttgtgctgtcagttgcagtgacagaggcacttatagtatgtggaactctgttagcatcacggcgactcctgggtcgtgcatacagcagtgaggaggaggtcatctctttcgtcgcgatgatggttccattggtttgcatcactgtggttactgatggtctacaaggagttatgtcaggtattgctcgaggttgtggatggcaacatttgggcgcgtacgtcaacctcggctcattctatttgctcggaattccaatggcgatccttcttggctttgtgctacatatgggagcaaaaggactttggatgggcattgtctgtggttcaatatcacagatcacccttctatctgctatcacatttttcaccaactggcaaaagatggctgaaaatgctagggagagagtgttcagtgagaagccaacggagccctccaggtatcatctagtggagtagttctactccaatttttgctgggggcagtggggtaaatctcatccctcggacggttggacttgctcgcgagagtgaccatgcagagaaggcatcaataaaccacccttttttgtgtgtttcatcacagcacgaaatgagccaatctttcctgaattggttcatttttcacgtgtagttttgcccacaggataggcagggttgacagtcgagggttgcatcccacggaaaacgtttggctaggaaaaaaggggtccttttgtggatagtaacagaaatctcaagctgtttggttttctattgtactacctcctttttatatttagttaaagtcaccgttgatctgcc

SEQ ID NO: 26611 - DNA, 1696 bp, Oryza sativa
  ref <308>: DATABASE ACCESSION NUMBER: AK102053
  ref <309>: DATABASE ENTRY DATE: 2002-08-28
gcctccctctcgccgccgccacttccccctccctgacgcttcgccgcagcgaaaggcggagagagcggcgcgcgcgcgggagagagagagagagagagagagagagagagagccgagaggagcaagcgagaatgtcgccgatgatggcgacgctgcaggacgtcacggccgtcctccactccccgtcggcctcgccgccgtccggcctccgcgcgccggcggctgtggggatggggatggcgaggacgcgctttctcgctccgcgggcggcggcttcggcggcctccgccgtctccgcgaagccggcggcggtggcgccgctgtacgcggaccgcacggtcgtccgtatcgggctccccagcaagggccgcatgtccgagcaaaccctaagcctccttaagagttgccaattgtcagtcaggcacctcaacccgcggcaatacaccgcagatatcccgcaggtcccaaacttggaggtttggtttcagaggcccaaagatattgtccgcaaactacaatctggggatcttgaccttggcattgttggttttgacatagtcagtgaatatgggcagggtagtgatgatttagtagttgttcatgatgctctcgagtttggacattgtcgtttgtcccttgcggttcctaaggaaggcattttcgagaatataaatactctggaggatttggcaaatatgcctgaatggacacaagagagaccattgcgtgttgttacaggatttggatatctaggagaaaagtttatgagagaaaatggtttcaatcatgtttcgtttttagctggagatggagctcttgaatcatatcccgctatgggtatggctgatgttatcgtggatcttgtgagtagtggaacaaccttacgtgagaataatttgaaggaaattgatggtggagtagttttggaaagccaggccacgcttgtcgcatgtaggagatcgctacacaaacgtaatggtgtcttggagattacgcatgagatgcttgaaagattagaggctcacctcacagcaactggggagataatggtcacagcaaacatgagggggaacagtgcggaagaagtggcggaaagagttctcagccaaacatcgttatgtggattacagggcccaaccataagtccagtctaccgctcacgtgatgggaaggttgctgtggaatattatgcgattaatgtagtagttccacagaagtctctttacaagtccattcaacagctgagatctattggtggcagtggagtcttggtgacaaagctgacctacatatttgatgaggaaactcctagatggcgcaaactactttcggagctggggttgtgacttggtgtgaagtctgccatacttctctgtcaatgacccttttagcatcggtttacttatgctcgctgaagtatactacaaccataatcagaaatgagctctcgtttgaagtgtctgcggtgcttatttgagaggaaattttggtctgtgccatcgtacattgtgctcgtctagttatacctttgacaagcatatgggttgaaataccctttatgtacctgttgatataattgtgagaccttattgccttgttggataggtgtgcgtatgaattgtaccttttcttgcgtgacgctgaataaattgggctttctgcaataaagatggatggtgtaattccaccccgtagc

SEQ ID NO: 26612 - DNA, 1326 bp, Oryza sativa
  ref <308>: DATABASE ACCESSION NUMBER: AK102054
  ref <309>: DATABASE ENTRY DATE: 2002-08-28
gggagtagatacgactcctcctcctctctcgctccgtcactcgactctctcgttgctcctccaccctgcaacccaactctcccgtctcccgctgcctctgctccgcctcgcagccgttgagcggcgagatgctccactctaggcggcatctgcatcatctttctcgatttgcctacggatgcaaggtcatgccaagcatcattggagtaaaaaatgagaagaataagagtcacacatgaggcttttctcgaaaaaaacaaaagatatgtggtggtttactgaaggtgtcagcgataactgtcccactgttgatgtacatcctgcaacaatattagaaggcagtagccaccgtgatggttctatatacaagttttgccctggttttatccaagtatttcaaattgctgatcgtcatgagacttgcttggagccgatgatgctttcacaacctatggactgtcaacctaatagggatacatgcactgtgcatttttcaactcgcatgatgcaaattttctcaattaagttggctaaaatacatatgtatagtggcccagtacagatatatgggtacatagcagtgagagatcatcttgattcaatgcttaattatgttgtgaatcgtagcagggatgatcccatcatcgtgaagcagggttcttgcattgaaatgattggccctaagcgaggcatttcgatgtcttgttctgttgttctgagtttgacatgaggataaaaaaaggagatcgagaagaggatgatctagaactgattgatggagcattagagtacagccagataacaacaccagcaatgagaccaatgacaagtcgcgttagtggcaattgtggcgcagttgacatcactttagcgtacctttaccaggcagtggaggcaacaatagaagtttccatatcaaaagtgcctagggggtttcaatttatctctgagtgtgtttgttcttattgataaggtacgacaagaaattcaactctttgatggcatggttggcgagccttgtggcttaagaaggtatgtggtcgtagtagcgtcggatacctggatgcatttgaagttcaaggtatgtgaaaaaggctctaaaaatgatgttggtcactactgttccttcaaagcaaaccgccatggatttgccagtcaacaaatagttgttgagcctggagctatcacagtgaaggtgaattggtctgttatccctctatatctgtatgtgtcgcacttgctgaatatgacttaactagtggttggtttctatgctgaaagggagtactcttagatatatatgtatattatctagtagtattattc

SEQ ID NO: 26613 - DNA, 1775 bp, Oryza sativa
  ref <308>: DATABASE ACCESSION NUMBER: AK102055
  ref <309>: DATABASE ENTRY DATE: 2002-08-28
gaaaaaccctaacaacaaggcaaggcggcgccgattgctccctccggctaccaagcagcagcgagctcagtgaacccctaccgctgccgcaccctaccaccaatggcggcgcctccggccacggcctccgcgccctccctgcgcccgtccgcggccagcccacgcgccgccgccgctcggtcggtcgccgtcccctcagggcctcgcaccgtcggcccgaggcgagacgggggccgcttcctcggcgtccgtgctgccaaggctgtcagtggcgtgcagagtggtaccgtggtggatgatggagtgcaaagaccatggaagctcagcgatgctcggctcgttcttgaggatggttcagtttggaaggccaagtcttttggtgcttcaggaacacaagttggtgaagtggtatttaatacatctttgacagggtatcaagagattttgactgatccaagctatgctggtcaatttgtcctcatgaccaacccacatattggaaacactggtgttaatcctgatgatgaagaatcgaaccgatgtttccttgctggtctgatcataaggaatctaagcatatgtacatccaactggcgatgcacagaaacacttgaagcagtatctgatgaacagaaacattatgggaatatatgatgtggacacacgcgccataacacggcagattacgagaagatggtagtctaattggtgtcttaagtactgatcaatctcggaccgatgatgagttgttggaaatggcaaaaaattggaaaattgttggtgttgatttgattagtggtgtcacatgcgatgctccatatgaatggtcagacaagactgattcagagtgggaattcaagaagggtcaactcgactgaaagttttcatgtggtcgcatacgattttggaatcaagcacaatattttgagacgtttgacgtcatatggatgcaagataactgttgttccagccaattggcctgcttctgaggtacttaacttgaagcctgatggtgtgttttttagcaatggtcctggagatccagctgcagttccatatgctgtgaagacagtacaagaaataatagggaaggttcctgtgtttggcatctgtatgggccaccaattgattgggcaagctcttggtgggaagacatttaaaatgaagtttggtcatcatggaggaaatcatcctgtttgtgaccttcgaagtggacgtgtcgacataagtgcacaagctttccgtattactggtgttgggagaggtgctggacttctcgctgtgacacttcctgatgaaaacttggagcttctgagagtaatgaatttgaacctttaggctgttagaaccataattatgctgttgacccagagtcacttccagaaggggtgaaagtaacacatatcaatctcaacgataatagctgtgccggccttcagtaccctaagatgaaacttttgtctcttcagtaccatccagagtcctcacccgggccgcatgattctgacttggcttttggtgaatttatagagatgatgaagaacaacagattgtgaggcgcaaatataagatacaagggtttggttcttgaaccgggaggtgagaggttctatttcagatttctgatgagagccacaagagtcaaaataatctgttgtacctgtagcttttctttccttattataagctccgacaagcttgaatgcgagggtcaaggactcgagaataagttgctttgtgactgaatcagcctatgcaaaaatattttactcccc

SEQ ID NO: 26614 - DNA, 1852 bp, Oryza sativa
  ref <308>: DATABASE ACCESSION NUMBER: AK102056
  ref <309>: DATABASE ENTRY DATE: 2002-08-28
ggtcccggccgccgccgccgcatctcgtctcctctggtatcccggcggcagccaccttctctccccgccggcgtggcggggcgccgccttccatcggtgtggacgtcggccggcggcggagggaagaagaagaacctggcggctggcgctacgagtccgagaaatcggaggccttctcgcagccggaggtttccgattttccatatggttagtaacaaaccaatcccactctgcttgttaatcagggcattggaaatggacaatggcggctgggatctgatcttatgtgatgccatatttttggcaaagagttggaaattcttttttgcccgaatccgtcgctcaatcgaagaaagggagtagttggggattaactcttcagtctcctattcggatagagattgattgctttacgagttatatatgtgcacctggaagaattatttgtcgcaagaatcactgcttgtcaactggggatttagagggggaaaacaaggaggaactctgaactggggtgttgctgctgccttcagtagttcagattcatgatattgacagtgtgagaagtttgggcaagcaaattttggggtttctgccaacaagcgattcggattcaattctgaatcctagaacagctgaaggaacaacaacaggacaagttaattgtagctgtgcaagtagtctgcttgataaatctctccatccatccagcactgatggagcttccacaggatgttttgatgagcatatttgccaccttggaggtccctgacctcgtccgggctggttccgtctgctcctcttggcgatccgcgtacacaagcatatgcagccttggacattgcaagccacagtagacaccatgcatgctgtacacatttgattctgacggcaccaaggcgacgggcctctacagcctcgtggagaagaaggcgtacgttttgccgctccaggatctacctaataggcatatcatagtgtcctgctatggctggattgtaaacgccgatgagagatcagagttgcaccttgtcaatcccatcactggcgagcagatcgccctgccatcggtcaccaccattgagcaggtgaagcccatctatgacgacgatgctgctgctgccaacgggtacaaatacttgtggcacacgggagagtgacggtttccgactcgtcctcgatcctctattacaaggcatttgtgtcttgtgatccatccatgggaggaggatatactgtggtgctcatccacaatccgtattgccagctctcgttcgcaagggctggtgatgataagtggacatggctgcccccgtattccgactatgaggactgtttttttaaagatgggttgctgtatgctgcgactttgttaggagaaatacacatgtttgatcttaccgacccaaaggtcgcgccaaagatagttatgggtaaggtgaaggactttctgtatgagaatatttatatcgttgaagcttcatgcggtaacctactgcaaatttggcggtccgatgatctaccgaagtgggatgtaccggagggggatgaagatgatgatcactcgtttgattcagaatctgagttcgactctgagtcatatgtgtgtgatactaacacgatcaaggtacataaagtgagtttgacagaaggaaagattgtggaaataagtagcttggacgagaacttgctgtttcttgggcacggccaaacgctttgactccacgctgaagagtacctgcagctgaaggcaaatcatgtttacttcactgataataacgaactgtatctttttggatacaagaacaaccatcgtgatattggagtgttggacttggaaaatttccgccgt

SEQ ID NO: 26615 - DNA, 1303 bp, Oryza sativa
  ref <308>: DATABASE ACCESSION NUMBER: AK102057
  ref <309>: DATABASE ENTRY DATE: 2002-08-28
ggcgcgaactccgccgtctccctccctcctcaacctgcacgcaacccctccgccgccgcccttctcccctcgtccccccgtgcgccgccgccgccgaccgctgcaaccagatcggccgacgcgtcctcctccttccgccgccccactctccaccaacctcaccgccgattcctcacccaatcctccattcctgacctagggagaagcttcctcttcctcttctcttcccccgcctgttccttcccttgttggttcggatggcgaccgtcagcgacgactacgcgcagatcgacatctccacggaggagaaggacaagcttgtagcggaggtgatgcgccacgtgctcttcaagacgcaccagaccgccggctgccccatcaagcgggaggagctcacgcagatcgttaccaagaactaccgccagcgcgtgctcccggcactcgtcatcaaggaggccggggacaggctcgccgccacatttggctacgagatgagggagctccagaggacacgcgccccgtccacccgctctggccgcccgtcccagcagcaggttaatgtggatgcgaagagctacgtcctggtcagtaagttagaccctgaggtgtacagcaagtacgtcgagcataaggaggctgcccatgtgtctggcttcgcttttgttgtcattagcattgttcatctgtccggtggaaaaatttctgaagaggatctctggcatcaattgagacggctgggtttaaatgagagcgatgaaaaccaccctgttcttggtaacaacaagcaggcacttgaactccttgtgcagcaaaggtacctactgaaggagaagcttagtgggccagaaggccattctatgatgtatgagcttgcagagagagcattggatgagtccatcagtgggaagcttaaggattacatttcgcaggttgtgagcacaagcactgctgcagaagtagattgaagtggatatgatgagcaagagatacatctggctggtaggtttgtctaagtcagtgtattggcaagactaaccaggcgaaagaagctatatatcttcttgcgtgggcatgatgagacttctactgacatgcaaaaactagtagaggcttattttgtttaaagggctgtataggagaggagatggtggacctctgaactagctatataatttaggccatacaaaaactggcgtccttaactatgtatctgctacaaatattctataacttaagcgttattatatcatcatcatgcttgaaatgttgccgttcaggtctcctgacctgatgtgaggaagcc

SEQ ID NO: 26616 - DNA, 2619 bp, Oryza sativa
  ref <308>: DATABASE ACCESSION NUMBER: AK102058
  ref <309>: DATABASE ENTRY DATE: 2002-08-28
gatcctccacttccgcagcgggtgggtagcttgccgcagaactcgttcggctttcgcatataccgccgccgccgcctacctagtacaaggtgtcactgaatggctagaacaatgggttcaacacctacctactgctcttaccaaacaaatggtgttggcgctttaaagcaatcacctcatatgcaattccaacaatcgtacaactatggagttaggttcctaaagagggataccctttctgtgcggattaacaaacatatggccaaaagaatagcaacaagcactggaatttgcactaagcctaggaggtctcacatgcctatagtatgctctgctggaatgacaataatttttattgcaactgaatgtcacccatggtgcaaaactggaggcctcggtgatgttctagggggactgccccctgctcttgctgcaatgggacatcgtgtcatgacaatagttcctcgttatgatcaatacaaagatgcatgggatacaaatgtccttgtcgaggtcaatattggtgacaggacagaaacagtgcgcttcttccactgctataaaaggggagttgaccgtgtttttgttgatcatcctatgtttcttgagaaggtatggggcaagactggaccaaaattatacggtcctaccactggagatgactaccgggacaaccagttgcggttctgccttttatgcctcgctgctttggaggctccaagggttctcaatctcaacaattctgaatatttctcgggaccatatggtgaaaatgttgtcttcgttgcaaatgactggcacactggagtcctgtcatgctatctcaagagcatctatcaggcaaaaggaatgtatgtgaatgctaaggttgctttctgcattcacaatattgcctaccagggtagatttgccagagaagactttgaacttcttaatctaccggacagtttcctgccttcatttgattttattgatgggcattttaaacctgtagtaggtagaaagattaactggatgaaggcagggatcactgaatgtgatctggttatgacggttagtccacattatgtcaaagaactcgcttctggcccagataaaggtgttgaattggatggcatccttcgcacaaagccccttgaaactggaattgtcaatggcatggatgtttatgaatggaatccagcaacagatcagtacatcagcgtgaaatacgatgcaacaacggtaactgaagcaagggcactcaataaggaaatgctacaagctgaagttgggttgcctgtggactcgagcattcctttaatagtttttgttggtcgtcttgaagagcagaaagggtcagacatactaattgcagccattccagagttcgtggaggggaatgtccagataattgttcttggtacagggaagaagaaaatggaggaggaactgatactgctcgaagttaaatatccaaacaacgctagagggatagcaaaatttaatgttcctttagcgcatatgatgtttgctggggctgattttataattgttcctagtaggtttgagccatgtggtctcatccaattgcaagggatgagatatggagtggttcccatctgctcatctactggaggacttgtcgacacggttaaggagggcgtgaccggattccacatgggtttgttcaatgtcgagtgcgaaactgttgatccagtggacgtcacagcggttgcttcaactgtcaaacgggctctgaagcagtacaacacaccggcattctaagaaatggttcagaactgcatggctcaagacctatcatggaagggacctgcaaagaagtgggaggaggtttttcttgggttgggcgttgaggggagccagccaggcatcgagggtgaggagctggcgccacttgccaaggaaaacgtggccactccctgaaattctccatgacggtgcctagcttgctggcttgtttaggtgacaggcagcctgataggatcccatggacttctgagctcgccaccggcaaagccactatttgtatccctgcaggcttctgccatttctctcgtctacttcacgtgtaatataatcgcagatgttacttagagatgatgggccagatggcatgcatttgcctgtttctctctcgctccttctgcatgtgtaatagtatatttggctgtgaagttctggaccctgtcagtcgctgtcctcgtactgcatttcttgtaaggaactactccctccgtcccagaataaaccgtcccagaataaagtagcttagcatgggatgagatccatcatagaatataggatagtatatcttgacatagtatgtttttttttaatctatgccagctttgctggttttatattaagaaggggagaaactgtacaaaagcaccgagaaagcagcaggaagaagagaacaacattaggaaggctgcaggagaaaagaagggaatggaaaatgaaaacagagtacagggagcaggcagagaaggactatgggctgctcatggcgctattctcgctaggttttttttgccccacatgctatccatacattgatttcatcaagaattttggtcaactgtggaattgcaagctccttgttctgttcctccc

SEQ ID NO: 26617 - DNA, 2847 bp, Oryza sativa
  ref <308>: DATABASE ACCESSION NUMBER: AK102059
  ref <309>: DATABASE ENTRY DATE: 2002-08-28
gatttcaaacagtgctacccactctcagcgccacacctcgatgtcgtcaaggcgagggggcgaatccgacggcggcgattctcctcgccggcgggaggaggccaagagcacgactcctcggctgcagccgggcgcagccggcgggcgcagtgtggcgccctccgctgagatgtcatcgaggggatggggtgaatctggcggcgacgattcgcttcggctgcagggggattccagctcgcgcaaaatggctaaaagccggccggacaacatcgctgcagccaggctcagccagcgagcatgttgcggcgtcctccgccgccgccgtggagacaggcttggagttcagcaaggttgacggcgaggcgcacgcacccgctcccctgtgcttggcaaggcaccaacagttgttctgtgttcatcaagcaaggatgcgctgaatcgcattgcagttgctggtggtcttgatttggatccaaaaaggtcaggcgtcgagatccaaaaaagcaaggtgatcatgtgttatttcgtatgtgttttgccgctgatttgctgattcaatcttattgctcttcttcttgatctgtgtatttgtttaatgtattaatgctccaaaaaaataggttgggggattagatctgttggttgggaatggattttttttttctacacgaaggctgtctggatgttggttgacactggggacaagatcttgtgatgacagttctgtttttaggattattttcatgatttaactttgttaggttagcaattgttgacagcatcttctttggagtgtcagtattttctacgtagctcagttcttaattacgtataaatgcatttcagtattaatttcgtttcttattgcagtcctcaaaattttcagtgggtatttaagcaccaataccaggggttttagagcaacaacatttttagatcagattggagttacaatttaacgggagttccatgaatggaaatagttttgtatgcaagaatctaattagtagtaatactgcactgtcttttcggttacatctgtatttaaaattttcaaaaagaacactttatggctataaaggaaactaaaataaatccttatctactaagcatgttatgtaataattgattttatcaactcttgctaggaaaggatgttctgttttgcggtagtataggttatgctaatttaatttcctttgtagttttgttagcaacaatggatacctgctccttgtctttctgatctttttcttttccagggactcttgtccaaatttttttaactctcctcttttggattttgtggagcatgagaactagaattaagatccagattttcttttctgctcaacctgaatacatttgttcctgatttgcatcctcttcccacaaccattttgcggaggactttttctttgtattgttcaggggggatgtgggttacatgcaggtacaaatttgtataaagagtttattagtttagttttatctttactagctggaatatattgaaatgaaatctgcctagttctgaatttggcctagtgtagttgtagagggtaattccgatgaggaattgggtatgccccacaaggaggttggtattgtcctgacgatggcatgtagccttgtggagggcactgttggttaggaggatacccattgttgctctcaccatgcatgtccttgcttgcaaagtaatatattaattttgtcagccattagttagataaagctatatagttttaactaaatttggtaaaactacaatatttctgttgggtgatctactagtgtgttgggtgatcactagtgtgcattagttctgttatagttaggtaaaaggtatgattgcatttaacaaacatagttttgtaagaaaagagattagttttgtttgctattagaatttatagttttgttagttcagtcagaaatactttaacctctactttcaagttctgtcagaaatacaacaattagaagttttgttagccattagaattcctagttttgctagttcagtcataaatactttaacctctactttcaagttttgtcagaaatattgcaattagtagttttgtttgccattagaattcctagttttgttagttcagtcagaaatactttaacctctactttcaagttctgtcagaaatacaacaattagtagttttgttagccattagaattcctagttttgctagttcaatcagaaatactttaacctctactttcaagttttgtcagaaatattgcaattagtagttttgtttgccattagaattcctagttttgttagttcaaaatgggtattagttctgctttgtcagcaattagttttgcggagttcttctgcttgcttcttctatctatcttgttggactacatacatagttagttagctgaaatgacatttggttagctttgtcttgatcccttctttgctagaaaagacatgtttctacaaatctatagtgatttatgtatgcacactataggtctgttctgtaattttaatattctcactgatatactgacagctagaacctttcctttttttccagcaaataatcaatccgcaatggggggcagggtgatcaatgatgtgttcagctttttgactagtgacagaagtacatatatatgtattcagatataggtcctacaacatgctaacaattttagatatctgtgcacttagttttgttaaaagctcagatagcagaggcacagatctcacattcagatgtcactatgtttaattactgctcttactctagtcaagatgcaggggcaagattaaatgtttcataccaagcaaatgcaagttttgttgtg

SEQ ID NO: 26618 - DNA, 2482 bp, Oryza sativa
  ref <308>: DATABASE ACCESSION NUMBER: AK102060
  ref <309>: DATABASE ENTRY DATE: 2002-08-28
gccgtactagggccaccaccccgcacgcgcgcgccgccgcctccgcctccgcctccgcctcgatcccatcgcgcgctatggactccggcggcggcggcggcggcggggcgctgaggccgtcggcgctggacctggtggcggcgctgctcacggggcggggacgaccggaggaggaggggtggccgccctcgctcgccgagaaccgccacctcatcgtcctgctcaccacctccctcgtcgtcctcgtcggctgcggcgtcgcgctgctcgtccgccgctcctccatctccgcgcccgccgtgagggcgcaggagccgcagccgcgggcccccgcccccgcgaagaggaagcaggaggccgagcctgaccccgacgacggcaggcagagggtcgccgtcttcttcggcacgcagaccggcaccgccgagggcttcgccaaggcgcttgcggaggaggccaagtcgaggtacgacaaggccgtcttcaaggtgctcgatctggatgagtatgctgcggatgatgaggagtatgagcagaagcttaagaaggagatcatcgccttgttcttcgtggcaacgtatggggatggggaaccaactgacaatgcggcgaggttctataaatggtttggagaggggaatgagagaggtgaatggttgagtaatcttcggtttggggtctttggcctcggaaataggcagtacgagcattttaacaaggttggaaaggtggttgaccaactcctcgctgaacaaggtggaaaacgcattgttcctcttggtcttggagatgatgatcaatgcattgaggatgacttcaatgcatggaaggaacttctatggccagaattggataaattgctccgtgttgaagatgataaatcggcagcaccaactccctacacagctgctattcctgaatatagagttgtattggtcaagccagaggaagccatgcatatcaacaaatcctttagtctcagtaatggtcatgctgtatatgacattcagcatccttgcagagcaaatgtggctgtgcggcgggagcttcacacgccggcttcttaccggtcctgcattcatttagagtttgatatttcagggactggtcttacatatgagactggagatcatgttggtgtatatgcagaaaactgcacagagactgtagaggaggtagaaaatctgttaggttattcaccagataccttattctcaattcatgctgaccaagaggatggcactccactttttgggggttctttgccacctcctttcccgtccccctgtactgtggggactgcacttgccagatatgctgaccttctgagttttcctaagaagagtgctttaattgctttggcttcccatgcatctgatcccaaagatgctgagaggctaagacatctagcatctcctgctggaaagaaggagtattctcaatggatagtttcaagtcaacggagtctcttggaagttatgacagagttcccatcagcaaagcctccacttggtgtcttctttgcagccattgctcctcgactgcagccgagatactactcgatatcttcctcaccgaggatgactccaacaagaattcatgtaacatgtgcgctagtgtatgggcaaacccctactggaaggatccataaaggagtttgttctacttggatgaagaactcgattcccttggaagagagccaagaatgtagctgggctccaatttttgttaggcagtcaaacttcaaactgcctactgatcctactgtgcctattataatgataggtcctggaactggtcttgcaccttttaggggcttcttacaggaaagattagctctaaaagagactggtgtggaactaggccatgccgtcctattctttgggtgcagaaatcgaaagatggacttcatatatgaggatgagctcaacaattttgttgagaccggtgcgctgtctgaattgattgtagccttttctcgtgagggtccttcaaaggagtatgttcagcacaaaatggcagagaaggctcccgagatttggagcatcatttctcagggtggttatatttatgtctgtggtgatgcaaagggcatggcaagagatgtacaccgcacactacacaccattgtgcaggaacagggttctttggacaactcaaacacagaaagctatgtaaagagcttgcagatggaagggagatacttgagagatgtctggtgacaagccatcctcgcaaatccacccttgtgtctctgccaaaatgtaatacttccataaatacaacagtatgcgttctgtagggagttagtgaaacacctaaattacattggagaaaatagtacctgattgcaggctgtggtggtaggaattatacatgggctgtagtatttatcagatctgtatgaatcatagtaagattgtttaaacatatatatatatatatatttatatatatattcatattcatatataggactgcg

SEQ ID NO: 26619 - DNA, 1090 bp, Oryza sativa
  ref <308>: DATABASE ACCESSION NUMBER: AK102061
  ref <309>: DATABASE ENTRY DATE: 2002-08-28
gagaagaatcccagctaccaaatcgaacctaccaactcattcccgatcgatcgatcttaaaaaaaaactaatcgtaacttttctctctctctcctatctttagaactagcaggtagcaactgcttcgagtgtagtctggtgaacgtacgatctttcgttcgttcatcaagatgaccgtgatcgacggcgccgtcgctgccgacgccggcggcgcagccgcggcggtggtgcagccggggaacgggcagaccgtgtgcgtgaccggcgcggccgggtacatcgcgtcgtggctcgtgaagctgctgcttgagaagggctacactgtcaagggcaccgtcaggaacccaggcatgcacacacacggacgccataagctactacagctcgttcgttttagctagaggcttatagttatatggtgtgtgttgcgttgcgtgtgcagatgacccgaagaacgcgcacctgaaggcgctcgacggcgccggcgagcggctggtgctctgcaaggccgacctcctcgactacgacgccatctgccgcgccgtcgccggctgccacggcgtcttccacaccgcctcccccgtcaccgacgaccccgtacgtccaaccacacaacctcacctcacctcgcctcgccgccggccgacacggcggcgacaccaccattattttctcggtttctcacgctgttcatcatgggcgcccatggcgtacgttaattagttgcgactgacacgagtagcgcattgcatgtgtctttttgcaggagcagatggtggagccggcggtgagggggacggagtacgtgataaacgcggcggcggaggccggcacggtgcggcgggtggtgttcacgtcgtcgatcggggcggtgaccatggaccccaaccgcgggcccgacgtcgtcgtcgacgagtcctgctggagcgaccttgactattgcaaggaaaccagggtaggtgcatctgcaaaatctaatctaatttcttgatgatctctctctgcccttaattgcacgtactaattaaccttggataccttttgcttcatcatgttattgttaccttttttgctttggttcttttcactg

SEQ ID NO: 26620 - DNA, 2296 bp, Oryza sativa
  ref <308>: DATABASE ACCESSION NUMBER: AK102062
  ref <309>: DATABASE ENTRY DATE: 2002-08-28
ggttgggcgtcgtctccctgcgccgcctcccctcccttctctccccattccgcatcctccctcctgcgcgcaatcgcttccaggagcccctcccgccgcagccgcagatggattcctccgcctccgcctccgcctcccccacggcggcggcggcggctgacgcggaccggtacacgtacagcccgaggctgcggtggcagccggaggtcgaggagtacttcgccgccgcgtacggccgcgaccgcttcgcccgcatctccgaagccctcgcgcatccttcttgttactcttgtattcgtgtcaatactctgaagtcttccactgatgctgtcatgcataaactgatgaatttggtagatcagaacggactctgtggtggaattaatggtttggagattggtcagcagaatggtggagagcaagcacatgaagggaattctgtggtgcataagtgcccatattctggccttgacaacgttttgtttgtacaaggttcaggaccacatgcactgcactacaatagccaacctgaccaatctattaaggaagtgattgtaagtcgaaaatgtgcagagtcggttcttagaggagcccaggtgtacatcccaggagttttagcttgcagctcacatgttgaaaagggtgacaaagttgcagtgtcggttgctattgaacaacctgctgaggatggtggttggaccgttggtataacacgaggaactgttttacagggattgcagtcagatgcacatcatgaagaaagaaagggtttgtacattggtcaagggatcactgcaatgtcaaggtccggaatatttcgtgttcctcatggagttgcagtggagatgactgagagggtgtacaagctcccatctttcaatgatgtgctcgaaggggagatatttcttcagaatcttccaagtgttgtggctgctcgtgtccttgatccccagcctggagagcggattctggacatgtgtgctgccccaggtgggaaaacaacagcaattgctatcctgatgaaagaccaaggagaaattattgcccttgatagatctcacaataaggtgatggatattttgaagttggccgctgagatggacctaaattgcataaaagcttataagcttgatgcactcaaatctgtacggaagaccaatgaagcaaaatatattggcgaagcaggcagccgcactgatgcaattgtgacactggcagaggactctgagccttgtattaataaagtcgatgctgggactactaatgccagtgaagacagttctactacatcagttgttcagactgataacaaaaaaacagatgataaaagatatgtgagcaaggcagacctcaggaagaacttaaggcgaatgaggaatggaccaggaagaaataactgctcaggtggtagagttgaaaattctaaaggatttttgcccaatagctttgatcgtgtcctccttgatgctccatgttctgcacttggcttaaggcctcgcctctttgctggtgaggaaacgctggaatcactgagaaatcatgcgacgtaccagagaagaatgtttgatcaagctgtcaagctagttcaccctggtggggtgattgtttattccacgtgtactataaatccaggagaaaatgaagctttggtcagatatgcattggataagtacaagtttttgtcgctcggatcacagcacccaaaagttggaggacctggtattgttggttcatttgagcgatcaaccaagaaatatactgaggagtggttgacaaagcatgaatcacaacttgtccagagattcgatccatcatcaactctggatacaattggtttcttcattgcaaagtttgatgttgggcagaaagacgactgacgtaaggggttctcttgagcattctattttggatcctacactctgaaacttgctgttcctgacttcaaatatctcagcattaacacttgctgcagttagatcatttcagggccccaatcatttttcagtatgaatgggaaccaatatcccatatctggtttcccagaaattttgtgctcaactgtcaatattaaattattctttgtccaagggattattgtttgttgtaatgaaatgccaagggtgactggttgaaagtagaaacatttgtaaacccaaaatgatagggacttgagattttagatgttgggtggtggggatatggagctggaagagtggagttgtgctttgtatggcttagcatatttaactaaatcaatttcttttctatcacatggcagtatagcatactttctccg

SEQ ID NO: 26621 - DNA, 1995 bp, Oryza sativa
  ref <308>: DATABASE ACCESSION NUMBER: AK102063
  ref <309>: DATABASE ENTRY DATE: 2002-08-28
gcttttcttcccatcggccttgttggtttgaaatacagagtccaggtgcgagccaagtcccctctcttcgcgactgattgcgtttccttaaatatgcaaggcaggtagagggccgggtgagaaattttgagatttcgacccacagagggcggaaaacccttggattttagattcactcaaggcttcgtcgcgtcatgggtattttcaagttgaatctgctcctaaagctgcagcggcagcggcagcgccgtcgtcgccaaatccaagcccgtaatggatcagttttgattcatccacgggataaaataaacgctccagcctgtcaaaataacacacactcttggagtggccaagcgaagtgttcagacccaacgcttctggaggacgtctcgtgtcatatacattccctgatgtctatgcgggatgctgctcgtgttgcctgtgtgtctcgggcgtttgcacgttcctggagatgccttcccaacctcgacttcagtgagggatcattaggaataaatagaagtacatgcaaaaaagatgagaaactgggagatttgaccagcaaaattgattggattctgaaaaatcactcaggcattggcataaagaaactcatcattcaggttggcagtgtatacagtcgggacagtagtcatcttgctcatctcgatagttggcttcagtgtgctgttaaaccagggattgaagagctgattgttaatctgtcatcaatgaatgcaaaatgcaatttcccatgtgaacttttatctagtggaactggagattcacttcgctatatttatcttgcctcttgcaacttccatcccacagtaagaattggttgcttgaaaagcttgacaagactacagctgtgtatggtgaatatcacggaaaacgagctaaggtgccttctttccatttcattgggtttggagcggttggaactcaggcactgcagtacgttaaaatgcttgaaagtaccatgcctgcagcgtctcagctacctagatgttatgacttgcaccgggctgcaagttatagagagcaaagctccaaatctctccagtattcgctttgaaggtgacctctatgtacaattgtcacttggtgaaccactgcaaattaagcaattgtacaggttatgtaatgatgctgccttttatgctcgtactgagctgccatccagcatgccaaatcttgaaaggcttattatacattctgacactgagatggtcaatacaccaatggtgcctagcaaattctatcacctcaagtacttgagtattgcccttggtggacagacctatgattacctttctctggtttccttttttgatgcttctcctttcttggagacttttatcttgaatgcactccgagaacgcacggaacgtgccacaatttttggggatccttcaggtctgaggatgatgccagagcaccgtcatgacaaactcaagtgtgtgaagataatcaatttctcttctgtgaagactttggttgagttaacatgtcacattgttgaatcagcgacagcactcgaatgtcttacgttggacacaacgtcaggttcgcctagatgttctgtgaacagacttggtaaatgcttcttgatgcgcagagagacactcatggaagcccacagagcactcaaggctgttcaaacatacatcgagctcaaagttccctccaaagttgagttaaacgtcttggagccttgcagccggtgccatgctcttgacctttagatgtcaaatatgtgcgtgtggttgttcttaataaccagtattgcaactgtcagttacaagtgttgttttattaaacgtacatttgccccgaaactatcaggctatcagccctgtttactgttgaggtttgtaatgacatggatgtggtaatgtttcattctgttatttctcttgagacttatgattctttatttgctgtgtttgtaggattgattgttgataatatgttaataatgaggaattactg

SEQ ID NO: 26622 - DNA, 1175 bp, Oryza sativa
  ref <308>: DATABASE ACCESSION NUMBER: AK102064
  ref <309>: DATABASE ENTRY DATE: 2002-08-28
ggttgtacgcggacgactcaatcggttagctcgcttcgtcgtccaccgtctccctcggtcaccgtcgccgcgcacgactcccatccatggcgatcgagctctgcccatttaagcccggggcgcctctcttcgaggacttgcaaacgcttgctgcaaggattggatcctctggcttctgttgatttggggagcttttcatcgtctcgaccgaacggccagccgccgagatcgaggaaggaggagatcgaagggcagagtgatttggcagcggtggacatggatgtgaggtttgggcccgaggagcagatcgtgtggccggcttctgttcttgctgggatcctcatgtgcgcagcggtatatgatataactcgtgaagttagctcccggtgctacaagggttataatggactgaatgaattgcacaaacttgagtggaacaacaggggattctctaccttccacgcattagttgctgctgtagtctctttttatctgctggtgatatctgacctcttcagtaaggacgtccatggtgccatcataattgatcgaaaatcatggatgtctgatgccatgtttggtgtatccctgggctacttcttgacagatttgttgatgatcctctggcatttcccttctctaggaggaaaggaatatctcttgcatcatggattgtccatgtatgcaatctctcttgctctgttgagtggcaaaggacacgtgtacatcctcatggtcctcatcactgaagcaaccacacccttcgtgaacctcagatggtaccttgatcttgcaggccggaaggactccaagctttacctgtacaacggggtggcactgtttgctggatggctggttgctcgcgtcatactgttcgtatacttcttcgctcatgtgtaccttcacttcgaccaggtgaggacggtgttcccgctagggttctacagtatgatggcggtgccgccggcgatgtcggcgatgaacctcctctggttccggaagatctgcaaggggatggtcaaggccatgtccagcgccaaccgaagtcaatgcgtcaagacagattaggacttgggtaaaaggagatgcaacgctgtctggaagccaaatgcttactagcttgcttgtttgatgattaactaaactgtaatcaatcaattgattatttgaaaacc

SEQ ID NO: 26623 - DNA, 1850 bp, Oryza sativa
  ref <308>: DATABASE ACCESSION NUMBER: AK102065
  ref <309>: DATABASE ENTRY DATE: 2002-08-28
ttggagcgagaagatcccgaccaaaacccgcgaaggcagcgagatcgatcggcggcggcggcggcggggagatcatgccggagaaggcggtggacgacgtcatggactcggcggtgggggcgcacttcagcggactccgcctcgaggcgctccgcctctcctccccctccgccccgtcctccccttcctccgccaaggcggccgcggcggcggccgcccactccaacggcgccgtctacgccaacggcgtcgccgccgacgccgcggagcttgtgtcgccatccgcgctcaggcagcccttcgtcatcggggtttcgggtgggacggcgtcggggaagacgacggtgtgcgacatgatcatccagcagctgcacgaccaccgtgtcgtgctcgtcaaccaggattccttctaccgtgggttaactgctgaagaatctgcacatgcccaagattacaactttgatcaccctgatgcatttgacacagagcagcttctggaatgcatggggcagctaaaacgggcacagcctgtaaatgttcctatatatgattttaagaatcaccgacggtcctctgaaagctttagaaaggtcaatgcatcagatgtcattatattagagggcattttagtcttccatgatcaaagagttcgcaatctgatggacatgaaaatttttgtggacacagatgctgatattaggctagctcgacgaataaggcgtgatacagttgaaagaggtagagatgttagctcggtgcttgagcagtatggcaggtttgtgaagccagcatttgatgattttgttctcccttcgaaaaaatatgccgacgtgatcataccacgaggaggtgataatcatgtggcaattgacctgattgttcaacatattcgtactaagcttggtcagcatgacttgtgcaaaatctatccacatgtttatgtggttcaaacaacattccagatccgaggaatgcatactctgattcgtgacagggacatcactacacctgactttgtcttttattcagatcggttgatccgtttggtagttgagcacggactggggcatttgccatttacagaaaagcagattattactccaacagggtccatttatatgggagttgaattttgcaagaagctctgtggagtgtctattgtccgaagtggtgaaagtatggagaatgcattgcgtgcttgttgtaaaggaataaaaattggcaagattctaatacatcgtgttggagacaatggacagcaacttatataccataaactgcccatggatattgctgaacggcatgttcttcttttggatccagtgcttggtacaggtaactcagcaaatcaagctattgagcttctgataagaaaaggtgttccagaggagcgaatcatatttctcaatcttatctcggctcctgagggaattcagtgcgtctgcaagcgatttccgaggctgaagattgtaacctccgagatcgacaccgggttgagcgaggaatacagggtaatcccagggttgggagagtacggtgaccgctacttcggcacagataattgatgcttccatagcaatcgctggaggtgttgctccctggagaaggatcatgcatcggaagcaacatttcataccatgatgaaactatgtggatgagtcttagctgttgtatttggctgcagtgcagtactacatcgtttgtcaaattggtatgcgaggtaacatgtcagagaaattggtatgaacccgggcggccgaaagaaaagtatggtgtacatctgtagctgttgtttagcctccaaaaaccagaaccatggcgttaacggagggcaatgcaaattgtgtgct

SEQ ID NO: 26624 - DNA, 2248 bp, Oryza sativa
  ref <308>: DATABASE ACCESSION NUMBER: AK102066
  ref <309>: DATABASE ENTRY DATE: 2002-08-28
gctagttggcttccagaagcttctagaaggtgcccgaggcgtcgtctcggtcgagcgccatggatctggaccccgagggcctcttccgcgacgacagcgacgaggatgacgacaacgtccaggagagggaggccaacaaggagatggtcgtctacctcatcgacgcctcgcccaagatgttcacccctgcgaccaaggcagatgaaaaggaggagacacattttcatacgatagtgaactgcatcacacatgcgctgaagacgcagattatcggtagatcctatgatgaagtcgctatatgtttctttaacacgaaagaaaagaagaatttacaggaattggctggtgtttatgtttataatgttacagagagagaaccacttgataggcctgatgcaagattgattaaggaattttcttgtatagaagattcttttatgagtaatattggaagtcggtacggaataacttctggatctcgagagaataccttgtacaatgctctttgggttgcacaggcattgctgcgtaaaggatctgtgaagactgtgagtaagcggattgttatattcaccaacgaagatgatccttttggtggtcttacaggagcagtaaagactgatatgataaggacaacaatccaacgtgcaagagatgcacaagatcttggcctgtccattgaacttcttcctttgagtaggcccgatgaggagttcaacatgtccctgttttatgcagatttaattggtctggagggagatgaaatagtggattatctgccatcttctggtgaaaagctggaggatatgactaatcagctgaaaaaacgaatgatgaagaaacgcaaagtcaaaactcttgcatttgcaattaccaatgatgtttgcatagaggtgaatacatatgcgctaatccgttcaactactccaggggcaattacatggcttgattctatcagcaacctgccattgaaggctgaaaggtctttcatatgcaatgacactggggcccttattcaggatccacaaaagcgcttccaggtgtacaatgacaaaattgttaaattctctactcgtgaattgtctgatgtgaagagggtttcaagtcatcatctacgccttttaggattcaagccactggactaccttaaagattatcacaacttaagaccgtcaacatttatttaccccagtgatgagcaaatatttggaagcactcgtgttttcgttgctttacatagctcaatgcggcgtcttggaaggtttgcacttgcattttacgggaatccaactcgcccacaacttgtagcccttattgcacaagaagaggttacttctgctggtggtcaaattgaaccacctggaatacacatgatctatcttccatactcggatgatgttagatatcctgaggaggttcatctgacttctgatgatgcacctcgtgccacagatgaacaaattaagaaagcttcaaatctattgagacgtattgatttgaagaacttctcagtatgccaattttctaacccagcattgcaaagacactatgggatcttggaggccttagctttaggtgaagatgagatgccagatgtcaaggatgaaacccttcctgatgaagagggcttggctaggccagtagtagttaaagctgtcgaggaatttaaggcttcagtctatggtgaaaattatgatcaagaggaagccgaggcagcagcagcgaaggctggggcttcaaagaagaggaaagcacttactgatgcagctgcagagaaaagtgcagcacataattgggcagaacttgcggatactggaaagctgaaggacatgacggtggtggacttgaaatcttacctgagtgcacatggcctcccagtttctggaaagaaagaggcactcgtcagcagaatcttgactcatctaggcaagtgaaatggtccacttcgacggcctactcagttttagctaactctgtaagctatctaaatttctctgaacatcttgaagtgcctatcaaaaaccctctccctgcttaggctgtgccaaattttgtagcaatatgacaacagctgaccccagttcatttggtatcatgtgcttttgtgacatgtaccactgggatttctcttaaatgtcactccagtctgcagagatcagatcattgttggtagaggaaagtgatccattagagaaagcaacaccaaacaagattattaagacattttttaagtgaagcagttgcaacc

SEQ ID NO: 26625 - DNA, 2230 bp, Oryza sativa
  ref <308>: DATABASE ACCESSION NUMBER: AK102067
  ref <309>: DATABASE ENTRY DATE: 2002-08-28
gactcttcccccctcgccgcggcggccagatccgggcggcggaatgctgggccgggcgggggcgctgtccgcggcgcggtggcgcggcggcgccgggaccgggaccgggatcgggatcgacctgcgcgccgcgctgcgctccgggggcaacctcctcttcgcgctcttcgtggcggccgtcctcgccttcaccctcctcgccgcggtccacagccccgacgacccgctcctccacccctcatcgcaccagctcaccgcgttcctcacctccgccacctccaactccaccttcctcgccgacgactccgtcctccgcaccggcgaggacttcgccgccgccatcggcgccaactcctccgatgccgccgccgccgcggaggccaccgtcgtcgccgaggccgtcccgttcatcaagctcgaggacgtcgcgaccaaggaggagtcgtcgggggcggagcgggccgtcaccgttgacaccgacgccagctcggacgcgggcgccgcggcggaggagaaccccatcgtcgaggcggtctcctgcgacacggaggcgccggtggactgcacgggggacaaggatctcttcaacctgctcatgcgcacggcgatcgagaagttctccgacctccacttctaccgcttcggccgccccgtcgccgtgccggggagccccatggagtgcgacctcgcatggcgcttccgccccgccgaggacaccaacggccgcaccacctactacaaggactaccgccgcttcacgctcacccgcgacgtcaacacctgcaacctcgtcgtcggcaatgtgggcgagtaccactccggcaccggcgccaagcgcagcggccgccgcaagggcaagaaggggaagaagggcaagcgcgaggcaccggtcaccgactttgtgccggccaagacgcagatgaggctcgatgagaacgctgccaatgcagacaccacggccgcctccgagccggagctagttgtcggtgaagctgtcaatgacaatttaccggtggtcgaatctgagtctgaattcagccgcggaaagtatctcatctacatgggcggtggtgagagatgcaagagcatgaaccactacgtttggggattcttgtgtacacttggtgaggcacagtacttgaaccggacacttgttatggaccttaatgtgtgcctcaattcacggtatacttcaagtggcaaggatgaagagagagattttaggctctactttgattttgagcacttgaagcaatcagcatcggtcattgaccagagccagttctggacagattgggggaagtggcacaagaaggatagactgaagaatcactacactgaagacatcaaggtgaccccgatgcaacttcgtgacgtcaaggacacactgatcatgaggaagtttgggaatgttgagcctgataacttctggtctcgtgtatgtgagggtgagacggaggcagtgatcaagcgcccatggtatttattgtggaaatcgcgtcgattgatggagatcgtgtctgccatttcctcccggatggattgggactttgattcagtccatgttgtgaggggggagaaagcccagaacaaacagttgtggccaaatcttgatagagatacttctccagatagtctccttacgacacttaatgataaggtcggtgctggccggcatttgtacattgcaaccaatgaacccgataaatcattctttgacccaatgaagggtaagtatcgaacacacttcctggatgacttcaaggatttatgggatgagaacagcgagtggtacactgaaacaaaggagctgagcaatggtaatgctgttgaattcgatggatacatgagggttgcagttgacactgaggtgttccttcgggggaagaggaaattggagacattcagtgatcttactcgtgattgcaagaatggtgtcaatacatgccctgcttcctcatgaacatctcgtgaattatgtgcgctgagtctcaagtgttgtgcttgatataatatttttgaactaccgtgtatcttaagcacatatggctttgttgtagctagctagttcatatgagtgtttctgcaggacactgttgttgtattttatcacccagaacacattagtttgttgaattcatgcatcggcactttgtagtttgtactaattgcttaaacaagaaatttgctcaatgttaccatgttaagcctctattctgaggtattcatc

SEQ ID NO: 26626 - DNA, 2593 bp, Oryza sativa
  ref <308>: DATABASE ACCESSION NUMBER: AK102068
  ref <309>: DATABASE ENTRY DATE: 2002-08-28
gggccgcgtagttacgcaacgaatcaatcacccccgcggtgattaccactgcaaacaccaccaccgccgccgtgggaaccggcattagaagcgaggagacgactaatcaagccaccaaaaaaaaatttaagacccctccctcctccttgccgcactcaccaccaacctgtaatgtgaacctgctgctctgcgagttatcggtgttcatccagcagcgagagcggtggcagtggtactaggagtctaggacgagtggtgggtactggttgtactggtggtacggcggtttcagcggcggagttctcgcgggattgtctcgttcgtctgatccggcgctggaggacggcggttggtttctttttcttctgctgcttcgcgagcgggtgtgagagatcggttccatgcgggggtcgctgctgctggcctcgggccgtcagggtttgcaagcggaatctactcaactatgacggattagcctcaaaataaatgatggcagctgaggttaatcaaacttttttcgcgtggtcacaaggagaaccaactgaacgggacggttctcaaggtgtatctgtgtcccagaaaattgatcatggttccatctcctttggaagattcgaattggagtctctatcatgggaaaagtggtcagtattttctgatgacaagcgtcatgaagaatttggcaaattcaatggtttagttgcacagaagaaggcatattttgaagagtattacaggaaaattagagaactgaaggcacagcagcaaaaccagcaaactgaacttattttggaatacagtggtgatggcagtgattcgagtcagacaggagaatatacacaaggtgcagagcttgaaactcctactggatctggaactatcgttgatgattatgtggagcaaggtgcacatgaaactacctctgagcaaggattgacatgttatgatgaccatgaaaacgagaacttcaatgcagaattctcctcatccaatatttcttcttcagctgtaggtttacagcaaactggccgggatgctagagaaaatgtacacggtgatgattcggctggtaaaatggatttagagcagcagaatgccatttctggtcatagtcttggaacagcatatgaagttgtaagggctcctaaaagaattatcgagaaagactccaggcttagatatgctccaaagatagtaccaaagtctgtcaaaacctcctccgatagtcctctggatcgcacatctgttagtaagaggcctgattctctgaagcttggcatgagtattaaccagaaggctaagactgacaatgatcgtttattgagaggaccaaatgtagcgcctcataagatgtctggatcaaccgaaaggaacaagcttacaacaaaacaaacaggtgtcagaagaccttcctctgcatcctcacaacggccctctgtgggagagcggcaccggatagccagggagagcataaaaaagcctgctgatgtttccaccccacggcgtccttccactgcagaaaggcaccctgtcaccacagagcgtgcaaggaagcaagccgatgtagatacaccacgccgaccatctacttctgaaagacgtgctgtcaacaaagggagtgctgacatgaccactacacatcgcccctctactggagaaagacgatctgttaccagggagagtgttctgaagatggacgtaagaacacctagcaagacaaggcctactatgacgcaactgaagggtgcaacaaccacagtgggtattgttaaaaaggcaggcactccaaatgcttctaaaagcatcaacatgggaacaaaaagcaatatcagagaactggaaggaccttcgaaagtgggcagacactctgttgggtcaaaaattacggacctgcaaattgctggcaaacagaaatcaagctctgtccaccttcctccacggaaactattgagttccagtattggagaaccagcactgcaaacctttacaaggccaaaaaagaaagatgttgcagcgcaatctcgagcatctacatcgaagagagcaatgactttgcacactggaaacgtaaaggggaggagttcaaatccacccccaccaccacctccaccgcgtcggccttcacggacgacgaacagaccaaatggcagtaactcatcaactgttggacaaaagccaaaggtttcatcagcaccaaaatggcattgatgcaaagggagactttcattcaacctactctcccgcacaaatgatggatctgcgacaagtcgcaccgctacacgaatcttaaagcatcggcattgctgtccacttcccctgaatgatgtttgatgtttctgtatatcagttcctctactctctagtgcctccccccttcccttcagagcaagtccaatatagtgtatgtagttacctgtatcatatcatcaactgcctagctttgtcgcccaaggaacttagaacagtgctgtacatacctcaaataaaatgtttcgtcagctaaagtaaggctaccctgaacatgtgaaaaatctgtggtctctgaacattgtctgcacatcatcagtagtaatggaaatcgttcattctttcc

SEQ ID NO: 26627 - DNA, 1756 bp, Oryza sativa
  ref <308>: DATABASE ACCESSION NUMBER: AK102069
  ref <309>: DATABASE ENTRY DATE: 2002-08-28
gattcgactcctaaagccctaaacccgtctctctcctcctctcacctagcgccgccgccgccgccgccgcgaacgcgaacgcgatggccgcagccgcagtgctcaggagccatggcgcccgccgcatcctctcctaccccaccctccgcgccgccgtgatctcgggccccacggcgctaccggatgcgtcggcggctgcggcggcggcgccccagcagccaccgcctctggctggaaccctgtgggcgaggtccatggccaccttcacccgcacgaagcctcatgtgaatgttggcaccattgggcacgtcgatcatggcaaaaccacactcactgctgcgattaccaaggtgttagctgaggcagggaaggctaaagctgttgcttttgacgagatcgacaaggccccggaggagaaagcaagaggaatcaccattgcaacggctcatgtggagtacgagactgctaaaaggcattatgctcatgtggactgcccagggcatgctgattatgtcaagaatatgatcactggagctgctcaaatggatggtggtattcttgtcgtatcagctcctgatggccccatgccacaaacgaaagagcatattcttctggcccgacaggttggtgtgccatcacttgtatgtttcttaaacaaagttgatgctgttgatgaccccgagctactagagcttgtagagatggagcttcgtgagctcctcagtttctacaagttccctggtgatgagattccaatcatccgtggatccgccttgtcagccttacaggggactaatgatgagattggaaagaatgccattttgaaactaatggatgcagttgacgagtatatccctgatcctgtgaggcagcttgataagtctttcttgatgccgatagaagatgttttctctatccagggccgtggaactgttgtgacagggcgtgttgagcaggggacaatcaaaactggtgaagatgttgagatcctaggtttgactccaagtggtcccttgaagactacagttactggtgttgagatgttcaaaaagatactggatcatggagaggctggtgacaatgttggtcttcttcttcgtggtcttaagcgtggtgatgtacagcgtggccaggtggtgtgcaaacctggtaccgttaagacgtaccaaaagtttgaggcggaaatttacgtccttacaaaggatgaaggtggtcgccacacagccttcttgtcaaattacagtccacagttctactttaggactgccgatgtcactggaaaagttgtgttacctgatggcgtggaaatggttatgcctggtgataatgtaactgcaggatttgagttgatatcacctgttccccttgagccaggccagagatttgcgctgagggaaggagggaggacagttggtgccggagttgtttccaaagtttacagctgatctgtttccagttttttctgcgtagcgaatttagtaacaaatgaatgttcatagggaatcagatctatccgaccggcaatatgagagcaaaagagcgagggactcgcagagcatcttctctgaattcatgagatgcagggatcgttggctcggccaccattccgaactagttattgcttttctttttccatgtctggttgttgctgtataacaacgcgtttagtcatcttaacacgtttttttgcccatagcttggtgactaaataagaaagattcatcataagcatcttaatggttgatgtttctctcgc

SEQ ID NO: 26628 - DNA, 1668 bp, Oryza sativa
  ref <308>: DATABASE ACCESSION NUMBER: AK102070
  ref <309>: DATABASE ENTRY DATE: 2002-08-28
ggccgaacacgcacgcatttttgcccccacgccgccgccgaggatggagtccaacgccgagaagcttcgtggtctcaccatcacctcgctggatgaggaagacgacgagcccgaactgccccaccgatccccacccgccagcggcggcggcggaggcggcggcgcgggctacgaggacgacgatgaggaggaggaggaagaggcggaggtgacgcttggttttctggagaagccgaagcacccgggcctcctcctccgccacctgttccctagcaaggccggaggcatcccggcgtggttggatcctgtgaacttgccatcggggaactcgcgttgctgcggcttctgcggcgagcccctgcagttcgtcctccagatatatgcaccgattgaggacaatgcggcatcatttcaccgcactttgttcatgttcatgtgcccgtcaatggcatgcttactccgagaccagcacgaccagtggaaacatagacaaggcaatccgtgtagaagcgtgaaggttttccggtgccagcttccccgtagtaatgccttctactcaagtgaaccaccaaagcacaatgattctgacaagccactatgtccaggagctcctgtctgccattggtgcggtacatggaaaggtgataaactctgtagtagctgcaagaaagcacgctactgctctgagaagcatcagacactgcactggcgctctggccataagagtgattgcctacagttaatcagttcttctgaagcttcaagctctatttttcctgctgtaggaaaagttcctgctagcaaatcttggccagaatatgagattgcaatcgactatgagggtgctttcaattctgacagttgtgatgagagtaactcaaagtccttggtgatgcaaagacctggtaaaccagatgatatgatgcagtcatggatggatcaatttgaggctgatgctgacaacaaatgctgggcgtcttttcaagagcgggtctcaagagcaccaaagcaagtattgagatactgtcgagaagagaatgccaaacctctatgggcgttatcggctggttgtccatcaaatgccgatatcccatcatgtagctactgtagaggtccactatgctatgaatttcagataatgccacagctgctttattactttggtgtgaaaaatgagccagactctcttgattgggcaacaattgttgtgtacacatgtaaaggatcatgcgatcaaaatgtcagctacaaggaggaatttgcatgggttcagttataccctacaacaaccacaaggtcatgataatgtttatggtttatttgcccccacagagtaagctttgtaatggcctacagggagctggctgagatcatctgcactcatttttgacgtgaagtcgggagctcaactgatcaagacgagatagatttgttttcctctactggggattttttagtggggtgtggtttcgatgattccaggtcagttggtcgtgcaatgttgagcagcgtagggccgtggtcccaaatgctttgtgctcgctacattggttttgatctgctagaccactagggcccatttagcgcatttgataacaaatatatgtgttccttgtggtcaccaccgtgcttggtttagtatatctttagtgttcgttaagaatcttt

SEQ ID NO: 26629 - DNA, 1072 bp, Oryza sativa
  ref <308>: DATABASE ACCESSION NUMBER: AK102071
  ref <309>: DATABASE ENTRY DATE: 2002-08-28
gaaaaagccctagccgcctcccccttcgtcctccgctccacgagaccacgacgcagggttttctggttcttgctgtcttgggatctttgatttgctgcgaaggcgaaggcgaagatgaggcccgtgttcgtggggaacctcgactacgacacccgccactccgagctcgaccgcgtcttctaccgctacggcaggatcgaccgcatcgacatgaagtcaggatttgcttttgtctactttgaggatgagcgtgatggtgatgaggccatacgagcccttgatggctatccttttggccctgggaggcgcaggctttcggtggagtggtcacggggtgatcgtggttccaggcgtgatggctatagcaaaccacctgtgaatactaaacccacgaagacactatttgtcattaactttgaccccatcaacaccagagtcactgatatcgaaaggcatttcgaaccatttggaaagctttcgaatgttcggatcaggaggaactttgcttttgtgcagtttgaaacacaggaagaggccacaaaagcacttgaagctactcattctaccaagttgttggacagggtgatttctgttgagtatgccttcagggatgatacagaacgaggtgacaggtatgatggtgcaagaggtggctatggtaggcgagatgatagtccatatcgtcgatcagttagtccagtgtacaggtcacgcccaagtcctgactacggtcgtcaaaggagtcctgtgtacggttcgtatgacaggagtcctgttaatgatcgctatcgaagccgatctcctgtccggcgatcaagatccccacttgccaacagaagagcttatgattgacagagttttctcaagggtggttggctggttgctgaagggtttgcatctgcctctctagatctttagcagtgatagcaagaacttgtcttctccgtactatatatataatttagatatgggtactcatgggtggttcgtagtcgaactgaaaatcttttaccttttgttgacctggaactccgtactagtataatttagatatgatgtgttgtgcatcaag

SEQ ID NO: 26630 - DNA, 3676 bp, Oryza sativa
  ref <308>: DATABASE ACCESSION NUMBER: AK102072
  ref <309>: DATABASE ENTRY DATE: 2002-08-28
gagggcgccgcctccttttcttccctcgcaagcttcccccccccccccccccccccaaaatccccgatttcccgcccactccgtcccctccccctccgcctccggcggccgccgccgccgcaatgccggtgtacaggatccgcggcgtcgacgtcgacttcccctacgacgcctacgactgccagatcacatacatggaccgcgtcctcgaatccctccagcaggtaaccccccaatcccctccgattcccccccgtcggcgcggaatcggaaacccttcgattccattcgatttgagtgatgggggcgagctcgccggatcgatccgacagggggcgggggcgggggcgggggcgggggcgggagccagcagccgccgtatgggagccagccttctgggagccagcactcggggggttcggcgtcgcagtcgtctcggtaccccgtgatcatctacgcctcacggactcacagccagctccggcaggtcatcaaggagctcaaggccaccagttacaggccaaaaatggcagtactgggctcccgcgagcagatgtgcatccacgaggaagtgagcaaactccggggaaggcaacaaaacaacgcctgccactacctctgcaagaaacggtggtgccgccatcacaactctgtcgctgaattcatgaggaacaacagtgagcttgggagtgaggcttgcgacattgaagacttggttaatattgggagaactaagggcccgtgtccatattacatctcccgggaactttccaagtcggttgatattctttttgctccatacaactatcttattgatccaggaaatcgacgttctttaaatggaataccatgggataatgcagtacttatatttgatgaagcacacaacttggagagtatatgtgcagatgctgcatcttttgacttgcttcccaataacctctcttcttgcattgcggaagctcaggaatgcatccaattgtgttcagcaaagaggacctttgaaaattctgctgataaacaatttgaccctgaaaattatgctattctcaaagcccttttaatggcacttgaaaagaaaattagtgaggtggtgattgtttccaaggagctgggccatacaaaacctggcaattacatatatgagttcctctctgaactgaatattacttctgaaacatccaaaaagctaattgacacaattgatggtgcttctctattacttgaggaaggaaattctgctgaaactggacctgggatgaaggcgacggctactgtctgtagattggaaacaatcagggacattcttgacataatttttagaggtggtggtcaaagccatgcaaagtattatcgttttcatgtgaatgaatgccaacaaaattctggagatgctcttaaagttttgggtaaggtatcaaggactcttagttggtggtgttttaacccagggcttgctatggaagagtttctcaagttgggtgtgcgctcgattatattaacatctggcactttatctcccttggattcacttgccctggaactaaacctggaatttccagttaggctagagaacccacatgtcattgcttcagatcaaatctgggttggagttgtgcctgtaggcccatcaggacatccacttaattcttcttaccggacgcgtgagactctgaaatacaaacaagaattgggtataactattgttaatttcgcccgcattgtaccagatggtctgcttgttttctttccgtcatattctatgatggataagtgtatcaactgctggaaagataggaaccatgaaaattcaagtgatgagcacacaatttggcaacgaatctgcaagcacaagcagccagttatagagcctaggcagtcatcgaactttccaaatgcaatcgaggattatgcagccaagctacgtgattcttctacaaccggggcaatattttttgcagtttgtcggggcaaagttagtgagggtcttgattttgctgaccgtgctggaagagctgtaatagttactggaatgcccttcgctaccccaactgatcctaaggttcggctcaagcgtgattatttggataagctgggttcagcatctaacaagaactcaaaggctttgacaggggaggaatggtatgtacaacaagcggcaagagctgtcaatcaggctgttggacgtgtcattagacatcgccatgactatggagcaattatttattgtgatgaaaggtttgtttggcaaaattatcaatctcagatgtcatattggctgcgaccttacataaaatgctataaaaagtatggggaagtagtccaagggttaacaagatttttccgagataaagtgtctattgattcttcaaagccaaatgagacagattttaatgataatattgtactgcttgcagacaaacataaacctcaggagactatatctgctttggctgtcaccacagcaaatgagaaccagagaactgcattatctgtgaatccaaccaccaaaagaagtaactatatcaagtttgcccagatcactcctgccaatcgctctaccctttctatgaaacatggctgttcatctacttcgcagctcttatactcaggagacaaactgtctacggatgctcaggttattgatttggctgctgatgtggcaacaattcatcttgcaggatatagatttaagtccttaggacctaaaaaggctaaagtaatggttggatccaaagatgtttgttttgatgatggatctccaaaattgcaacataatgttgagtcaagagctttggctgggtgcttgggtgagcaatctacagcttcatcaaagaagagtaatattacacatgcacctggaaacagtggggctattcatgagaaatctggaggccaggaatctaatgcagggccagccttcttgaagctggctcgagaaaagctcagtactgcagagtacagagattttgttgaatatatgaaggccttaaaattgaaaaccatgcacataaaggactcacttgatgcaatagcaaaactgttttcgtctccagagcgactcccacttcttgaagggtttagggtttttgttcctaagaatcatctttcattatatgagcagcttgttcaaagctatactgtgccaaatacatgatttgctgcactatttaaagatcaatttctggaaacttctgtggtaaaatgcaacccgtgcttctcatatcataattgtgccctcgaggctttaatggtcaattcaaatagttctgttgaatttgttcccatcatctgggacagggggggcattgaagaagaaatgtaaagcctttagagttaactgatgtcatagttttctaagtgactaatgccctggcagttttgttaactaatatacattatccgattccactaggtatcatgccagccagtgcgttgcagatagtggagtatgtgtaccctactaggttaactaaaacatgtattttcttcatcgcgagtgaaactgcattattagctaaactagagtggattgacgggaattgcccacgcgtctctatatataggtccgtgtaaattactaaatcaataacttgaatgtaattatcttttgatattttttatgggaaacctgagcttaatacacatttggaatacttcgttatggcagaaattg

SEQ ID NO: 26631 - DNA, 2984 bp, Oryza sativa
  ref <308>: DATABASE ACCESSION NUMBER: AK102073
  ref <309>: DATABASE ENTRY DATE: 2002-08-28
gatcaaccactagtgcaccatcttatattcttcctacatattcattctccccacaacaacaactaacactactcactcttcattgcttttttttttctctctctagctagctagcttgcttctacttcttcttcatcttgatcttgaaactagtcttatcaatctgaggaattaatccatcattatgatgaatcttatatcatttgaaacacctcctcttgggaggaggagtcaagatggaggcagcagcagcagcagcatcactgctgctacaaccactaccaacaaggcaaaggaagcagcaagccatctagacctcagcctcggcatctccttgtcacccggcggcggcggcggcgacgctggcaccaaggccagcagctgctgctacggcggcggcggcgacggcggcggctgcatgggcagtggcatgctcactgcaggagttcttggcgttgggcatggggggagtagccatgacaatactacggcgagcagcggcggcggcggcagctggacggcggcgttcatgccgagcccgacgggattcatgcacccgtggagcctcgccgcccggcagcagaaggccgccgccgagcaggagcggagcggcgtcgcgaggctgccgccggcgacgacgacgtacatgccaagagctgccgcgaccgtgatttcactgccggcggcagttggctggccaccggtgcacacatcccggcgtaacctcgttgccaccataaataatgtcctgaaacccgacactactgccgccgtcaagccggacagaccgacacaagcaacggcgatgttcgccgccgacgaaaccacggcgcccccgccaaggagcgcggcggcggcgaccgaggccagcaggacattgaacatgtttgccaaggtgcacatggatgtgtacaaggtgggcaggaagatcaacctcagggcacaccgcaactacgactccctccgtcgggtcctcaccaagatgactcataatttcttctgccgtgagtaccctatatttcttttttacttttttttaattactggatagacacagacgcacacacgtatcactagactcgtaacaccacacttacacctccacaaatacactccctaatatatcattatctcattaaattctgagtgccccatatttcaactctatctacaacaaagtgccttggtatcatatctatctgttctttaactccatagatatataatatatattttacaagggaaataggtagagttagttatgtgtatgatttagggtagataccaaacacattaaaatgattctggtcccgtgaccaagatagaattaattaaaatgcagacatggcccatgaatcgtattatgtgacatgagcaaactaaacatagtttggtcccacctcatagagtcataggttttgtctttttaaggaaggttagagcatgctaattgtttaggtccaattgaatttacaggtcaccccttgagcagtcaaacaagttcttcaaactctgtagtaatttgtgctagtccaactagcctctcaagagttatttgctcatttttctccatttgtttgaatgaacatgtcacaataatatcttgcaactcaatagttaatttatatcttgcatgtttttagaagagtcaaccatctcggccctcgtgattaccccatgattgtgctaggttttaattcatttacctttaattaactatgccattgtaagtttttctagtttgggtttttttataaattaaatcaaatctattcttctatagtaatttgcataagctccctacccttttcgaaggttatgcgtacacggaacatccaacctataatgacttggctagaaataatatctaagtaaaaatgttccaagtaatgaagtgaatgctatattgcttttggattttttttattgtactactaatataaggtattaaaatgattgttcaaaatactaagttctttttcatttcacaaaattcagccgcagattattcaagcacaaataagggagaagaagattgtgctaaaagtgacgagttcatatttctatatgaagattttgagggcgaccgaatgcttgttggcgatgtcccatgggagtaagtatttttgttaaaataattgatagcttttttattcactattgttgttacaaagtaatccatctcacttaagttgttgtctcatgtacaagttattgtttcatgttaatttgttacttcacaaatgccatccataataatatcgaaagtgtaataaaatgtttctcgtataagggtgcaataacattcttggggctcatgagggaaatatgttactatgtctgactcactagttcattaatattgtttgcacattcataattaataagatgtaaaaggagaaaaccttactacacaattagttttcgaatatacaacaactttaaaatgcccaagtaactgtgcaattttgtaggttgttccttgcatcagcaaaaaggttgtacattgccaaaaacccagcacccagaaacaaaggtacctacagacctcttgtctggatatgcatgctgcttccaaaagctccatattgaaatgcttcttttacgtgtttgctgtgcaattactttgcagaacatgctgaaatcgccaaaaggaaagaaactgaagatgcaatagataactgaaggcacctgaaaagcaagttgatctctgcatatactacaatatgcacttctcatgatctgacatatatagctctcgacttgtgctgttcatcttgtattataataagctatcttcgaagagtaggtttataatgtacggatgcatgttaaaatgcttcttgatcactgtgcatacaattttgcgggcattaggtaagtactctgaaaaatgtactagacacggattcagtatgtctacacaaagtggataagactcgtctaataattaactacgttcttgcttgctatattttccatcc

SEQ ID NO: 26632 - DNA, 4133 bp, Oryza sativa
  ref <308>: DATABASE ACCESSION NUMBER: AK102074
  ref <309>: DATABASE ENTRY DATE: 2002-08-28
tggtgtccgtccgttgtccaccccacggccccactgatcccctcccatgtgatgcgctgccgccgccgccgatcccccgctgctctttccctcgctttcccctcccctcctcccctcacgccactcgccgccgcccatgccgccgccgctgccgcattccccgcccccaccggctgccgcggatgcgctcggccagatcttgcaggctctgctcccggcgctgctcttggctgcggagtccgtgaaggcgctccacgcccggtggcgcgcggtccacggcacgctgctcgcgctccagacctctctcgccgcagcaccggactcagccgtctcccaccctctcttcgccgacctggtggcctcgctcctcccggcgctccgctccctgcaagcgctgtccgcgcgctgccaggacccgtcactccctggcggccgcctccgcctccagagcgacctcgacatcgctgcctcctcgctctctctgctcctccacgacctctcgctgctccttcgctcggggatcctctacgtcgatccgtcggcttcgtcccccaacgccattgtgctgcaggtgcccgcgccagccgcgtcccgggcggacaagtctctcttcatccgggacgccttcgcgaggctccagatcggggggctcgatctcaagctcaaggcgctcgcctcgctactggacttgcttgccaacgacatcgccgcggagtccgcgcacatcgttgccaccgacggggatgtcgccgcgctgctccgcctgctcgacgcgtcgtcccactccgcgctacgggaccgtgcggcggctaccgtggcccacctcgccacggcctgcgtggcttcgcggaaggttgtgttcgacgagggcggccttggcccgctccttcgcgtgctcgactccggctcagcgccagccacgcgggaacgcgccgtggcggccattgaagccatcaccgcggacgtcggcagcgcgtgggctgttgcggcatacggaggggtacccatcttgattaatgcgtgccgacctggctccgggtcccctgtggtacaggctctcgctgtagcggcgctcaagaatgtggcttccatcgaggatgtgcgctcagcactggttgaagagggtggactgccaattcttgttgatctgcttgcaagcggcactattgacgcacagaagggttctgctctctgcatatggtctctagcatccttgggagaccatgagatacaataccagattgtccaagcaggtgcattgctgccactactgcaggcgctgcacactgcttctggcctagatctccatgacactgtcttacgcgctatccacgcactcgcagtggtccctgctgctgctagaactctctgctcatcgccgctcttcttcgcgcaacttacagacctcatgtgccgtggtggtagcatcttgctgcagcagatggccgctgatatggttgctgaacttgcacctggcgtgagcgacgacaccaagcggtgcatggcaccgtgcatttgcatgctggttaagatgatggagacagctaagccagctactgtacaggagtcagctggccgtgccttgcttgctttgatgaccttgaagtttaaccggaaggaattggtcagggatgagaagagtgtgactaggttattgcacatgcttgatccgaggaatgaagagattgataaaaagtatccagtctcagttgttctagctctagccttgggtggtgggaatgggacacggaggcggcttgcggattctggcatttgccagcatttacagaagttggctgaggctgaggtgcctggtgcaaagaaggctttgcagaggatttctggcaatcgactcaagagcttactctctagaggatggaacaactagtcagtctgccatgttggggtaaatatagaactttctacatctctccttttgatcatgattatattgtatggttgtgaactttactaactactaccaattttgctcccaaggccagaaattttactccctctttaagaaggatgaatttcacatacaatttttttttccatactggaactacgcatattgccatgttccaagataggacttagtgactgttttagttgtttaaatcttgcaaaaatattatagcatagaggttatcctgttgtagtctgttttctgtcattcctttgctgtatgattgtccaggtttggtaggaataacatggacaggttatgggaggattgagccaccatgattagatgtatcttttcgatagtggtgtgctgttatgtactttgtagctatttctttttttgtactttcaaaatgcaaatgcttgctgagaaatatcatgtcataaactggtctgtggtggcaattcgtgtgattggtgggttgggtaggtgaatgatatggctggccattgagggatcgggccaattaatgcttatagccatagcaggacagtgtgccatgtagcatctggagtggaggatttgtatgtctttcgtatgccttagccttaagacagtagaaatgatcaagaaggcaaagcaaatactgcattgaagaaaccaggaaggagattagtgagaaggagagagtgaaaaataataaattagaaaatgtacaaggactcatcaagaatatatttggttttgcactcaacatgattgcttttccttcaatgtagtcacagggactaatacaaatctcttttattcttttttttattgctcacatcagaatctagttaaagtatgtcaatcgtgtaacattaaaaatttaatgcatatggtattgttgaactttgctaatgtaatttaacctagcatgtgaattgtatgtaagttcctataatacatatagataatgtagaaagctgaagcattccctgcatttgccgatgcgctaaaagttttgtacagcgtatttgtgccttgcatcttagcctttcccagtctgtccacagaagacatatcctacaaataacttatctatatacgtttgcctattgattgttagtcatcgtagcctccatccagtagttcactattaatgagacgtacttataatattattacatatctatagcatgcaaatttatgaactgtaccatgttgctcatttcaaatgctgatgtctattcaattggattctgatatatggtggtatatcacatgctctcaagcatacaaaacaacctgtttaaaataagcatagagaaaacttagcaatttgttagagtatactctggattcagactttttatgggcaaaattgtaactttttattggtacaacaggatgcatcagttcagttgacccgatttctacctgtctttggttccaattgcttcctccactaagctttactagaattcccattcacttgctgaatcattttcatttagtctgcaaacagaactctacaaagaaagacaagatcatgttttcttccggcccatgaatcttctacaaattactagtagtattatggtcagaagttactgaagtactggttccagcctaccatgccatttactgaagtactggttccagcctaccatgccattctcattattcctgcgttgcagttttttttcagcgggaattcctgcattgcagttgactgagtagttgagtctgttaagctctagcatagtgtacagattcgatgctgttgctgataacatgtataatttgcattgtttttttcattacattcctagcgtttttgtagttcacttgagcgaactaattcttatgatcccgtcttttttttttcaatttgcagttgaagaaagcccaatgtggagtgcttataattatagaagaaccctcaagtatttaaattaggagtcgtcatcatacaagaccaccgagcaagagagcgaggagttctctgtttctctgcggcctaaaggtgggcagtagctggtatttgtagtatattgacaaaatagaagagcattggatgcagcattttaggaagtatccttgagcttctattttctttttgactattttccttctcttttctttgcctctcccttctcccgtgtaactgacttgtgaagttgctgcgtgtttgtgtgttgatttgaaatgaaggaaatgtttctcgtacgagattctc

SEQ ID NO: 26633 - DNA, 2424 bp, Oryza sativa
  ref <308>: DATABASE ACCESSION NUMBER: AK102075
  ref <309>: DATABASE ENTRY DATE: 2002-08-28
gacgccccgtccactcttgtccacgctgcgccgcgcagtgtcgcgcacaccccaaaaccccaaccaaccaaacaacccgacccgcggccatggatgcggcggcgggcggcggcggcgagccttcgccggcgccgggagtgggcggccggaagcacctctcctccatcgccaaccacgtgctccgccaatgctccctgacattggacagaagtgttgatgaattagttgcagactttgagctcggtttgaagactgctgcggtggataactattcaagaagacttgtcgagttctgtatccttcaggcgctgcaagttgttacatctgttgatctaggagacaagatccatgatggatcgcttagtcggttcacatttgatatgatgctggcttgggagacacccactccttcagatcaacaagttaccatggagagcatagctaaagaaagagaggataagaaggagccgctcggagcaaatgaagctgtcatgggcgatgagacctcactgttctattcagatatcatgcctcttctcgtgaatgaagaaccaacagttggagaagatgcatatgtgtggtttggatctgtatttcctttggcgtgcgatgttatcaatgctcgattcacctttgaagccctgactgctacaaccgctaataggcttcattatcctgcttacgacaaattcctgaaagaaatggacaagtcttccgaattcttgcagaaggtgtcaactccaaccggaactgaacttgctgaagatgaattcatcttgcacatcgagggaacagcaggaacacaaagggtggtgcggcacattggaaccactagttggccaggcaggctgactctgacaaacaaggcattgtattttgaggcttctgggaaaatttcatacgaacctgctttcaaagtcgaacttacaggcagtgaaataggaaaacaagttaaaactacttcaactggtccttttggtgcaccattgtttgacaaaggcatcgaatttgaactaccagaacctttggttttggagtttcctgagatgaccagctcaacaaggcgcaatatgtggcttaccctgataagggaagtaatattccttcaccgattcatatcaatgtacagcatagactcccccattcacaaatgggaggtgcattcgagaatcatattgggggtgataaggcttcatgctgcaagagagatgctaaggatgtcgccaccgcctccttctagcttcctagtattctcgctttacgatgagcttcctaaaggtgattttgtgcttgaacaactagcaaataatctgaaagagacgtcagcgataactccgctcagtgcatcccatgtgttcaagggtttgagcaagtcgcatcgggtagctttaagtgcggagatagcaaaagagcatgacaaggactcaaatagccatgaacagcccttggcatcacttgaaaacactatcggtcaagtaagagacgaggctcgggaagtcaccgtcgctaacgttgctatcgaaggaatgaaggaggaaggtatcactgatagccttcttgtactggtggggttagtaagccccatgagcaaattgtttccagtgatccaaaagataatctcatgggagaaaccacttgtgactatcagtgtccttgccatgatggtgttaaccatatacagagagtgggtcggttttgcgttagcggcatccttgatactggcagcaggattcatggtttgggctagacaaagaaaaatcggtgcactatgctcagaggtgatcatcgacacttcatcggacaagacgacgatggaaagcctagtggaagcacagcaaagcctgaaaagagtgcacgagtacatcaagacagcaaatgtcgtgatcctccgagtatcgtcgatcgcgttagcgaggtcaccaaagtgtggaactctggataattttctgagtttgcagcatacagaaacggtgatatggatgctgacagggttggcgctggcgctggccgtgatcccgttcaaatacgtcctgatcggggtgatggccggcggcttcatgtcgaacacgaggatcgcgagagccatgtcgaacccgcagggaagccggcggtggagggagtggtgggagagcatacctgccgtcccagttcgggcggttgacgggggtggtctgtgaagtgttcgacgaaatgccggcagaaaaatcctcggtattgttcagctataagcttaagtgttcatgtatgttttttgctcagagatgtgccatactgccatcatctttatcacctgtcagctggtgtataccagaaaagaaaaatggcagagcacttaacacggaacactttgttggatgtactaacggttaaataactgtcaatgtgtgttgataaataaaggtatacgtcatatattcaatatcc

SEQ ID NO: 26634 - DNA, 2472 bp, Oryza sativa
  ref <308>: DATABASE ACCESSION NUMBER: AK102076
  ref <309>: DATABASE ENTRY DATE: 2002-08-28
gcctctccgctgcgctcccttcccagccggcggcgccaactttagtagccgcaggccgcagccgcccacgaaccgccggcgacgagatccgagaggaggctggccggggctgtcgatggcgtcgtggtgcggcgacctggctgcgccgccccgcctcctcgtcgcccctcgtccttctgatggcaattgtcaagggaatgttttgtctctccgccacccgagatcagatgaagaaacagggtatctgttcatcgacggtcaacttcacgagttcaattggtttaaggagcgatttggatcttggttcttgggtgattatgtttgtgaagatggcagcctctactactgcacagttgttgatcccatttttattcttctaccaattttgaaagctgcacgtatgtcggtatgccaaatcaaatcagaaatatttctaatatgaggttcacattcaacatatttgcctgttgaaaatttgaaaagctagtccctcaacagctttactgtgctgcagaatggtaaagatccaggaaaatttaggcaactggatgaaatattgtatgttgaaggatatcctggatatcaacacctcatgggtatagcaggaaaccatattgatctggtctgtgaagttaaagaagttgctaatgtgaagttctttaggctggacgattccaaggtcttatcttggttgtgctgtaaggttagcttgtgtcagtaattacatctactaactcgatttgcactatgctattccgctgatacttattcttatcagaagctaacccaccttttatctttacttgtccttttcatattacaaaagcaaggatctaacatgaagttagggtggaatgttgcttatgtgggttaggaaaagaggcatcttattgtttttagactgtttgccttgaataaggatgcaacaatccaacaaactgagcacaacattgagaatgttgatgggctaaaacttaattcttccacaccatgttttaatttatatttgtatataaactatgtgcaccaaacattagtctttaagttcactttggttttgaagatgataaataaagcatgaattgggaccctagtgaatttcctatatatttaagaacatgaatgcacatggtcattcttgtaaacgtccctaaataggtgtcagagggtagtggctgctattccttgactgctgtttgtagcattctgcctaccttatgttacaaccttctacaaccattataatgtacggtgtgttccagtactgtttatttgttgcatatttcctgccattttccagttgaacaattttacttcataaatttcatttaactatgttcttgcaaaaatatagctagcatgtgttgtgcccactataacaccactgctatctgctgtaccaacactttgccacatgctacatgcaactcaaaacatcatacaatatttttgcatgattaacctagtaatggctattgttatctgcaagaaacaaatgccactttgggatatcacttagattttttaaaaaattatgctgccttgcaaattcaaaataacagtttgtcttggtagcatcatgagaacataccagttcatgtgccctcataatttatgttttgatacgtcctttagctgtacttaatattcatgcctgtgaatttcgaatcatattgatctcacttcacttgttactctgtagtttcgaaaatactcttatgaatctcatatacaggttcacaatctaaaagaggttttccccaagctaggcaaaaattatgctgcccaaggagaaaaagaattattgaaggatgccgtccaaataattcgcgaatacctgaacgacgaaccatggttaacgttactctgcaagaagttgcagttggatatcaaggagatcattgaagcgaacaaaactagcgaagcttccttctgtgcagagaattctcctgtacctttccaccctgctgaggagaagcttggaagtagtagcactaggtcaagcaaagggaggccagcaaagaaacaaaaggctgaggtagaatcgaagaacatcaaagacatgttccggagggtcacaaggaaaggaacgtgatcccatattatttatagtatgacttggttctgatttcgccatcgagacctcgcaaggcgcttcatattattgagggaaagctgaggttttcagattaaagcattgtttatgcttcagaagcattcgtgcagctaatggaattaactgtttaacaaatttactccaagtctcaactttgttaggtttgaaatgtagcattgcaggcgtgtatttaagtatttgagcaaagagtcttgtactatcctactgatttgtatcgtaccaaccaatttccttgaacatcttggccttgggtcactagagtaatctgaaatggttgttaatgttatttgtgagcttcaacacttcctatttgagaacatttctaagttgttccg

SEQ ID NO: 26635 - DNA, 1401 bp, Oryza sativa
  ref <308>: DATABASE ACCESSION NUMBER: AK102077
  ref <309>: DATABASE ENTRY DATE: 2002-08-28
ggccatatttggacaccgccgcggcggcggagagcgcaaacccccgccacccccctcgccgcccgccgtaaaaccctaaaaccatggccgccgcggcggaggccgtcctcttcctcctccaccaccacctcgccttcttcgggctacgcatctcgccctccgtctccgtcccctcgccccgccgccgctccgccggagaggtggcgctgctcgccgtcgtcgtcgtcgccgcgctcctcaccgccaccacccatgccgcgtccgcaaccatcgagtcgcgccccgccgacgccctgcggtcggaggtcgacgagctcaggctcagggttctgcatttggaatctttgttggaggaaaacacaaaaactttgaagagtaaagcaaacaatttggaagagaacagcaatcttattggaactatggaacatgatattgagattttaatgaacaaatatgagagtaccaagaaatctcaaagcaaatcctacccagaaagcaatgtgaaagctttggaagatgaggtgcagctcctctggagagtggtcagaaagatgaatgagaatgctgactcaatagaatccctagcaaatggtgctgagaaaagggttgaatctctgagttcagaagtcaaaaagatggaaggtgtaattgcagaacaatggatccaaattcggcaacttgaacaggcatttgtgttgacgaagatgatgacatcaaaagttcatcaaagaagcaggttatccgagactgcttataaatggcctggaaaagatttagtccttaagtatttcaggaatcttcatggcacttttcttatgggggtatcatacacaaagtcctgcttttctcatacatataaacatggcaggagtttcatacaagcaatgaacagaccctaccatgaggtatcacggttctgtaaggcaatatgtggccagcatattcgcgatgttgataagcctaatgtcttcttcttgggtggatccatctcccgatcatgtatttctgcaccttataaacaactcaagattttcatgttattggctcaaaattttcatcataaggtccagatatttctccaggatgcaatgagatccaatagttacagtagaggtttcgcaactgagataattacgttctgcttggcatattttgttgttatatctccaatgtggattctgtggttcctctattcaacgcgatttggctcaaaggaatgaccagttgccataaaacaagagttgcatatactgttttcatgtttttacattttacaagtatagaagagttgcatgagatggtggaaaatgcgtataattatatcttgtaatttatatcgagcacattgtatcacattccccatggaacctcccctttgcggggtggtgtatttataccccc

SEQ ID NO: 26636 - DNA, 3888 bp, Oryza sativa
  ref <308>: DATABASE ACCESSION NUMBER: AK102078
  ref <309>: DATABASE ENTRY DATE: 2002-08-28
gtgatttggggaaagttgttgcgcacagcacacattctctttctgaaacgctcgaaatcccccaaaaattggcccccctcgctcgtagtccggcgtccggcgatggctctcccctcgcgtcggtgggcaggggcggtggaatccggcgtggatccggtggcggaggcttgggcgaagctgctgcggtcgctttcccaggccatggcgcggctgagggtgcagatggagtcgttcgacgatgcccagatgaggtgggcgctggccgccggtgtccgagccaaggcgcagctgctggctagccgcctggctcagatcctcgccctcttctgggacgaggggcagcgcgcggcgctcccggcctgcgtgcgggatgccctgtacggcatggaagacatggtcgacgatttggagtaccacatgctcaagttccagcctcatcaacaagaggtcagatgcaatctgctcatctctcttgtcaatctccgctaccggctcatcatcagccacgcgtctcgctcccgcttcctcaaggatttggatttcgttgcgagcgaggcaggcagcctcctctccgcgatgcataagctcgagcccaccgctccgtcgctccctgccctgctgcttgctgacgacgatcatcaggttgtgtttgggcgccacaaggaggtcactgacattgttcgaatactcattgatccgccggcaagccaccaccaccaccctacttacgacatcctcccaatcgttggcatggggggcgtggggaagaccacactcgccaagttagtctatgatgatgccaaggttaagcagcatttcgagctcaggctctgggcgagtgtctctactagtggagggtttcacaaaattgacatcaccgaacaaatcttgcgttcagccaacccaacataccctgcttctattcacagtgaacctacgcttgacatgcttcagttccatctcagccaactggtagcgtccaagagattcttgcttgttctcgatgacatcagggaggagtccttcaccagcatggcctgccaagagatcctcagtcctctatcatcggcagaaaaggggagcagaattctggtgactactacaacagcctcagtgcctgccatgctgggggcatcttgcacataccacctgaatgtattggacatcgaggatttgtggtccttgctcaagaaatatgctttccatggaggcccaactcatgattccacccaggagcttgaagaaattgggaggaacatcgcatccaagctcaaaggattgccattggctgccaagatgcttggggggctgcttggagctacaaagagcacaaagacctggatgaatgtcttggacaaagaactttatggcgatagtattcttcccgtactagaattgagttacagttacctgcctcgacgactcaagcagtgcttttcgttctgcagtttgtttccgaggaactataaatttaacaaaagagtgttgatccagctttggatggcccaaggttttgttcagtcacagaacagtgctgacaaaaatatggaggacctggcagaagattattttgaggaacttctttcgcgatccttctttgatgtacgcagggaagcgtgtgaaacacactacgtgatgcatgaccttgtccatgacctcgcgcagtctgtttcggcagatcaatgccttcgtgttgagcatggcatgatttctgagaagccatcaactgctcgctatgtatctgtcacccaagatggactacaaggccttgggagcttctgcaaacctgaaaatttgcgtaccttgatagttctaagatcatttatattctcctcaagttgcttccaagatgaattcttcaggaagataaggaacttgcgtgtcttagaccttagttgctctaactttgtacagttgcctaactcgattggtgaactagtgcacctgcgttacctatctctccctcgcaccctcaatatgcttcctgagtcagtcagcaagctactgcacctcgaatcattgtgctttcacaagtgttcccttgaaaagcttcccgcaggcataactatgctggtcaacttgcggcaccttaacattgccacaaggttcattgcacaggtgtccggcattgggcggcttgtaaaccttcagggatcagttgaattccatgttaaaaagggggtaggatgtaccttggaagagctgaagggcttaaaagatctccgtgggaaactaaaaataaagggccttgataatgttttaagcaaagaagcagccagcaaagccgagttgtacaagaaacgacatcttagggagctcagtctggaatggaactctgcaagtagaaatctagtccttgatgcagatgctataatattagaaaacctacagccaccctctagcttagaagtactcaatatcaataggtaccaaggtgccatatgccctagttggctgcagttatcatcacttaagcagcttcaatccttggaccttattaactgcaggaatttggagatcctacctccattgggactattaccgtcactcgaatatctatgtatgaaggaactgtgcactgttaatcaaattggacatgagttctacggcgatgatgatgtaccatttccatccctgataatgcttgttttcgatgattttccaagtttatttgattggtctggtgaagtgaaaggcaatccgtttccccatctccaaaagctaacacttatagactgtccaaatttggttcaggttcctccattgcccccttctgtcagtgatgttacaatggagcgtacagcattgatatcctatttgaggcttgccagattgtcttcgccaaggtcagatatgctcacgcttgatgttcgtaatattagtatactttgctggggactgttccatcagttacatttggaatctgtcatatctttaaaaatagaaggtcgtgagacaccttttgccaccaaaggattgtgttcgtttacttctcttcaaaggcttcagttatgtcaatttgacttaacagacaatacgttaagtggaactctctacgcgcttccttcgctatgctccttggagatgatcgatctgcccaatataacatccctttcagttccatcagacattgatttcttcccgaaacttgctgaattgtacatatgcaactgtctgttgtttgcttcccttgattccttgcacattttcatttccctaaagcgattggtgatcgagagatgccccaaactgacagcaggatccttcccagcaaactttaagaacctcacatctctcaaggtactaagcatatcacactgcaaggatttccaatcttttcctgtgggtagtgtaccaccgtcactggaagcacttcatctcgttggttgccaccaaagttaactgacaatgtggtgtcaagaaaaatgctccttaacacaccaaagctcactgatggaccatgaaggaatcaggaaatgttcctcgactcttcgaacacagaaatatgcattttcactagtgatgatatgaaatgtttcccaagttgtatctgcctaatagatgataatcaagccaaccactagcttgatggacttgtaacataggctctataaaatggtttcactagttgataaattttactcaaatccatggctttcattagatatggccgcatattcgttgtttatggattaggaatcagatatgtgtatactagtcatagaggtgtaccttctacaaatttgatgaaaaactctcaacccctataaagggttatacacaagtttgaactgtacattaagttcttttagtggttgctaagattgttcgcagctctctagttccgggaaaaaaattgctcaatggctatatagccatgagctaacc

SEQ ID NO: 26637 - DNA, 796 bp, Oryza sativa
  ref <308>: DATABASE ACCESSION NUMBER: AK102079
  ref <309>: DATABASE ENTRY DATE: 2002-08-28
ggcacccaaatccattcccacccaccggattcgcatccgccgctgctggccccgtcgcctcgccctccgccaccgccgccgtgcttgctctcctctccctcctcctccagatcggcccgatcccctgcccaccccccctccccgatggaggccaagatcgggaagctcgtcgagtcggtggggagcttcttctccggcggcgacaccatcccctggtgcacccgcgacatcatcgccggctgtgaaagggaggtagctgaggctgcaaatgaagagcagaagagtgatagcattatgaggctgtcttgggccctcgtgcattccaagaatcaggaggatgtaaatcgtggaataggcatgcttgaagcatcattaggtcaatccaacagcccactgcagactagggagaagctatatctgctggcggttggacactacagaaatggtgactacccaagaagtcggcagcttgtggaccgttgtttggagattcaacctgattggaggcaggctttgtctctcaggaaggctatagaagataaaattgccaaagatggtctgatcggaataggcatcgccacaactgctgttggacttctggttggtgggattgcagctattgctgcaaggaagaagtgagatgatatctgcttgctgatgtagtaaccaagtagatgtttggcttgtttgttcttttttcaattcgtggtattccagtcgagaatcgccacagtaatgtgcataaaacaaattgatgaccatggtactccggatgcaacatgtacctttcctttcc

SEQ ID NO: 26638 - DNA, 2953 bp, Oryza sativa
  ref <308>: DATABASE ACCESSION NUMBER: AK102080
  ref <309>: DATABASE ENTRY DATE: 2002-08-28
gtgaaagagaagagagagagatcccctctcgcctcgcctcctccctcctgcctcctcgatcccgatctctcctcctccgccgcctcgccgccgccgccgtggacgcctcaagggctgatggaaaatttctccccgagaaccctgctcaatagtatcttgcgtatcactgtcttaacctccgatggctctactgcaaggcccaagcccattcagaagtactgccaaaatgtgtgtgatatctcaagcattgtgagccctctcatagaggatctatgtgagtctcctgaagagcaactcaatgaggtgttaagggagcttggcactgctattaacagagcttcagggcttattgggaactggcaacagacaaccagcaaaatatattttatatggcagattgaatcagtaatctcagatatccagggatgttctctacagctgtgccagcttgttaactctctattaccttctttgactggccgtgcatgcacatgtattgagaaactccaagacataaattatgaaaacatgtttgatctggtaaaggagtcttcattggagctagttgagacggacacaacaagtcctgagaatctgtcgagactatctagttcattgagtttgtcaactaacctggaattttacatggaagctgtttcccttgagaatctcagagcaagggcaatgcggagtgagaaccgtgaagaaatggatctggctgacaagatgatccccctggtcaactatatgcatgaccaccttctgagggaaacacaactgcttagcatcaatggggtgcccattcctgcagatttttgctgcccgctgtccctagagctggtgtcagatcctgttattgtagcatctggtcagacatatgagcgggtttatatcaagttatggcttgatgagggttttactatctgcccgaagacacgccaaagacttggtcactccaatttaattccaaattaaaccgtgaaagctttgatagctaattggtgcgaatcacacaacattaggcttcctgatcctatgaaatccttgaaattgaacttccctttggctgcgtctgctctccaggattcgagcaccacaggaagcagccctctacatcctactgtcgctgctaagggtaatattcctgggtccccggaagctgacctttatatgagaagcttgaatagagcatctcctccacacagtgtagtccatcagaattctcatgcgcatgtgaaccgtgctggtcatgaagcctccattaagcaatcttcagaaaatgctaatggttctgcatcagatgtttcaaggttatctcttgcaggttctgaaacaagagagtctagtctggaagaaagaaatgctggttctatcggtcaaacttcagaacagtcaattgaggaagcatttcaagcatctaatttggacagggattcacatgaccatgtgggtagttcttcggtgaatggtagccttccaaatagcggtcaacttgatgcagaatgtgacaatgggccaagcgaaaggacaaattacagtagtgatgcatctggagaagttacagatgggccttcagcatcttctgctcctcagagggagcatctaatcccttctagattggctgatgttcgtagtagaggccaatttgttcggcgaccatctgaaaggggtttccccagaataatatcttcctcatccatggatacacggagtgatctttccgccatcgagaatcaggtccgcaagttagttgatgatttaagaagtgattctgtagatgttcaaagatcagcgacatcagatatccgccttttagctaagcacaacatggagaacaggatcatcattgcaaactgtggagctataaacttgctggttggtcttcttcattcgccagattccaaaacccaagagcatgccgtgacagcccttctgaatttgtcaatcaatgataataataagattgccattgcaaatgctgatgctgttgaccccctcatccatgtccttgagactgggaaccctgaagccaaggagaattcagcggctacattattcagtctctcggttattgaagaaaacaaagtgaggattggaagatccggtgccatcaaacctctcgtcgacctactaggaaatgggacccctcgaggaaagaaagatgcagctactgcattgtttaatttatccatattacatgagaacaaggcgcgtattgtgcaggctgacgctgtgaagtacctagttgaacttatggaccctgctgctggaatggttgacaaagctgtggctgttttggcaaaccttgctaccataccagaagggaggacagcaattggtcaagcgcgtggtattccagcccttgttgaagttgttgaactcggttcagcaagggggaaggaaaatgcggctgcagcattgcttcagctatgtacaaacagcagcagattttgcagtatagttcttcaagagggtgctgtgcctcctctagttgcattgtcacagtcaggcacgccacgggcaagagagaaggcacaggctcttctcagctactttcgcagccaaaggcacgggaattcagcaaggagatgaccttctcagaattttttgtaggtatacattaagcatctcctctgattccttcaggcatcggcttggctcctcatattgttgttgttggctcttgggtggccctatgtattgtttatagtcaaattgagattgtgctcatgtcatacaaatgttgtgagcgatgggttgggtgtttgttgttgagatggtgtaacttttggttctcttttcttttttgaaggatatctttgttcttgtataggttgtccattggtagcaacttacctattcaatgggattttgctttgtatatgctattaaccctgacattatgattgttttgaatggttgtaaaattcgatattgccctgcatgttgtacc

SEQ ID NO: 26639 - DNA, 2083 bp, Oryza sativa
  ref <308>: DATABASE ACCESSION NUMBER: AK102081
  ref <309>: DATABASE ENTRY DATE: 2002-08-28
gccctcctctgactccaacccccgcaaaccccaatccgccgccgcggcgatcgccatggccgcctccgccgctgcttcccgcgcgcaacgcctatctcgcatcttctcctcttcttctccatccgtgcgaccacccaagcccgggcaggtcaaggaagcaccaaagcccgcgccgaccaagaaagctcctgctcccggcgccgaggcgaaccccaacttgcgccggaatgccatcgacgacatcatcaagggcctcttgcgggagcgcgacccggacaagctggtgtccgggttcatcgccgcctcgtccacgcacccgcgcttccgtgcccggcaccgcgtgtacgacgtggccgtgtcccgcctcgcgaccttcggccgcctggacggcgtcgaggccatcatcgacgcgcagaagcccttcctggagacctccaaggagggattcgccgcgcgcctcatccgcctgtacggccacgcatccatggcttcccacgccgctgcgacgttccatgacctccccccgcagcttaagtctaccatgaccttcaactctctcctcgcagcctacgtcgaggctggagagttcgaagcgcttgccgccgcgttcaaggagatcccagtctccaacccctcggttgtacctagcgtgtactcctataacatactccttcaagcgctatgcaaggtgcccgacctctcggcggcacttgatactatgacactcatggagaagtctggaatttcacccgatctggtcactttcaacacgctattgaatggattctacaaccatggagacatggatggcgctgagaaagtctgggagatgattacggagaggaatatggtgccggatgcaaagaactataatgcaaagttgaggggccttgttgcgcaagggaggattgaggatgcagttgcagtggttgaaaaaatggagaaggatggaccaaagcctgatacaatatcctacaatgagttgattcgagggtattgcaaagatgggaggttagaggaagccaagaagctgtttgaagatatggcagaaaatggttatgttgcgaatagggggacatatcataccctcataccatgtcttgtcaaggctggtgagctcgattatgctctgaagtgctgtcatgagatatatggtaagaaccttagagtggactgttttgtgctgcaagaggtagtgactgcattggtcacggcatcgagggtggaggatgccaccaagattgttgagcttggatggaacaactcctacccacggaggatcttgaatattccacatgctacagagaaaaacaaggaagaatcaatttcagaagaggaagaggagcctgaaaatgcttgacaaggatgtacctccatgtgttcttctctgatcagtcttaccgatggttatcattttgctatagtatactagtctgctgttgcggacattggaagtatctcatattgtcacaaatgagatgtcgggtgtgtatttgtctctatcgctatattctggaaaactagaaacatctgagctatgttgttattcaagccttccacagatcttgtgcagatgtctggattttgttggtgcagatgctttgtttggcatgggccaaaatgtaacgattcctgtcgatgggctaggatttgagcttaattctcggcctctagtgaactgccggggaccgcgccaaacaagaaggtcagtccaggtctccaggacatgtttggttcagtttcaaatgttgccgcaccattgttgccaaaacaaaaatgatgacatggaatctcaacagtcatgtgcaaaattgttttacttcctccgttccaaaatataaaggattttggatggagatgtgtcccggattttggatttggacaggaagtttgtccatattctagtactaggatgtgttccgtccatccaaattctcttatattttgtgacggagggagtaattgaagtgtttaagaaaatgtgctaaattctatgactttttaacctgtaaactgcaagggatcttatgtggtttgagtttcattcaacaaagatatgtagaggaaaaaaaatatgtttttg

SEQ ID NO: 26640 - DNA, 2638 bp, Oryza sativa
  ref <308>: DATABASE ACCESSION NUMBER: AK102082
  ref <309>: DATABASE ENTRY DATE: 2002-08-28
gccatttgacggaggagcggaagtgaacaaccgcgccacgccatggggcgaagcgagtcggcgtccgcaggatttccctctccgcccgtgccctaaaccgctcgccgccggcgacgttgcgcccccgaccgcgagtgggccggcggcgatgtccggccccgtcgttcccctcgcctggacggctcaagggccctgcgagccctcccctggctctggcccgctccccgtttccgccgccgctagcgatccgccggcgccctcctcgtcggtgcccgccggcggtcgtgagccctccgctagcgggctgccccccgcggtgactcctcagcttggggatcatgatcaaggtggtttacctaactgtgtgccaaaagtggggatgacctttaattcagagaacgaagcttatgatttctacaactcctatgctagaaatgttgggtttagtatccggaagaaccacgcaaatactagggcggatgggagtctttgctccaaatatttcctgtgcagcaatgaagggcagccggtggcaagcactacccagccggggcggaagaaacgttcttcaacaagatctgattgcaaggctcgtcttcagttctatatttcccgagaaggtatctggacagtgcagaaggttgagctcgatcataagcactatctcgtaagtcctgataagtcacacatgttaaggtcccagcgccgtttgacaccgtcatatcaacagatagtgaatgaaatgcggcaagaaggtattacagcagctgatatgcaaagagtatttcggcaatggtccaggggagctgaaaatgtgcatcttctgaagaaagatactcagagaaagtacctccaaccaagttatgcacagaaattgcttgagtatttgaagaacaaacaaacagaaaatccttcatttttttatgcagttcagctgaatgatgatggtcgaatagcaaacttcttctggacagattgtcaagctattgtggattatgcttgttttggtgatgtcgtgtcttttgatacaacatttgaaacaaacaagtttgaaatgccgtttgctccatttgtggggactaaccatcacaaacaaaccattttgtttggagcttcgctgatatatgatgaatcttcagagtctttcaattggctgtttcaaaccttccttacggcaatgtctgggaagcaaccggcaacaattttcacagatccctctgctgaaataataaagtctgttaggttagtgtttccaaactcaagtcaccgcctgtgtttgcggcatatctgtcataatgctgttaagcatttgaatcacgtaatttgcaaccatccagaatttctatctgattttaagagacgtatctatgaagaaaggtctgtaacgttctttgacttgaagtggaaggaattggttaacgcatataatctagacggcaatgattggatgaataatttatatgcaatgcgtgaaaagtgggctgctgtgtattcccgtgactcattttacgctgacatgatgacaatccaaaatgctgaaggcacaagtgatgcattgaagaattttcggaggaaactctgccttccagaattcttagaggagtatgagaagtgcataactagtttccgccaaaatgaactagaagcagattataattcccgtcaaaccagtccggttccctatgttcctgatttgcctatgttgaagacggctgctgagtcctatacaaggaatttgtattcgcattttgaagaagaattcaaaaaattgttcactctgtcttgttcgttgctatcacaagacagaacaatcagtacttacaaattgacacctttaaattctgaagaagaagcatatgttgtttttaattctgaggatacaacagtatcatgttcttgcaggatgtatgagtgcacaggtatgctatgcaagcacgcgctgcgagtccttaactacagcaatatttttacattcccctcacactatgtttacaaaaggtggacaaaatatgcaaaagccggactatttggctgcagaaacaattcccaaagcggcaatggaagttcgatgttaagatgtgcgcgtatatctcaaaagatgcactcagttgctctaagatattcgatgtcagaaaaggcgcttcagtttttggaaagtggggtagataagttgacatgtgaagtagaaaatttacttagtcacataaactaaaatggaaatggaaatgataccggtcaatcttctggtttttgcaatggtgcaatggcagaaagtttaggccattcagaatcaatgtacagcgaaggggcctaaccgcctaacctgcaaaaatactagaaaaaagtgttctcaaggaggaaaatggaaatgcactgctagaaggagaggcacctacaatcaactgttattttctgtttatgttaaattcaaatctcagttcttaactgtgtgaggcactactccaaaaaggaaaaaaaattcaaagagaatcatgttggtctcatcatagatagagggcatccaattctctagttgctgtagttctcttaactttttctcctctttgttcagggatgaatcatacataattctgggcatatcatcagctctccatctacttggagttaacttcctacc

SEQ ID NO: 26641 - DNA, 2159 bp, Oryza sativa
  ref <308>: DATABASE ACCESSION NUMBER: AK102083
  ref <309>: DATABASE ENTRY DATE: 2002-08-28
ggtcggcttcctctcgccgcacccatcgatatccatctccatctcatctcgccacccaaaaccctaaacctccctcccatttccgccgccgccgccatgcagtcgcttgccctcacctccccctcccttccggcgccggcgaccgcatccggccgccgccgccgccgcctggagcgcatccgcgccaccgcggtgtccgacgagccgaagctgaacaagtacagcgcgcgcatcacggagcccaagtcgcagggggcgtcgcaggcggtgctctacggcgtggggctcaccgacgccgacctccgcaagccgcaggtgggcgtctcctccgtctggtacgagggcaacacctgcaacatgcaccttctccgcctcgccgaggccgtcagggacggcgtccgcgaggccggcatggtggccttccgcttcaacaccgtcggggtcagcgacgccatctccatgggcacccggggcatgtgctacagcctccagtcgcgcgacctcatcgccgacagcatcgagaccgtcatgggcgcgcagcactacgacgccaacatctccattcctggatgcgacaagaacatgccaggaacaataatggcaatggggcggctgaaccgaccaagtatcatgatatatggtggaactattaagcctggtcattttcagggtaattcttatgacatagtatctgctttccagtgctatggagaatttgttaccggatcaatcagtgatgagcaaagaaagaatgtgctccgcaactcatgcccaggagcaggtgcgtgtggtggtatgtacaccgcaaatacaatggcatccgccatcgagaccatgggtatgagccttccgtacagttcttcaacccctgctgaagacccactaaagctagaggaatgccgtcttgctgggaagtatcttttagaattgttaaagatggatttgaagcctaaagacattatcactgagaaatctttgcggaacgcaatggtcattgtcatggcacttggtgggtctactaatgctgttttgcatttaattgctatcgctaggtctgtaggtctgcaattaactcttgatgattttcagaaggtcagtgaccaagttcctttccttgcggaccttaagcctagtggcaaatatgtcatggaggatctgcataagattggtggaacacctgcagtaattcattatcttctggagcaaggtcttcttgatggtgattgtatgaccgtcactgggaaaactctagcggaaaatgctaaaatcttccctcctctgtccgaaggacagcaaataataaggcccctggacaacccaatcaaatcaactggtcatatacaaatactttatggcaatcttgcaccagaaggttctgtagcaaaaattactggcaaagaggggatgtttttctcaggccctgcactagtgtttgagggtgaagaatctatgattacagctatatcagaaaacccagcgaatttcaaggggaaggtagtagtgatacgaggagaaggaccgaaaggtggaccagggatgcctgaaatgctgactccaactagtgcaataatgggtgctggtcttgggaaggagtgtgccctgctgaccgatggcagattttctggaggatcacatggatttgttgtaggccacatttgtcctgaagcacaggagggaggtccaattggtcttgttcaaaacggtgacaaaattaccattgatgttgtgaagagagtaattgatgttgaactgactgaagctgagctggaagaaagacggaggaaatggacgccgccgccacacaaggctgcccgtggagcgctttggaagtacacgaagctcgtgtcccctgcatcaagaggatgcgtcaccgatgagtagatcctgctgctgctgctcgagtaataaaaaataaaaaataaaaaagaggaggaataggaggaggtttttgaggaacagtttgcatgtaacagtagttcatggtggtgattggtgaaggctgattgtgatggtagttcccttcaataaaatggcagtttcctaggtgctcaagcaatgccgagggaactgcttgctgaataatccattgtctgttgctgtgttggacaagttttgtctgaaaatcgcctgatgcttgagaaaaaaaaaaccggtactgc

SEQ ID NO: 26642 - DNA, 2930 bp, Oryza sativa
  ref <308>: DATABASE ACCESSION NUMBER: AK102084
  ref <309>: DATABASE ENTRY DATE: 2002-08-28
gagtcacccggcccacaggccacagctactagcagcagcagcaagactgcaagagggggggaagaagctaggtagctagtagtacgatgcagcagccgcaggcgagcagcatgacggcggcggcgaggaggcggcagctgcagggatcggtgctcgccgggaagatggtgctcgtgcgcaaggctctcgacaccaacttgaactccggcgacgtcgtgtgccagctcgtcagctccacggtcggcgaccccgacaatggcaacagggggatgttgggccaggaggcatgcgtccatatcaactcggagctacacccaactccctacgaggcctccacattcagcttcgagttcatctgggacatgaagaaacagggtgtccccggagcggtcatcgtcaagaactattgcgacgaggagttcttcgtcaacaccatcaccctcgacattgtaccgggctatggaaccatcgtcttcaccgctgagtcgtgggtttaccccgacgagatatacgaccatctgccccgtgtcttcttcagtaaccaaccatacctgccaaaccaaatgccggcgccgctggtgccgtatagggaggaagagctccggaacctgagaggcgacgacaatccgggcccgtacaaggaccatgaccgtgtctaccgctacgacgtctacaacgacctcggcgagccagacagtggcaacccgcgccccgtgctgggtggctccgacgagcacccttaccctcgccgctgccgcaccggccggaggcggaccaacaccgaccccgactccgagagccgcaacgtcggcttccccctaaccaaccatttttacgtgccccgcgacgaggtgttcaacgaccgcaagaaggcctacttcgacaccaacaacctcaagctctatatcatgcaaaagtacgccacctttctcttgcacgccgaccagcagacccccttcgagttcgacagcttcgccgacgtgctaagcctctacgacgagggctccatcaacctgcccggatggctcaacactttcctccaaccattgctcggcataatccccttcaagttgctccagcaagtcctcacccccgatagcgagttcatcctcaagttccccatgccggcggtcatcagggaggacaagacggcatggcaaacagacgaagagtttgcgcgcgagatgctcgccggcaccaacccggtcgtcatccgccggctcggggaaaccgagttcccgcccaagagcaagctagacacaagcaagtatcacaaccagaacagcaggatcacagcggcacacgtcgagaagtgcctcgaggtcgagggcctcaccgtcgagcaggtgctagccgacggccgcctcttcatcctcgaccaccacgaccacttcatgccgtacctgctcgatgccaaccatcaacccgacactttcgtctacgcgacgaggacactgctcttccaccgcaacgatggcactctccagcctgcagcaatcgagctcagcctacctcgctttgaggccggcagcacactcatctcgtccgtcggcgaggtttacacgccggcgtcagacggcgtggagggccacatctggcagcttgccaaggcctacgtcaccgtcaatgactactcgtggcaccagctcgtcagccactggctcaacacgcacgcggtgatggagccgttcgccattgccacgcaccggcagctcagcgtggcgcaccctatccacaagctcctccacccgcactatcgtgacaacttgtttatcaacgccctcggccgccagagtctgatcaacgccggtggtagctccgagaacaccgtcttcctcggcaagtatgggctctccatgacatcggaggtgtacaggaactggaacttcaccgagcaggcgctcccggaggacttcatcaagaggggcgtcgccaagcgccgctccaatggcgagctggagctgctgatcaaggactacccgtacgccgtcgatgggctcgccatctggtcggcaatcgagacttgggtccgcgactattgtgccatctactacgcggacgatgcggcggtccagggcgacgccgagctgcagtcgtggtggaaagatgtgcgcgaggaaggacacggagacctcaaggaccacaaatggtggccggagatgaagacggtggccgagcttgtccagtcatgcgccaccatcatctggatcgcctcggcgctgcacgcggccgtcaacttcggccagtacatgtacgccggctacgtcccgaaccggccgtcggtgagtcggcggccgatgccgaagccgggcaccgacttgtacagggagctggagctccacccggagaaggaattccttctcaccatcactaagcaggacctgtccatagctggcattgccctcgtcgagctcctatctagccattccgatgagcccctctgatccatctccagtacttgctcatgcacatagtactgcccaatcgccagctgtggcccctgctcctcactcatttctattgcagcatatgccacgcggcagcattcgtgtcaatgggctcttgcattcctgttgtgcatgctaatgggtctaccataaggagggcagactatctaaacagaatatatactccaaaaataagcagcctcaccgatcaccggccgtcttcagaagataactgaagttgctcatgcgcgaaattgcgcatccaggtcaggtgggtggtgtatattgtgttagaaacatgtaaatatgggcggggcaaatgcaaaaacaagcatacctgtgtgtagtggtcaaagccaaggaggtggcaggccccttctgttgttgcacaggtgaagctctgtcctgcgtttgcagtgtaatagtgctgaaaaatgatggtggaatccaatattagatgcttataccgttttacatgggagc

SEQ ID NO: 26643 - DNA, 1708 bp, Oryza sativa
  ref <308>: DATABASE ACCESSION NUMBER: AK102085
  ref <309>: DATABASE ENTRY DATE: 2002-08-28
ggtctcgtcccattctgcagccgccgccgcggcacactgaaccgaggcgaggtcttccccagccaccgccggagccgtggtcttccccatccgtcgcggccggcagcagcaggagccgacgtcgtcctcatctgccgccgccgctgcaatccaccgctaccctcgaggtcgtcgccttcttccgccgccacacactccgccgtcgccgccacggattgaaccggaggcgaggtcttccccagcctcccacggagccgaggtcttctccatcagccgcgcactccaccgtgatttctccgcccatccgctgctccatcgtgatttctccgccgctgcaacctctgccccaccgatcgcaccccatcgcatcgccggttcctcgcgcttgttgccgagtccgagtcgatccgattggttcctccgttgaggttgcccctgccaggaaggccaagccgatccagcatctgctccacctactggcccctccccgttctctgctcctgacaccgtcggacatcaaccacaggccaccagcaactgcacctgcaccttgatgctcgcatgattgtgatgacacataatctcgatctgcaactcaccgtctccattttctcaagccggaacattggggacactccgtattatggcaggagcagcgtggagtcaaagccctgctccgtagagggctcgaggctgcgcggatctggccgcttcggccgcccggcccactcaaccggcttgcctgcaccatgattgctctctcagcaatcgcccggcgactcgcttcctctctttgaacacagctggggtgtgcgacatggctatggtggaggatctgcccccacccaggtgaaccctcactttagactgtagattgcaacagctgtatgtaaattacaataacgatttctctattaactattatgatgaacctgcagtttaatctgaaaatttaggcaaaatgtaaccgttgcagtcctttgttttccttctcaaacacaccgttccagtcttttggaatgaccctaaagctgaccaatcacctgtgtaggaaccctctactttgcagaagcagaagcgttacttggcatatatactttgcagaagcagaaacacaacttggcggtggctggtttatttagcaatctctagttggctttgatggccagtgtggtaattaatttcagaaatctccgattcttgttgacaaattttttttttgcaggttgaacatggtgatttcagacattaatcaatgatggattatctgcttgcctattctttctgttacatcagttgtgggatgtttttctgttaaattaatctaggttgctctcttgatctggtctagacagatcctaagcaaaggttgcaataaggaaaacaaaaggaaaagatgaacactgtttactacagcggaatctttgtgctctttatccaatctgcagagatgtgggtaccaaggagttgtattgttatgaatatttgacttctttatttttccagtttattgatcatcttacatatttaatgatgttataatatttaatgatgaatatcttaaacacagggaataggtccccatcatagcaataagcttatgtattatgtttaaaaaaacaattctacatgtgtaaagctttgtgatcttataagcaactagagaggtaaaagcacatggtaaacctgggctcttattcatactttt

SEQ ID NO: 26644 - DNA, 769 bp, Oryza sativa
  ref <308>: DATABASE ACCESSION NUMBER: AK102086
  ref <309>: DATABASE ENTRY DATE: 2002-08-28
gacaagctaattaaagcagccttagctagctaattaactctactagcctaagctcgatcacttcatcacacttgagcaatggccttattccaagatcgctcccctcctcgccctgaccatcctcctcttcgccgcggctgcgcacggctgcgcgccatactgccccggaggggcgccgccggtcatcccgacgccgccggtggtggtgccgacgccgccgtcgcaccaccaccacggcggccacggccatgggcgctgcccgatcgacgccttgaagctgagggtgtgtgccaacgtgctcaacgggctcgtcggcgtcaagatcggagctggccccgacgactgctgcccgctgctgtccggcctagccgacctcgacgccgccgtctgcctctgcaccgccatcaaggccaacgttcttgggatcatcaacctcaacatccccgtcgatctcagcctcatcctcaacaactgcggcaagatctgtccctccgatttcacctgctaattaagctcagctgctcaagcttgcatacatggacaaatgcgcagaaacaatattcgtaattaagcttatctatttcattcgatgatggctagctagctagctgcatgcatgccgtggctatgtcatccagaataagatgtgttgttgttttactctgttcccttatatcaattttgtattgtgttgtattgtattcgaattgaatgagttaacgagttttgtaaaaccgatttgtgcttcatcaatgaaatatctgtggtg

SEQ ID NO: 26645 - DNA, 3230 bp, Oryza sativa
  ref <308>: DATABASE ACCESSION NUMBER: AK102087
  ref <309>: DATABASE ENTRY DATE: 2002-08-28
gcattgtaatgagtacattgatgcatatagaaataaaacaaaggatagcccacacgtttatgcaatagcagattcagccctccgtgaaatgaaaagagatgaagttaaccagtctatcatcataagtggtgagagtggagcaggaaagacagaaactgcaaagattgctatgcagtatttggcttctcttggaggtgggggtggcatagaatatgagatcctacaaaccaacccaatactcgaggcttttggcaacgcaaagacactaagaaatgacaactcaagtcgctttggaaagctcattgaaattcattttagtacaactggaaggatttgtggtgccatgattcaaacatttctacttgagaagtcaagggttgtacaatgtgcagttggcgagcgctcctaccatattttttatcaactatgtgccggtgctcctgcgtccctcagagataagttgaatatgaagaaagcggatgaatacaaatatttgaagcagagttgctgctattcaattgccggtgtggatgatgctcaaatgttccgtactgtaacggaagctatgaacatcgttcatatcagcaaagaggaccaagataatgttttcacgatggtttctgcaattctatggctaggagatgtctctttcacggtcattgacaacgaaaaccatgttgagattgttgtagatgaagcggcagaaacggtcgcaagacttcttggctgcagtattgaagatctcaatttagctttgtcgaagaggcacatgaaagttaataatgaaaatattgtacagaaactcaccctttcacaggcaatcgacacaagagatgcgttggccaagtcactctatgccagtttgtttgagtggcttgttgaacaaattaacaagtctctttcagttggcaagcgtcgaactgggagatcaatcagcattcttgatatctatggctttgaatcattcgataggaacagttttgaacagttctgtattaactatgctaatgaaaggctccaacaacatttcaatcgccatttgtttaagcttgaacaagaggaatacgttgaagatggcattgactgggcaaaggttgagtttgaggacaatcagaactgtttgaatctctttgagaaaaagccactggggttgttgtctctgctagatgaagaatctaccttccccaatgccacagatcttacttttgcgaacaagcttaagcaacatctgaacaataattcttgcttccgaggagaaagaggcaaggcttttgcagtccgtcactatgcaggagaggtggcttatgacacgtcaggttttctagagaagaatagagatttattgcacatggactcaattcagttccttgccaaatgcaaatcctcactaccacaaatgtttgcatccaaaatgctttctcaatctgataatccgttacctgttccatatagaaatagtgctgctgactcacagaagttaagtgttgcgatgaagtttaagggacaattgttccaacttatgcaaagactcgaaagtacaacaccacactttatacgttgtattaagccaaacaatttgcaactccctgcaatttatgaacaaggacttgtgcttcaacaactcaaatgttgtggggttcttgaggttgtccgaatttcaagatctggatatccaacaagaatgactcatcagaaatttgctcgacggtatggctttcttcttcttgaggatgtcgcatctcaagacccacttagtgtttcggttgcaattcttcaccagtttaacattttgcctgagatgtatcaagttgggtacacaaaattgttctttcgaactggccagattggcaaacttgaagacactcggaaccgtactctgcatggtattttaagggttcaaagctgtttcagagggcatcaagcccgtcgccatgcaagggaacgaataagaggagttttggctcttcaatcatttattcgaggtgagaatgcaagaaaaatgtattcgtctctggcaaggaaacacagggcagccattattttacagagaaatctaaaatgctggcttgcaagaagatatttcgttaacatacggaaggcttcagtagtaatacaatctggcattcgtggttgtcttgttcgaagatgtgctggcaatgttgatctattgaatgtgctaagagaattcgaatcaaagaaggaggcagagggtgaccaaattttgattaaggcatcattcctggctgagctacaaaggcgaatattaaaggccgaggcgacagtccgagaaaaggatgaagagaacgagatgcttcagcagcgacttcagcaatatgaaaaccgatggtcagaatacgagcagaaaatgaaagcgatggaggaaatgtggcagaagcaaatgcggtcattacaatcaagcctatccgtagcaaagaagagccttgctcttgatgagacgcctaggatgtccgactcatcggtcgaccagagctgggagagcaatggggttcacattggcagcgcgtcgcagctggttccacgcaccgttggacgggagatgaatgccagcatcagcgtcatcagccgcttggccgaagagttcgagcagcgcagccaggtcttcgctgatgatgccaagttcttggttgaggtcaagtccggacaggccgatgccagcctgaaccctgacatggagctccgcaggctgaagcagaacttcgactcatggaagaaggacttcggctcgcgcataagggagacgaaggtgatcctcaacaagctggggagcggcaacgaatcgtcgcccaactcggtgaagcgaaaatggtgggggaggctgaacacatccaagttttcatgagctaccatgtaatggtgtagaagatgcggcgctggtattttacaaagccggcgaggttggttgctagtgctagagtttcttctcaactgagtattggtgaaagcccagcgttttgggctggatttgtgatttgtggagggcgagtttgtatagttcttccactgaggccttctttgcaggggccaaaagaaccactgagttgtgatgtaattacttgttaagatagctgctaaacgggaggagattggagattgttcagtgccgtttccttctcttgtccgatctcagcttgtaggtctgtagttttgtagtttgtatcaggtattatcatcactgaataatgggaaaatgtatctgcctgtgccaacgc

SEQ ID NO: 26646 - DNA, 2376 bp, Oryza sativa
  ref <308>: DATABASE ACCESSION NUMBER: AK102088
  ref <309>: DATABASE ENTRY DATE: 2002-08-28
gaggagccagcgatgtgcggcatagccctcgtcctctccggcggcggccgcgtagtcgtcgctccctccgccgccgccgccgccgccgttgctgccgtcggaatccaaccaagcgacgaggtactgttcctaccatcctcgaatggaaaagggaagggcgtgacggtggatgagctcaaggcagccctgcggcggcgtggcccggatagcctcggctgcgagaggctccgcgtccgcgcggatggcacgaccttagggagtgatgggtgtgattgtggagttgggaatgggggtgatgtgggtgacactgagttgtgcttcatcggagcaacgctgcagctcaggggagctgagccgattttgcagccgatggtgggtcaatcaggaaatgttttagtatataacggtgagatctatggaggagtccatgttgctgatgaccaaaatgatactcaatcacttctgtcatcactggaatcttgttgttcctgtgagtgccatgctcttgttagagatgaagcatgtctctgttgtggaagtgttgggaaatcagttccacagatcctttccacaatcaaaggcccctgggctttgatatactggcagaaggactcaaaaacaatgtggtttggccgggatgcattcgggagaagaagcctcttggtacattggccatcacctgatgatccacgctttatattatcatcagtatcacccccttcatttgcaagtaataactctgcgccaactgtcaaagttatggagtcaggggaagataatgattttcctgagtccaccaacatgagttactgggaagagcttccttgtgggatatacagcatccaattgaaaagccttgaaaaaagtggcatgtgtatgaaggaagcatgtgtctccgaagttaggaggcatgactggatcaactcttcattggatgaattaatccaatggaagaggaaatcgatagttcctactgtggatgacttaacttcacatcagaattctgtaggggactattgtttgtctcagagcttcagaaactcaaccgaagctgacaaaaatgctgcgtataaggtgttgattgcgttgcgggaatctgtaatgctgcgaaccaatttgaacagactctttcaggatgatctaaataaactaaaggatgatgagctagccccaatagcaatccttttctctggtggcttggactccatgatacttgcagcattattagaccagtgccttgattccaaatggacaattgatttgttgaatgtcagttttgatgggcaacttgctccagataggatttctgcactggcaggactgaaggaacttcagagaatttcccctatccgtagatggcgtcttgttgagattgacacagttttgacaaacttgaaaggagaaagtgaacatgtgatgtcacttatatacccttcaaatacttatatggatttaaatattggtatagctctctggttggctgctggtggggatggttgggtggatggaagtatatgcaacatgcaagatggttgtcgctacaagtacaagtcaacttctagagttcttttagtcggttctggggctgatgagcagtgcgctggttatggaagacataggactaaatatagacttggaggctgggttttacttgatgaggagatgagactagatgtacagagaatctggaaaagaaatatgggaagagacgataggtgcatttctgaccatggcaaggaggcacgttttccatttcttgatgagaatgtgatcaaaactttgttggaaattccattgtgggatattgctaaacttgatgaacctgttggaaagggcgacaagaagatcttgagagaggttgcaaacctactgggcttaaaagaggctgcacttcaaccaaagcgggcaatccagtttggttcaagaatagcgagagaatcaaaccgcaagaacttcgggagcaaccgagccgcgaaccaggcttccgctggcagcgtggagattcaccagcgtgcacgctgagaggatctctcccatggctgcacagcgagctgagatgatcagtagaggccacaaactcccttgctcttctgctccactaaagcgaagtctgactgcgactcgccatttcgccatgctgcccgagattgcttcccaccgcgatgctggataccgtcagaggttgcaaagttgggttccccagaagttcaccagatgtggttgtgatcatgccgtgatggggatggagcatgcaatgttctactactacctatattctgtcaaattttgttcctcatatactctgccatccattgcaagttctcaaacctgtatcagggagatctggttattagtagtgcattgtgtattcttttc

SEQ ID NO: 26647 - DNA, 1015 bp, Oryza sativa
  ref <308>: DATABASE ACCESSION NUMBER: AK102089
  ref <309>: DATABASE ENTRY DATE: 2002-08-28
gggagccgagcagcgcatcatctccatcccgcctcaactccgccgctcgatcgcctccacccgccgccgttccgtctacctctccgacccccggcgggcgccgccgccgccgccgcgcctaccatggctaatacgctgcgattgtatctcacttgcataaggaacactctggaggctgccatgtgcctgcagaatttcccttgccaagaggtcgagaggcacaacaaaccggaggtggagctaaagactagccctgaacttctgctgaacccagtgctcatttgccgtaatgaagcagaaaagtgtttgatagagacttcaatcaactctattcgtattagcatgaaggtcaaacaggcagatgagctagaaaatattcttgcaaagaagtttcttaggtttttatcaatgagagcagaagcattccaagtgctgaggagaaaaccagttcagggttatgatatcagtttcctgataacaaactaccactgtgaggacatgcacaagcataagctcatagatttcattgttcagtttatggaggacatcgacaaggagatcagtgagctaaagctttcggtaaatacacgtggtcggttagtggcaactgaattcctgaaacagttcatatgacacattcttggcgatctttggaaaacataaaaccctagcattgttagctatgctgtcttggcctttggcgagcaaatctggaaggatctttccaccactttgttttccttttgtaaatgcgttgacaaggatatgtgaattcttgatccaactagacctcattggcagctaaaatctgcccaggcaagagagatgaggggaaacaaagtcatggtcagtaggttgagatagattttttggccttttggttcaagaatcctgtactgtgccggccaagttttattggaatgtggaatgtcaaaattggggctgattctgattctgatatgtcaaaattggaatgtgaaaatcagagacgcttgttgtctctgattctgatttc

SEQ ID NO: 26648 - DNA, 3425 bp, Oryza sativa
  ref <308>: DATABASE ACCESSION NUMBER: AK102090
  ref <309>: DATABASE ENTRY DATE: 2002-08-28
gatgacaacaattagtgacggtttttcttttgtgacacatatagtgtaggtttacttccagcttcgtcgattaccagacggcaccggcgtcgcgcgagcgagcttgatcttgcgccttgtgcctgctagctgcttcggcggcggcggttatcttcttccgatctgtaacagccccgatcaagaaaggatccaacccacctaggaggactaacctgaacgtgctaatgagttcaaagctagtaacatcacctctgaaatccatggagcagggccatctagagcaacctctgcgcgatccgcaggcgccggcggagcagcatgacatggggttatctcccctgacgctcctcggcttcgccttcctgaccttcaactcgggaatggcagtgtacagatcagatagagacttggcaaccatcttcttcgtggtcttctcctacgttgacctcgtatcgctcttctacttcctccgattatttgagaagacgccgccggagtcgcctcgccgccaccacatcaagacggcggtgtggctcctgacgacgatgctcaccgccgtgttttcatataaagtggcggccatcatgcctttcccggttcaggtgctggtttgggccatggccgcagcaactgtgcttggagggttctacgcattcttcctccactccgatgaaaaaaagcctattgaggtaacgtaacataagtattattactccaaattgaagtttaaccatcatcatgatgtatgtatatatagggactgacagaatgaaagtttaagaacttcatcatgagatgtgatcgatcactggaagaatatttcacagaaaccaaacgaaagggacctattgattgattaccttgtgccaattctgctctaatggctctgaaacagatgtgcccacggaactgcataaatttcaagagtggtctatgaaaattggagaatgggaggaattgcacacatgaactgtcttgccagagtggagatgctatggtaatgatatactggaactcctttttatgggctccataatggccgcacttggcatccgactatctgagcacggaaattttcagtggcaaaaccttactgcgaatagaagcaaagcactgcaaaatctagagctttgcatgggtcaagtactcaagtttatgacctttttcagacaagggatacaatctggcttggcccaaagaacacattacagagacagagacaatgggctccataatcttccattgaaaagaaaaataagaaactggagctggagtgggagatgtttcaagaagaattgagccatcaatctctctctctctggtttcctactggccctggagcctccatatgcaaacattcttttaataaatatgcaaattttctgcactaaaatccgccacacatcaataaaaagggcagtccttttgatgataaaacagcgccattatattaaaacaaaacctttaatataatatcgatatattaagggcatattcggtaagctgggactgcagctgcagctgctacagcccctgctatcttggagctagtccagccgaacagccctaagaagcaaaaagagtgtgtcgagagtcgaacacggtttgttgggacttgggagcacaatgacagccctacccactcaaacatatataaatttgacgataactagtatttgtaccaaacaaagttactcgaatgagaaaactggaacagagctcaaccaatcaaacgaaagtgacaacaccccattcaacatgctggtacagcagctaggatcatactagtgacttgagcaaatgcacattccatctcctccctttgtaccttaatttcttctttagatgatttgcagtttaaattaccttgttctcggttttgtcgatatataggtcatctctcctgtggcagtctaattaaccctggtttgttgttcaattgtgcagggataggcaaaatacttgatagggctttctggctgtttggcatttgtcagacgccctgtgtgtggtaacatctcgatcaaattggaggtcgaaattaaatatatccggtgagaagagatcacgagatcgatcgctacctatatatcacagatagaaatcagagtcctatcgatattttcgccgagcatatataagtagtgctgtcgatggcgagcccaattcgtgctttataaaaacagaacaaaaaaaaaagaatatgagtttgtgtgcgtatcattttttctgggttaattgtattttgatcaatcagcatgtacctgtaaaatgaggtcgtgtagatcatgtgctaccgtactgtgtcctgtttttagtttttcctttttttcttcttccactgtttacatttctacttgtctgcgtctagtcactgtgtgctgttcacccagcacaaagtgagcaagcatgacactgtacccctcttttttttcattcttgaaccctaataagcaccggacacacatatttgcttgtaccacagtattgctagcaagatagatttgccaaatagccaatgtaccttgtgcacaccctttgtgtaaataaggaataattaactatttgccactcttacgagtggtgctaaattatttgctactagacccatatgtcatagacacatgagggcccacatgtcatagacagcgagttaaatgtccctgtaaataaagtctcatgtgtcacagtgtgtgcctattttcagaattggtaaatgctagcatggcctgaaatttttatatgagatttctcttccaaaagaaaaaataaaaaatatatgagatgaggcgggaccctggatggataaatgtacggtataataactaaatcattgctacaatcaacatggacggaatattatgtaatctgtctttttaaagatgaaagtattagtgtattatggcattctgattatgttgacactttctctgaacttgttgacagagtgcacccgggatactgctaatactgcctttcatcgaattgaagtagggatgcacactaccctgcattcgcctctggagcagcaacgtgagacagacagaggaagacgcaagacacagcggcattgctgaacttgtgcacacagattacgagaattgggaagcgtcgtttacaagaacaaagaagaagtaatttagcaagaatcaaaggaagcggccagattagttgcattgcaatgtcagctaatgagacaatcctctggccatgtgcaaagagcttgagacaaggtgctcgacgacttgagagaggtcgatgtttacatgttaaaacttgaaggcgaaaacaagggttccaatctccccgtcgttttttgtaggtacaatttttgtgctccaggcttagagaagaccaggacgcagtcaagtcaaatgtacaaaattaagatttttaaagatttcgtcagcaatgacatttcctgg

SEQ ID NO: 26649 - DNA, 2339 bp, Oryza sativa
  ref <308>: DATABASE ACCESSION NUMBER: AK102091
  ref <309>: DATABASE ENTRY DATE: 2002-08-28
gacgctgcgctgctgccactgcactacattacgacgggacgttgacattggcgatggcacctcccctcctcctccccctccacgcggcagagtcctcctgacccacacggccgcgccgcgcgcgctgcgcctgctgaggcgggagggagcgggcccgcccgcgatggcggcggaggccgcggcggagatcgtgcgggagatcgcggcggtgggcgccgccgatttggctgcggccgccgagccgctgcgcgcggactgcctccgcctcgctcggaaggtctcgctgctgtcgcacctcgtcgcggaggtcgccgaggcgggggccgggggtggggacgcggacgcggcggattcgtggttgggggatctggtcagggcgctgcaggccgccaggaggttcgtcgagctcgggcgcgcgccggcgcgaccgtcgagggcgtcggatcaggatgccgtctgcaacaatgttgctgttcagttcaagtttgtgacttggcagttgcaaacagttctagcaagacttccacagagctgttttcaaatatcagatgaagttcaagaagaggttgatttagtgcgagctcagcttcgaagagaaatggagaagaaaggagacattgatgtaaacattttttcaaaattccatgatatcttagctcttcatgttagtactgttggatcgcagtctgagcaatcacatggccagccagacacaccacagatggaaaacttatgcaacggtcatctggagttgcaaaatatcattatgctagtttcagaaataagtggggtgcccaagtctgacgcagagagaataacttctcagctaattgaaggacttgaaaacatgagagttacagactctaaaaaacctgtcagtgttagccaatcaagtgatgaaacaaaagcatctcctgagacacataagaagtctgacgccgtggctattcctgaagattttcgatgcccaatatctcttgagctgatgagagatcctgtcattgtttccacaggacagacctacgagcgtgccttcatccaaaggtggatagactgtggaaaccggacctgtcctaaaactcaactgaagctacaaaacattactctgaccccaaattatgttctgcgaagtttgatattgcagtggtgtgaggaaaaagggatcgaaccacctaccagatctaagaacgatggtgcatatcttgaggttggtggggagagagtagctattgaaacattagttcgtaatctctctagtagctcattagatgaacggaaatcggctgctgccgaaataagatctttggccaagaaaagcactgacaatcgtatacttctagcggaatctggtgcaatatccgctctagtgaaacttttgtcctccaaagacctgaaaacccaagaacatgcagttacagctcttctgaatctctccatatatgatcagaacaaggaactgatagtagttgcgggtgccattgtcccaatcatacaggtgttgaggaaggggggcatggaggcaagagaaaatgcagctgcagctattttcagcttgtcacttattgatgataacaagataactattggaagcactccaggggcaattgaagcattagttgagttgctgcagagtggcagtccaaggggtagaaaagatgcagcaacagcactgttcaacttatgcatataccaagcaaacaaggtccgtgcagttcgagcaggaatcctcgcaccactgattcagatgctgcaggattcatccagaaatggagctattgacgaagcactaacaatcttgtcagttcttgtgagccaccatgagtgtaaaattgccatagcgaaggctcatgctataccctttttgatagacttgttgaggtcaagtcaggcccgtaacaaggagaatgctgcagccatcttgcttgccctttgcaagaaggatgctgagaacctcgcttgtatagggaggttgggtgctcaaataccactaactgagctgtccaagaccggcacagacagagccaagcgcaaggcaacctctctcctggagcatctcagtaagttgcaggtgctctaattccactgtccatcgcataccattttgcgtgtgtgcgtgttctacatgtacgtatacatacgaaaagctgtaacctcatctcttatagagtgtgaatttggtgggccggtaatgggttatttcagttaccggcttaccctcaacctcaagtgtgcgttcattgattgctacataaaaaagggttggtgttacagacttgtgtattgttgctcatgggcatgaagtttctttgaagatcaaaaatgcaaaattattacggtcg

SEQ ID NO: 26650 - DNA, 2437 bp, Oryza sativa
  ref <308>: DATABASE ACCESSION NUMBER: AK102092
  ref <309>: DATABASE ENTRY DATE: 2002-08-28
ggtcggagccgcctctatccccctccttctcccggtgaccccggcactccgccgatccgcttctcctcctcaaaccctctcttctccggcaagctccgaggcgtagccatggcggacgacgtatccaagaggtgctctccggaggaggaggtaattgctgacatactgttcgctctgccgagagggcctcgccccgttcttctccgccgccgaggagaaatcaaccgcaccggcggcgattcaactcgagatggagactcagcggagaagtctcgcaccggcagggggcatgaaatacgggggagagctggcggcgttgaagcggaggcagccaggggcgggtactcgagagaggatctcgccaccaaagggggatccgtcggatcgagggatggcggcggcgaggcctttcaatcaaagagggaaggtgccctgaggtacagatgcactatcgaggacctctccacctcgaagggacccggtggcggcgggggctatgactatgaattagtggggaggggtggagtcgcggcagcggagcgggacacgaggtgcaggtactcggtccaggacctctcgaccgtggggaaatctggggggatgtatgatggaggcaatggccctgggttcaaagaaggtgcccaagaaactgtagattgtgtccaagggttcaagactcatcctgagttaggacttcctgccaatgattctggcactgacacggaaacagttgatgtatcagtgtcagaagagttgattcggcttcagaccacgatcagtaagcccaagactaatactgctactgatgattctgccgatgattctgctgctgaaatcgaagcatttgatgtatcggaagaattgattcgctttcagactgttgttagtaaaccatgggatgcaatatggagagaagcacctctggtcttctgtgattcgttcctatgtcctactggtgataggagtggtttgagtcaaagtgaactgaaagatgcagtagcttcaatacttcttaatcataaaggtgttgtaagctatttcaggattgactcaagtagatcactgaaccttcaaactcttgagacctggtttaatatcttgtctgagaagaaggtcaaagagatggttctgtttaattgttcaggaccacagaaattgatagagtttcctatggatatcctggatggcagccaagttgaggttctcaggatatgttttttcaaaattccagaagtttatgcatttgatctctcaaagctacatctactggatttctcatactgcaaatttgataccgagcacctccttcactttgttgaagcatgtcctaatatcagagagctgcatctgggctactatgatggaaatgtccggatacgctctgacaagctagaaatttttcaagtatggtgttcaactatgaagtctgtgaacattgagcatgctcctgaattgagaaaacttaccatagcggcatttcctggaaagtactcatcctcattgtctgtgagggtcataaactcactttacttggagcatatcacgtgcaacatcagtaatcaatggattacaataaatggctcaaatatacaaacagatgataaagttcttctcaatgtccgaaaactgtacattggactttctatgtccaaaagaaggcaacgggaacagctctctaacattttgaattgcttaacgcatctagaagatctgactatttggcggatggataccgtcgctaacaatgaagattatgatgcggcactcgaggactggtcacctaaactgcgtgtgaagacctgcttgaaaagcctccaaatatgtaagatggaaggataccaaggtgggaagcttgagtcggactttgcatctgctgttctggtgcgtgcaaatcgcttgaaaaggcttataattgaatccgataaggaagatgtctttaagaaggctgttggcatacttcaaaaggtcaagtggacgtcacccgatgtcagtgtagagagaagactaaatccactggtcagcaactgacagtcgaagacaacggaggcaagtcaagaaaaattgccactggaagccaagctaataaggcaagttgcgaatgatgttttcaactcaaagtttggatggaacgctggaacaaggaggctgggagcatagagatgtgaagatgttgaccctgctgcaatttgtcaccagaattgtggaagttttttgtgttgggccctgtgaagctgatctggtgtctctttgctgcagttagctagactttgttttttgtttggcagctctgcttttctttctgtttagtcttctatggcctgccctgtttccctggaagaaacttatgttattctgttgctcttttctttctgctgtaagaaccttgtagactgtatccatttctgataatagaaatgtgggctatgacccttgatct

SEQ ID NO: 26651 - DNA, 3209 bp, Oryza sativa
  ref <308>: DATABASE ACCESSION NUMBER: AK102093
  ref <309>: DATABASE ENTRY DATE: 2002-08-28
cctagctcagtatatgggtcatccactggaccattcaattcaagaatgaagaaataatcgatcccatcaactaaacctaacaattaatatataggtaatattcaggttctgatagtgattcaatggacccggctggacatcgatcataccatcatatatggaaagaaatttataaaactgtcaaattggattgaggattttgggcatgtggcttatgcaaggcagcgtcaccatgtctttgtgatagtactgtattagtgtctggattccttgggccaccttttttttgagagataggggctcttctcaatctgggctacgcaggaaacatctagcccgaaactatagatatgccccttggactggtttagttgcaaccttaaccttaaccttaaccttgttcaattttgttgacagatcctctgccgctctgaacccctgaacataactacataatgtttataactctttgagaaaatttgattctatcattgatgataggagatcgatttcacacatatttcacaactacaacatggtgagcaattttcttctataaacaccaagactgtaacatcgatatcgacttttcagttgaattatcaagctagaattcagaatttcagaagccaaagaggaaacagaacatgccgaaccttaggcggacagaacgaagcggcagaacaccttgactgtgtatgtttgtcgccgaccggctgctcagaacacaacaggaaacaaaaaatggcacggtactggagtacatccatccgggcgtgctgtcaaactgaacataaggtattggcgtgttccttcttgactcgcacggtcacgccatgtttttgatggagtaaaacatcccggtcactaaattcaaataaggaaaagatattgttactataatttattacaagttctccatacaagcagaatagcaaaagataaagccatagctggattgaatttccccttttattttttttccccttcttagatggttggcttggacagatattacgagaagatctgccattgctctatagcttgattaaagttaatattggcacaattaatcaaggctaagatacacgttactttgctccacaagattattccaacagattcaccaagctagtaataatccactcgatccagattaccagataggtgttttaattggaaagaacaaacatgcttgagttaaactaaaattgaacctgctggccagccggttggaacaattgattgcgttccattggagtcaaagcaagcatgtccctattcagggaccagtaacgagggacaatttgtggtccccatatatcttctctctacaaccaccagaaaaccagagcaattttttgcatccacatatgatgtggaatgaagcagctgctcgcacatttatattatggtaactaggtctgtcagccaacaatcacaggaatcattgctagccacaagtcaccccatccatatcctcctgatcatcaagtacaaacagaaacgtttttcacctatcagttatggttggatgttgtaatttcatacacagatattttttttaatgatatgctcaagttcttgataaatcgctttttttcttgggctgggtccgctgggatttatgtttacaattgtttatacacctcttcacagtgataatatgctaaatactccatagaataaaatataatagacatgcaatctcaatgggattatagtcacctaatatacaatacaaattttctttgttccagaaaagggaaatttgtttgttcctctactcgattacgatgttcctggagtaattttctccaaacttcttttaggatgaagttctgagcaaaaacttaaccttttaggtactttcactaataaaagaaaacactgatgcaggctctgacgtaagatatatgtaactcaggagagacatcctagaatagaacccatttttgcaattttttagagttacatctgtctctcagtcataaaattgtactggtatttgataatgacctcacttcgctagacttttgttgtgagaacatttggacaatctcaattcctcccatcatggtgctgctgcttgctaccggtataaatatatgcctaaagctgcagttagctaacaccttctgccctgactatcatagccacatctccataatagacaaactcataagatgaaaattctcgaatcttttggtcatagtgactgtcaagtagtgatcaacatgatagagcaccaaaaggctctcatggtggagctgcgtggcatggtcatgccaatacttccgagcgacaatgaacaagccaagcttgctctttaactcttgggagatatattaagttgctcagataaggctatctccatgctagaacttggtggagacacaccaagctgaccaatcttgttggaggtaagagaaaaggtgacaagcatatcatggacaaccacaacttggaggaggaagccaaagaaagtgttagcaagagaagaaagaatgcagaacacacaggttcaactgtggctcaagcacctcacaatgatggacatcaatggaggaagtatggtcagaaatggatctctagagcaaaacattccaggagctactacaggtgtgccaatagtaaagtgcaaggctgtcctgcaacaaagacagtgcaacaaatggattccagtggaaatggaacatcaaagttgttcaacgttgactactatggccaacacacatgcaggggagatggcatagccaatccatatgttgtcgacacagcccatcacagtatggaacctatcaatcaaaacgaatgcaatagccctacacttgaacacgaagcccatgaagttcaagatgaaagatttgaaaacttgtgtatggtacaaaatatgccagagtatttgatagattttgaattggagagagccttcgagtttattgtgaactcaccattgggttctgagcattggacgttcgatgattcaataagatgtgagcacagtccaatatgcatatggggatgatgacttgatgttagctataagctagctaggagtttctttcaggatgtgctgtaatgataagttgtgacctggtaaaaatacatagcattttgctcatgactaagaagtaaacctgaaattaagaagcatgtgtataagctattattatactattataaaaattgaagatgtttccgcggtc

SEQ ID NO: 26652 - DNA, 3804 bp, Oryza sativa
  ref <308>: DATABASE ACCESSION NUMBER: AK102094
  ref <309>: DATABASE ENTRY DATE: 2002-08-28
ggttttctccatccccaatcctctcctcctcctcctccgcctccgcctcaatcccttcctccatccacccgcctccgttgttctcgccggcggcgacgacatgcacggcgactggccggagtcgccgtcccaggaggtgctctacgccgacgagatcgccgccgtccgcgcggttcttggcgcgggcctccccgaggcccgcgtcgtcgccgcaatctcccgctgcggaggcaacgccgagcgcgccatcaacgcgctcctcgatgacgccaccgccggcgtcgaggacaaacccgagcccaagaagggtaaaggtgccaagacggctgctcctccggtgaaggcggaacgcgacgctggtggcgccgccccgaagccgccgccgcctccggtgaaggttgaggtcctcggcgacgagcccctggggagccaagaatcgaacggctgctccgcgagggtcaagaaggagcgggaggacgagctgctcgtcaaagcgccgcctccgatgccggatcgggtcaaggaggaagacggcgtcgcggccaagcgaggcgcggcgacggcgaacgccgccggcataagcctggtgccgaggccgaagaagaggtctcgcgtgcacgacgaggcggacaccatcgacctcacggcgacccacccggtgccgtacctgaacccgaggccgatccgggcggtgccgccaccggaggccatggagatgctcgagtcgcggcgtgtgcgtgccaggccgcctccgccgtcgagtgatctgaggatggtggtggcgccgcctgatgccgagttcggcgagttccccgaggagcgcgactggttcctcgtcggcaggtcgtacgtcaccggcctgtccaccaaccgcgggaggcggaggctggacgccggcgagctcgtccatttctcgttcccctcattggagaggacctatggtgggatcaaggtgtcgaacaagaaggcggctgctttggcggagatcgtgcgcttctccaccaatcgagctggagagattgggaagctatctacagaatggaccaagtgcctcgtgccactggtaagctcatccaaggtgaagattcaggggaagattgtgtttcccacggtggaattgagattgatgcaggagattttgttgtatgttagcttctacatccaccgttctgtattcaccgcaagcggcaacaactcatcatgggacctgcttgctcctgcaaatgttgattattccactaaccctctttacaggctgttcagattgctcaagctaagggcattcaccaaggctgatatcactcctgaggagcttgctgcaggaaagagatcgcggaatctaaggggtgatgacaatgatgaagatgaacccatggctatagttggattggaaaaccgacgcacagctggccaaacatttcctgagcaaggcactgatgagcaagctatttcagaggctgcattaaacaaaattgttggcactgctgaaacatatgacttggagagcccccaagcactcttgtctccgttctaaaaccataccagaaggaagctctgttctggatgtctcaattggagaagggtattgatggtgatcaagccaaaaaaacccttcatccctgttggagtgcctacaaaatcgtcgacaagagagctcctgcagtgtatgtcaatgttttcactggcgaggcaacaacccagtttcaaagtgtaactcagtcagcaagaggagggatactagcggatgcaatgggtcttggtaaaactgtcatgactattgctctaatactatcaaacccaaggggggagttagaacaagataagaggggtactagagatcgtgacaccaaggcacaaacttcgagatcctctgtaagaggaggcacacttataatctgtccaatggcattgctaggccagtggaaggatgaattggaggcacattcaacaccaggagctctttctgtgtttgtctactatggtggcgacagaaccactgacctgagattcatggctcagcatagtgttgtcttgacaacctatggtgttcttcaatcagctcacaagaatgatggcagcagtatctttcacaggatagattggtatagagttgtgctcgatgaagcacatacgatcaaatctcccagaaccaaagcagcacgagcagcttatgaattaacttctcattgcagatggtgccttacgggtacaccattgcagaataatttggaggaccttttcagtcttctttgcttcctacatgtagaaccatggggtgacgcaagttggtggaataagctgattcaaagaccttatgagaatggtgatgagaggggattgaaacttgtcagagctattctgaggccactcatgctgaggagaacgaaggaaacaaaagacaaaatgggaaatcccatactagtcctcccaccagctaatattgagattgtggagtgcgaacaatctgaagatgaacgcgatttctatgaagcgcttttcaggagatcaaaggttcaatttgataaatttgtagcacaaggcagtgttcttaacaactacgctaatattcttgagttactccttcggctaaggcagtgctgcgaccacccttttctagtgatcagtcgagctgatactcagaagtatactgacctcgatgagctagcacagaggttccttgatggggtgcaacgtgattccgcgagacgcagtgcgccaccttcacaggcgtatgtagaagaggttgttgaagaaatccgccagggcgcaactactgagtgtccaatctgccttgaatcagcttctgatgatccagtgctcacaccatgcgcgcaccggatgtgccgtgagtgcctgctctctagctggaggacgccttctggaggaccatgcccactttgccgaagccccattaccaaatctgagctgatcacattgcctagtcagtgtcgattccaggttgaccctgagaataactggaaggactcatgtaaggtgataaaactcatcaagatcctggagggccttcaggagaagagggagaagagcattgtgttcagtcagttcacttccttcttcgatcttcttgaggttcccttcaatcagaaagggatcaaattcttgaggtttgatgggaagctcagccagaaacacagagaaaaggttctgaaggagttcagtgaaagcaaggacaagctggtgctacttatgtcactcaaggctggaggtgttggacttaatttgactgctgcctccaatgtgttcctaatggacccatggtggaatcctgcagtggaagaacaagctatcatgcgaattcaccgtatcgggcaaaagagagcggtccaagtaaggcgcttcatcgtcaaggatacggtcgaggagcggatgcagaaggtgcaagcgtgcaagcagaggatgatctctggggcgctgaccgacgatgaagtccgctcggctcgtatcgagcaactgaagatgctgtttacatgagaagtcttgatcatgagtttgcaggatgttgtacagttcatattttgttccctggagacttgctagcattttaggggaaatgatccaatgttttaagggttcggacttgtgaatggggatggaatgggtgtgaaactatgtgcccattcgattttgtggatatatctccattctggtctgaacattttgtatatagtggctcttcttaacatgaaaggcctctaccctttctaaatcgtgatctattgtgctgaaatggctgttggtgttaaccagggagtaaaaaatctctactgaggcttcctttcatcc

SEQ ID NO: 26653 - DNA, 2403 bp, Oryza sativa
  ref <308>: DATABASE ACCESSION NUMBER: AK102095
  ref <309>: DATABASE ENTRY DATE: 2002-08-28
gaatccctcatcatttcccccaaaatcgcgcggccgtctccggccaaatccacgccgccgccgccgccgccgccgccgccgccgaggacgacgcagcggtgccctcgtttcggcctcccgtatcgccctccgtcgagccgagccaccgagactggctgcgtggtatcgtcctcacgaggagcggcaatccgaaggagcgcctcctcccgatgaagaccatatgcggatccctcatgcacgagctccaggtcatctgggacgaggtcggggagcccgaggccgcgagggacaggatgctgctggagctcgagcaggagtgcctggaggtgtacaggaggaaggtggaccaggcgaaccgctcccgcgcccagctgcggcaggcgatcgctcaatatgaagctgaactcgccgccatctgctccgccattggcgagacgacggtccacgtcaggcagtctaatcagaaagcatgtggattacgggatgagctcggtgcaatattaccatacctagaagagatgaagaggaagaaggttgaaagatggaaccagtttcttgatgtcgtaggaaggataaagaagatctcatctgagataaggccagcaaattttgacccttttaaagtgtctgtggatcaatctgatctatcattaagaaagcttgaagagttaagggtggagctgaagtgccttgaaaaggagaagggtgagagggtaaagcaagttatggaatatttgaagactttacattctttatgtgtagtacttggtgtcgacttcaagaaaacaatatctgaaatacaccctagtcttgatgaagctgaagggccaaggaatataagcaacactacaattgagatgctagcatgggcgattcagagacttcgtgaaacaaaaatgcagaggatgcagaagcttcaagatcttgcatctaccttgctagaactatggaatctaatggatacgccatttgaagagcagcaggcataccagaatataacatgtaatattgctgcttcagaggctgaattaacagaacagaacaccctttccattgagttcctcaactatgtggaagctgaggtattaaggcttgaacagcacaaagcaagcaaaatgaaggagcttgttctcaagaagaaaacagaactagaagaacatcgacgacgggcacatttagttggagaggaaggttatgcaactcagttcacaattgaggccattgaagcaggggctattgatccctctttgttgctcgagcaaattgaggcttatatttcaacagtgaaagaggaagcttttagcaggaaggacattctcgagcgagttgagaagtggctaaatgcacgtgaggaagaggcttggttggaagattacaacaaagatgacaaccggtataatgctgggagaggtgcacacattatgcttaagagggctgaaaaagcgcgtgttctggttagcaagattccaggaatggtagatgttcttgaaacaaaaaccagagcttgggaaactgaaagaggcaatgagttcacatatgatggcgtccgacttatattgatgcttgaagaatacatggttgttcgtcaagagaaagagcaggaaaggaagaggcaaagggatcaaaagaagcttcaagatcaacgcaaagctgagcaggaggcactttatggatcaaagccaagctcttcaaaatctcacagcactaagaaggtacccagaaactccacacctggagttcaacctcctaaatcagagatacttcattcaaagactattcgtgcaaccaagaaaacggaagatatcaacactccttcccctggtcataaaggtttagacactgttggtctccctatcaggaagttatttccatcttccaactcgagcactcttcttgagatggagacaccccggaagcccttctctcagattacacctggaaacatatcctcagctcctgtgcgtccaatctccactggtggtactgaagagaacaggactcccaagacatttgcaccagttcctacgactccgatgacagtgagccctcatatgcaaatggcagtgacgcctgttcttaccgcaaaagctgtttctgtactctcttatgacgaaccggagctgacttcacaagaggacaccgagtactcatttgaagagaagcgtcttgcagtctatcttgccgcacaagtggcttgactgtcaaggatgctgatacatccgttgtgtagctgaaagtctgaacctttgatagcatttctcatgttacagagacttgtgtaggtcgacagcagtcggccttattcataaccatactttacgttttcatcccattgttaaagtagttaccttgttactgctggcacttgtcacctgatgatgtgaaccattacctttcttcgcc

SEQ ID NO: 26654 - DNA, 1818 bp, Oryza sativa
  ref <308>: DATABASE ACCESSION NUMBER: AK102096
  ref <309>: DATABASE ENTRY DATE: 2002-08-28
ggcatcatcctccccttcccacaaatttcaaaagttctcaccacctaatccgatccaagctccgcgctaatcgcgcaaaggggaaggaatccgctcgaatcaaccgaccgattgatcaatcgatcgattcgatccaggaggaggaggcgaagggggttcgtcggcggaggcgatggaggaggacccgctcatcccgctggtccacgtctggaacaacgccgccttcgacgactcctcgtgttccagatcggcttggctcccccaaagccccgccgtcgcggccgtccgcaagggcgacaaggagaatcaccgccccgaggttgttgatgtcgccgccggctacgacgtcgaggccgagatcggccacatcgaggcggagatcctgcgcctctcgtcccggctccaccatctccgcgtctccaagcagccggagcccaaccgcgacgacgctccgatgggggagatggtcgcgaaggtgaggccccggccgaggggcctcagcctcgggcccctggatgtgatctccatcgtcaatcgtgagaagcatccgctgcgcaccaagaagcctccggcgacgcggggcagggggctcagcctcgggcccatggagatcgccgcggcgaaccctagggtgcccgcggcggcgcagcatcagcaacagcaacgcgctggcacggcgcggatcctgaagccaatcaaggagcctccggtgcagcgtcgcaggggcgtcagcctcgggccgttggagatccaccacggcgtcggcagcaaggcaccagcggcggcgcgagccaagccgttcaccaccaagctcaacgccattcgagaagaaacccgaccctccaagcaattcgccgtccccgccaagccatggccgtcgagcaatacaaggcagacactggactcgaggcaaggaacagcagcaagtcgagcgaaggcgaggagcccgagccccaggcccaggaggcaatccaatggcaaggctactgacacaaggggaggcaacaaggtggtggatgagctcaagcccaaaggtgcgtcgtcaagtcagagcggcagcgccgccgccgccgccactgccaagaggatggcggggagctccaagatgagggtcatcccgagccgctacagcctcactcctggcgcttcccttggaagcagtggagcacaggagaggcgacgcaagcagtctctcccaggatcatcaggggatgcgaaccagaatgaggaaatcagagcgaaggtcatcgagccttccaatgatccactctctcctcaaacgatatccaaggttgctgaaatgctctcaaagatcaggaccatgccgcctcctgacgagagccctcgcgattccggatgcgccaagcgggttgccgaattggtcgggaagcgctcgttcttcacggctgcagccgaggacgggcgggcgctcgacgtcgaagcacccgaggcggtcgcagaagcttgagatgaaccaccatggtttgatccgttccttccatcagctcagctccgtcttcttcttgagtgttcaaggtgcctgcttatcttgagctagcattcgagtgaggcttttctttttgcaggggcgtgttgcataaatggtccggctactgttacattcatatctcatggtctggttcctctttctttcttttttttttgtttcttttgtcaaggccttcctatgctagtcaatgtgtgaaaagagatagtagtagtgatgagtccattctatggtttcttgttttggaattgtaagtgtgctctttggtttgagacttcgagtaagtacaggattcatggtgtggttaagtc

SEQ ID NO: 26655 - DNA, 2924 bp, Oryza sativa
  ref <308>: DATABASE ACCESSION NUMBER: AK102097
  ref <309>: DATABASE ENTRY DATE: 2002-08-28
gtacagaggtacaccgcttcgtggagagcaacaggatagagctggacttgaagcttggcactgctctgatcgacatgtatgccaagtgtggtgacattgagagtgcacagagagtgttcgacagaatgccagagaaggatgtgcaaacttggagttcaatgattatcggactggccaatcacgggcttggccatgagtcgctcagcttgttctcgaagatgatatctgaagggatgaaaccgaatggggtcaccttcgtcggtgttcttatcgcgtgtactcatgttggccttgtgagcgaaggcaagaagtattttagatcaatgaatgaagttcatggtatagagccaacagttgagcactatggatgtatggttgatcttctggggcgttcaggccatgttgaggaggcaagacaactcatcaggagcatgacattcgaacccgacacaattatctggagagcactacttggggcctgtcgcatccataagaatgtggagattgcagaggaagccatggccaaactgcgagttctggatcctcttggtgatggacactatgtgctattgtcaaatatatatgcacaggcaaactcttgggaaggtgttgcagaaatgaggaagacgattagaagggacaatattcagaggattcctggaagaagttcaattgaatgggatgaaaagattcatgagtttgtctctggtgatagattgcatccaaggtccaaggagatctacagagtgttggaagagatgatggatcggttaaaacaagcaggttataagcctatgacaggtttggtattgcaagatattgatgagcaatctaaggaacgctccttggctgaacatagtgagaagctggccattgcttttgcgctgctaactacccctgcgaggtcaactattcgaataacgaagaatcttagagcttgtgaagattgccattcagctatgaagttgatctccttggtgtatgatcgcaagttggttgttagagaccggaaccgtttccatcatttcagtgaagggcagtgctcatgcaaggattactggtgaacttaacatgcttttaccaaaacaagacacaaacttacacattcaacacataacttcaaaggaacacaagatgagggaatcaggtttggacggatagggggaaggttttcactggaggaatttagccccagctaattcttgatgtcaattgcatctcctacagaaacaaggtttaatgaacaatcgggaggcagagatctgatcaacagccgcaacatctctctctctctctctctctctctctctactaaatcattgggcagtaccaaatcattgggcagtcacactggtgcgcatatgtttttgctttagagtcaggagctccattttctaatcttccgcttgcaagaagtaagcctctcacggacatttatccactaatgcaatcattcggtgaacctaacacttacaaaaatggactgaaagttgcctaaaagtgactagtaaaagatcgctctgattattgggtgatgtcggccaacctcgtcagaaagctcttttggtggcttctggattgggtcttaaccaggcaggcttcagagcatgtagagcaacgacggccatcggatcatcagattgtacggctcagatggcacatgaaccttgctcctaatagccacatgatctcatcagcaagtatcccaatgctccagtgggcgattctccgtgatgagattcgcagggtttgacgtgacaacccaagtttgtttttgctgcaggggaatctgataaacccaagtctgcacgggcgcatcatcacccgactaaaatactccgagaagcaagagcgcagtaaaaggaaagggaaataatattgcttgctgaaactgaaagaccctttgccttgtcctactacttccatgagcaggaaaaaaacatattgggtggtcatttcgtgtgctcaattgtttatgcagatgtccaggtcaagaaacagtaaaaaggacaattattctactgcacacaagggggagagttatccaaagagaggtattagcagccaagttaaaaaaaaaattagtgctatatcgcagccggagaggagttcagacggcaacatcaatggcgcaagaggcgttgaacagcaagaggaagaaagcaagagagtaaaaaaaacacaaaagaaaggatttctgctgaaactctgtgggttgcgaagctcacctcgtggaggcggacgacattggggtgcttgagcagcttcaacgtggcgatctccctctttatctgagcaagaaattaattaaccagccggccaagcaaaggaacaggaacccggatgagcaatcaatcaaggttaattcacctgttcgtcgatcttcatggcgaggatgcgttggcggtcgaggatcttgatggcgaaggcggcgccggtgtcggcgtggcgcgccagcttcaccttgccgaagtgcccctctcccagcgcccgccccatctcgtacttccccatccgcattgccggcgcccgccgcggatgggagggccgccgtctccggcgcgcgcgcgcgcggtggcggagttcgacactcgcgagaggagaggagaagagaaggtttggtggcggctttggggggagttggaggaagggcgtgagactttgggaattcggctgggtttttattgggagttgccgaatggcgactcttcccgttgcagccgcgaccgggtcggtgaccggattcatacttgtcttttgcattcctttctctttttttttttgaaagttttttttttaatttttgttgctgttgtgtaggagtatgtcttttgctttcgtatgcgtgtttgagctggatttttcacatttttgtccttttaaaaaacttattttgcaaatagatccatagaaaaacttatccc

SEQ ID NO: 26656 - DNA, 923 bp, Oryza sativa
  ref <308>: DATABASE ACCESSION NUMBER: AK102098
  ref <309>: DATABASE ENTRY DATE: 2002-08-28
gatggagccagccgccgccgccgccgccgtcacggccgccgtcgacctgtccacggcggccgccgacctcggcagggtgcacctcctcccctgcggcatcaagcagaacggcgccgccgccgtctccgactacttcaagcccaaggacacaggtgtggaggtggaggggattagggtggaggaggccttcttccgcgggaggaagctgcagggcgccaccatctcgctcccggatggctaccgaggttatgtattggagaagaggagtggaggaaaggatatgaagaagctggagggggaggttagcaatttcaaatcccgtgcggagtttcaaaacataacatattggaatcatgataccacaccatcggcagaggatcccctaccgcggtgctttcatttgctaaccgttgctaatgctatgcacacgccagtgaccgctgaagagatggcttacatgtccgcaatgcagaatcagagcagttaacagagattcatgacatgatgaagctgcaatttcacatgatatgactgcagcatttgtaacaaaaaagctactagctattcagtagtttccatcagctgaaccatcctgactatcaaccaatctagcaagcaatctactatttcagtgtcaagtcccaactgaatcagagattagtagctgtgagaatttgaatgccggatactctgcttccggtgaccaggcttatgttacatgcaagaaaattcgcatcaaatgttctagtactgtttttgagtaattttagcttaggactctgaacctgcatcggttactctgtactagtatgtcagtaacctgtaatgtttgaacagtgatccagactgtacgctctacttgacgtgttgtaatgttttgggggaaaacactatcatcccttaatatgttgttcaaatattct

SEQ ID NO: 26657 - DNA, 2217 bp, Oryza sativa
  ref <308>: DATABASE ACCESSION NUMBER: AK102099
  ref <309>: DATABASE ENTRY DATE: 2002-08-28
gctctcttctccctccccaagcaaagcatcggcatctctcctccctaaaaccccacctcccgtctccccggggcggcggagccgatgagatcccggccatggcgggccccacctcgcgccgcctcctcctcctcgtcgcccgccgcgctggtcacctctgccgccaccaccaccaccaccaccaccgcgacggactcgtcctggcccgctcgctccaggccgctgccgctgccgccgcctcgtcgccaccaccgcttcccgcctcgcccccggccaggagcttttctagtgcattctcaagtgttcatggggagagaccgtcctcagaatatgcaaagatcagaaaggagtcgttagaaagccagtttggaaggatcttgggttcaagctcacgtacactatttgcagatcgtggctttggtccattccttgcaatgtacagggcagcaattatctcttttcatgttatgaagctcactatttggcatttattgctcagtgatgtgcacaaacgggctgagaagttccaggagaccttgatccggttggggcctttttacatcaagcttggacaagcattgagcacacgccctgatatattgccgaatgcatattgtcaagagctctctaagctacaggaccagataccaccatttcctactcgtatcgcaatcaggactattgagtctcaactgggttctcgaatttctgatctatttgctgatatcagcccagagccagttgctgcagcatcgctggggcaagtatataaagtcatgcagctcatctacactctggagagcttgtcgcagtcaaagttcagaggcctggaatgactcccttgctgactctagatgcacttttgttccatatgatcggaggacagttgaaacggtttgcaaaggctcgcaaagatttactggtagcagtcaatgagattgtcaggcacatgtttgatgagattgattatgttttagagggaaggaatgctgaaagatttgcgagactttattctcatgatttaggtgggaatagctccggagatgggacaagtatcaaagtcccaaaggtctactggaattttacacgtaaatctatattaactctagaatggattgatgggatcaagctcactgatgctgagcgcattggcaaagccaatctgaacaggaaaaggatgatcgatgagggtctctattgttcattgaggcagcttcttgaagaaggctttttccatgcagacccccatccagcttgtgcactatgttaaccgtgactccttgggcttggcaaatgacttccattcacttgggtttgtccctgagggaacagacctacatggggttgctgatgcattacgtgtttcctttggtgatggaaggaggcaatcaaatgattttcagggggtgatgagccatctgtatgatgtcatgtatgagtttaatttctctcttcctccggattacgcactggtgataagagcactgggttctttagaagggactgcaaaagcattggatcctgacttcaaagttattgaaagtgcatacccatttgtcattgggaggctacttgaagaccccagccctgatatgaggaaaatattgaggcagctcttgatatgcgatgatggatccatcagatggaatcgactggagcggctgattgcagctatatccgaacagtcagaatcttcaaataagtctgaagatagatctggtgaaaatgctgccaacaaacctgggtggagatcattcgacatgcattctgtggttgcagctacagaagacctttttcatttcattttatcaaggaaaggctggagggttcgtgtttttcttgttcaggacattgtaaaagcttcagatgcattcctacaagaagcaacatttccaggtatattcgatgaagaggggactacaggggagctacatccagagagaagtaaaatgataagaagggtggtacatggtgttcaatcattccgtcaagctatcagtttggccccagatgcctggactgctatgctattccgtaccttgttgaaacctgaatcccagaaatttattcttgatgtctttctagccttggcaatgcattcctgttacaagattccagaaacaagctggatttgtatgtcgagattcctgaattacttggacaggcagggtaggtaacacagataatggaaatgcagtctaattatcttttgatctg

SEQ ID NO: 26658 - DNA, 3027 bp, Oryza sativa
  ref <308>: DATABASE ACCESSION NUMBER: AK102100
  ref <309>: DATABASE ENTRY DATE: 2002-08-28
gtctcttccctccacctcctcctcctcctctcttctcccctttcacactctagccatactctctccaccgcattagctcgccattgccaaccagaggagagagagaggtggtgggcagcggccacttgcctcttccgagctgtctcccatgacaccaccgccgccgccggtgtcgcttgctccgtgccaacaaccggtcgagcagctggtgggtggttcttgctagcacgcgcggcgcgagcgccaagatctcaccgtacgcgtgcagcgccgcggcgggcggccatgggtgctcgggtggtgctgttcttggccgtggccgtggtggcggcggtggcgcaggagccgaacacggacgcctacttcgtgtcgaggttcttcgccaagatggggcgggcggcgccggcgtcgggcgcggcggtgtgcgggtggcccggggtggcgtgcgacggcgaggggcgggtggtggagttctcggccgccgggatggggctggagggcgccgtcccggaggacaccgtcgggaagctggcgcggctgcggtcgcttgacctcagcggcaaccgcctcgccgcgctccccaacgacctgtgggaggtgggcgcctcgctgctggagctcaacctctcccgcaacgccatccgcggggacctcccgaacaacatcgtcaacttcgccgccctccaggtgctcgacgtctcccacaacgccttctccggcgcgctgcccccggcgctcggctccatcgccgcgctccgggtgctcgacgccagccacaacctgttccagggccagctcctcggcaccgtcatctctggctggaccaacctctcctccatggatctctccggcaatgcgctggacggcgacttgccggacctctcgccgctactgtcactgtcctacctcaacctgtccgggaacaggctccggggctccgtcatcggagcgttccatgagcagatgaaggtgatagacctcagcaacaacagcttctcggggctaaactttagcagtggatatgcaggctcatctttggcatacctcgatttatcaggcaatgagcttaccggggaattcagtgttggcaacaggtttcagaacctgaagcatttgaatcttgcattcaaccagttgtccgtggcaaatttgctggtgtccatgggtgagatctctggattggagtttgtcaatttgtcgagcaccgggttgcatgggcaaattcctagggagttgtcttcccaattgtctagattgaaggtgctcgatttgtcgcggaacaatatcagtggagtagtgccagacttgagctcgattcgcctgcaggtgctggacttgtcggtgaacaacctcactggggagatccctgtggcattagtgaagaagttggtgtccatggagcggttcaacttctcatacaacaacctcaccgtttgcgcctccgagctctctcccgaggcgtttgccgctgcctttgctaggtccaggaatgattgtccgattgccgtgaatcctgaccgtatccagagaagtgggggcaaacgcaaggggatgaagttggcgttggccattgtgctttcgctcttcttctcggttcttggtctgctctgcgtggcagttgcatgtcggcggcggaggaagaggggtgatgtgctgcctgctgtcaagcaggtgtcattcaaggaggaaccagggatttcaggcccatttgcattccagaccgactcgacaacatgggttgccgatgtgaaggtcgcaacatctgtcccagttgtcatctttgagaagcccttgctgagtttcactttcgccgatctcttggcggcgacgtcaaattttgataggggaactctgctggcagaggggagatttgggccggtgtacaggggatttctccctggtggaattcaggttgctgtgaaggtgttggtccatggttcggcaatggctgaccaagatgctgcaagagagcttgagcggctgggacggatcaaacatcctaatttggttcctttgactggttactgcttagcaggggagcagagaatcgccatctacgagtacatggagaacggcaatctgcacaacctacttcatgacttgcctctaggagtccagaccactgaggattggagcactgacacatgggaagacaacaatggcggtgttgccaccgaaaacatcacaccagagggtaccgcgacatggatgttccggcacaagattgcattaggcgccgcgagggcactggcattcctgcaccatggctgcatccctcagatcgtccaccgtgacgtgaaggcgagcagcatctacttcgactgtgggatggagcctaggctgtctgacttcgggctgtcaatgatcgccgggaccagcacggacaacaacctgctgcaccattccccgggctacgccccaccggagttctccgactcggagaacgccatggcgacagcaaagtccgatgtctacagcttcggcgtcgtgctgttcgagctgatcactggcaagaagccactgggggacgactaccccggccagaaggaagccagcctggtgaactgggctagggcgatggtgaaggcaaacctcgggccgggcatcatcgacccaaagatccgcgacaccgggctggagaggcagatggaggaggccctgaggatcgcctacctctgcaccgccgagctcccctccaagaggccggccatgcagcagatcgttggcctgctcaaggacattgagcctaaggtagcagagcaggactgaaataatattactagtgtttttggggtattgaaaagcaagtgtaggcagtgagctccttagttgttttggcatagtggagcttcactgcattgccatgccctgctctcctctgctgggatatatctttttcttcttttttgtttcttttttgttcttccacttgttgagatgttgcaatacagctttgctacacctgctccttactaacaatgttactactaccattgagtcatgacacatggaagatagctctctctc

SEQ ID NO: 26659 - DNA, 721 bp, Oryza sativa
  ref <308>: DATABASE ACCESSION NUMBER: AK102101
  ref <309>: DATABASE ENTRY DATE: 2002-08-28
gattcagatccagtccactcccagtctcccaccgtccagtcccagacagagtcccacaggcgcacgattcctcacctcctcatcggccggcgccgccgtggggccaagccgtcgtcgcctcctcgctgcggggccaagccgccgccgccgccgggaccaatcgcctcctcgcccagtcgccacatcgccgccatcggagcaacccacgccggctctgccgcgccccattgcctcctcgcgccgtcacgcgccacatcgccgccgccgggccaagccaaccaacgccgccgccgcggcgccccatcgcctcctcgcctgcctcaccgtcaagccccaagatttggtatgacttgtagagtcctcactgatttgatttgtagagctcctcactgatttgattttgttttgtgtatatgtgttatgtggcagatttgtgatgaattcctctcatgcaagtagcagcagcagcttcagcttatgcagtgcgagtgtagcagcattgcaacaccaactcagcattgcagacttcagagtttagactaaaaagattggttgacagtatctggcatgcctagtagtgctttgccttttcacttcacatgatgatggatggtatttcataatatcagtatgtccaagtttgtggttgtttattattaattgctaaattttgaaaatgttgatatgttctattagaaaaaataatgagttatatttcttc

SEQ ID NO: 26660 - DNA, 2556 bp, Oryza sativa
  ref <308>: DATABASE ACCESSION NUMBER: AK102102
  ref <309>: DATABASE ENTRY DATE: 2002-08-28
gccgccgcggcgtacgggtctcaggaggaaggagatgaagaggactggggccaagaagatgtgggcaatgctgctgtcaaggttatgtgtcgtatatgcttttcgggagaaaatgagggtagtacaaaagctgccaaaatgcttccatgcaaactctgcaacaaaaagtatcatagaagttgtttgaaaaactggggggaacatagagatcttttccattggagctcatgggtctgcccctcttgccgcagttgtgaggtatgtcgacgacctggtgatcccaacaagttaatgttctgtaaaaggtgtgatggtgcttatcactgctactgtcagcaaccgtcgcacaagaatgttacccatggaccatacttatgtccaaaacatacaaggtgtcacagttgtggatctggtgtacctgggagtggccatagcacaaggtggtttctgggttacacatgctgtgatgcttgtggacgattatttgtgaaaggaaactactgtccagtttgcttgaaggtttatagagattctgaagtgataccaatggtttgttgtgatgtttgtgaaaagtgggtacatattgagtgtgatggcatcagcgaggaaaaataccagcaatttcaatcggaccaaaaccttcagtacacatgtggagcatgccgtggcgaatgctcccagattagggacacagaagatgctgttagggagctttggaagaggcgggatgtagttgatcatgaccttatggctagtttaagggctgctgctgcactgccttctttggaagatgtctcaccatctcatcctaactcagatgatgaaaaacttggtgcatatgtaatgaaaaatgatggtagaaacacactcaaattctctttcaaaagcaacagtactaagcctgcattagattcatctgaacaagagaagaatgctatcaagagctcagggtcaaataagaagcattccaagaagaaagggaatcaaaataataaaacagttagcgagcaggatgagatatttttggagaaaaggaatgaaactaaatcattgggtagtttgggagatcaaattgcagatgttactcgtgataagagttcatttaaaaatgatgccgatgcgtttgtgctgtcttcagctcaaagtgcagagaaggctttgaaattacaatctgccaaagctgcagcacataatgctgatatgatacccaaagtcaagattaaaggaactaaggttccgagtttgcatttcaaggatgtaggcgaggaaaatgctgccaagagtgacacagggaaaggtaccaagttggttattcatatcggttcacgacacaaaagtaggagtggctctcccaagtctgaaatgtccaattctcagaaagagcaagagctggtttcaatgcatggagggaaagttgatgtgacaagccagttcaaaagctctagaagtgaaataaaagaaaaaagtgtaatgaagctagttagagagactggagtacaacaaaatagccttctaggagatctaggtgcttcaaaaaagcatgcaaccggaaaaaggagcaatgctatagtttctgcaatggaaaatgcaagtgaaagtggtaccagaagcagatcgtttggacaaaaacaatctgttaatcatctgactgagaaccaggggaatgcttcattttctgtgaacaactctcctgacagcttgaagccatcattgctcaagcttaaatttaaacgtccaatttttgagcagccaagcactcagtcttctcaaccagaggagccgggcacctgggcttcaccgcaagaggagttaaatgttgctaaaggccagagatcaaagaggaagagaccttcattagacaagatggatggttcggaaagtaaggctccagctgccaagagacatgagcagagcacaggagaagaagcaatggatgcgaactggatcctgcgcaagttgggcaaggatgcgattgggaagaggattgaggtccagctagcttctgatggcaaatggcatcagggggtagtctcgaatgtaatcaatggcactttgtgccttcagttagataatggtaggtctgagaacatagagctgggaaagcgggcaatccgcttgatagcacaaaggtcaaagagcggaaagcgatgaacccattttgcgcctgcctccctgttcttgctctcagtcaacttcctgccaccagggtagtaagcagacctctccaggctccagcatttggatcgtcgcagtctctgattcatgggagattgggaggtctgaaggtctgccgttcttgctgccttaagctgactggatgagacgtagaaatgcaacatcatccgttgcgcggtgtctcactagcctagcatgtaacagactagtttttttttttgtcctgctgcatgaagcgcattggcttcattttgacttctggtagtgtaggaacaaacaactgggaaggctttttaggggccaccctggatgtagaagaaatgcctgatgatggccatgtacatgtagctgtagctgctgaatgagttcttttttttaacc

SEQ ID NO: 26661 - DNA, 2375 bp, Oryza sativa
  ref <308>: DATABASE ACCESSION NUMBER: AK102103
  ref <309>: DATABASE ENTRY DATE: 2002-08-28
gggtctggattccatcttcctcctcagctcctcctcctcacaaccagcttcttcctcctccacctcgcccaattctctcctccacggctccacctctgctcgatcggatcaagatcagaatcacgatcagatcgatccgcccgccatgagcacgctatccgccggggtcctcctcaagctgctcgacggcatgaaggccggcgcagccaagcccgtcggggagcaccgcaccgcgctgctccaggtcaccgacatcgtccccgccgacctcgacgacaaggacctcctcccccgccatggcaagttctacgtcaaggtctccgactcctcccactccatctacgccaccctcccgctcccccaggccgatctcgtcctcagcaacaagctccagctcggccagttcgtccacctcgaccgcctcgacccgggctcccccgtccccgtcatcgtcggcgccaggccccttcccggccgccacccgctcgtcgtcggcacccccgacccggccacccgcgccaagcccgccgcgcccaggaggggctcctggggccctgagaaccatgccggaatcctcgcctcccccagggtcatcaagcccaccacgctcaacttcgaagacaggacgcccgtcaaggagagaccgcccgcgccctcgccggcgcggagcaccgcctcctccctcaggaagagcagcagcgtcctccccaggatcaccaggagcaagagcttcgtcgccgacagggctcctgaccaccccaagatccccaagagcccattccccgccgtccgtaacccaccactatatactccctcttcaattcgattagattcgatttgattcttctctgaataattgagcaattggagtttcatccacaagttgtgataagagacgattgattatctgtgcggtgcaggagaagatctcaatgagctgctacacagcttcgcgggcgatgagcagaagagcgccgcccaaggaggaagaaccctcctcaccgtcttcggatgatgagctctgcagctccgcgacgtcgtccaagaagaggccgtccacgagcactcgcgttccggtgcccgggaagctcaatctcctggggaaggcaagtccctcaactcaatttccatcctgaattcgcagcgtcctgatgcagtcgtctgattgggttgctgatttcacttcgttccttgattcaggaagccatggagcagagggagcaagctcagaaggccgccctcgaggcgctgcgcaacgcctccgccacggacaacgtagtcaggatctacaagatgttcgctgaattgagcaagacggcgaggcccgacgcaccggccacctgcttcgagagcttcctcagcttccaccaggaggccgtgcaggccgtgaccgacatcgagtcgatccaggcggccacctcgatggccggcgccgtggcagccgatgagccgccggtcttgcaggagattgcgcagaacaggtcgtcgttgtccaagaggagaggagccctgggcgtgtccaagtcggtgtcgttcgcgccgggcacgctggatgacggcggcggcaagaaccggagctccaacgccagcagaaagtgccttgtactagacaagatcggagaagacggcgacgagaagcgatcttcttctggtagtactaccaccggtgctctcgggtcgtcgttgaggctggcgaagcagatgcaatgtgaggcgtcgagctggtttatggacttcgtggaggctgcgctggagactggcctgaagaagaagagcaaggcgtcggcgacggcggatgggcggaagcagagtagctgctgctgcccgcagtcgctgatactgagggtgatcaactgggtagagatggagcagagtggcgatggcagcagcaggaagcccagtcacccgagagcggctgccattgccaggaagcttaggataaaggccaagaacccttaattcctgctagtttattcttttgcttgttgtaggcattgagaaggttatctgtagaatctgtagatcaaggaaaggaagttccaggatagagatgcggattcttttgcttcatggtatatgaagctgttctgccctcctccctgtgacataaattgacatccatactatacagtagtcaatcagccacagaaggaagaaaacacctctgcttgagcaagtgctacgctctagtttgagtacaagtagtaccatccgttattattcattttaacttgttttttttatcattgtcttatcttgtgttttgcatgatgggggtaagacaaccatttgcttgactaattcaacctgctttcgcggtgatagaaattgttctgatcacgtggcatgaatgctttgctatacatgaaagtttg

SEQ ID NO: 26662 - DNA, 4433 bp, Oryza sativa
  ref <308>: DATABASE ACCESSION NUMBER: AK102104
  ref <309>: DATABASE ENTRY DATE: 2002-08-28
gacgtgcagcgcaagtcgctccacacgcgcgcaccattcgattccctcaaaatgcaaaaaaaaaaaaaaaaaaaatccaaatcggcggtgagccggcgatgagccgaggcggcggcggcggcggcgtagagggagcgggagccggcgaggccgcgatggctccaaactccaaggcgcaaaggttggtgcgtgcggtgcgacgatctccccccctcgccttcgccctctccccgattccggccattttttccggtgttgttacctccctcgattcgcggcggattcgtccaagttcgaaacgcactgttcgtctctgggtttcgctttggctgttggtttgatccgttggctccatctcgatctcgtgctgtgtttttctttttcgtcgtctaaatccgtaataatattccgtggatcttcgtctccgcccaactgccgtaacagcaacatcacgaacggcttgtaagactctctgtggttttgatgattcaagcggtttgatttgacgggacaatcttggaaaaaacgatggagcaggagtgtggatgttgcaaactatggttaaaggccacgtattttggctctatatgttggtctagctggtactaggtgactactacttcctccatttcacaatataagtcattctagtatttcccgtattcatattgatgttaatgaatttagataaatatatatatctagattcgttaacatcgaatatggaaaatgctagaataacttacattgtgaaacggagagagtactgtttagtgaggaaaacacaccagtctaatcttcaattcttcatttaggaacaaaaactcttgaaggatgatatatgcaggtcctcatcaggcggcttggatgacgtggggggtgatgggtagtacttgtctagtgtccagaagcccaggcaaagtgttataaatgatatctggagcacgatggaatatgacaaaattcttgggatgctgaatgtattggagtttctcctaaatttttaggagctaactggcagcagtcagctattacttctgccataaaagcaggtaaatcagcttagctgaggtagtgataaggtgaacctttgataggtatggagaagggggaggctgaatttttgcacattccgttaataataatgaatcatgctttggttaattcagctagatgttagctcacctacaaatatgcttgctagtttacagtctactattttttgttattcatatctgtcttcagagttcagtttgcacatgttcttcagaacactaggttaaataatgcttggaatgtactgctggaccttaagcatgggattacctcaattttaaagaaagtttctacgtggtaaaagctcttagtgatcaggatcttttctcatcctatttgtgtctgctgactccataaaaaacaaatccctcaaagcaaaatagcatttacccagaatggttctaaaacttctcatccaggaagtaacagaatatgacaaatatcatcttgttgatccagtggtgcattgttaagctcttccattgtaaacagaacttgtgaactcatgagcaatggtaccattaaggccagtggcggagccagaaattatataagactagggctaaggtaaggcttgactaatggagtattagttttctgaacaatttactcaataaaatttaagcaagtttttgaaggcaggcctagggctcaagccctagctgccctaggcctgcctccacccctgattaaggcccggattaagttcaaatgaagatagataacttggatgcactattcgtttgtcagtctagctaaagttgaatacaattaccttttggactgctcatacacatggtgacatggatgcgccttcttgtattagcatctactctcactaatggtataactgaaatatgtatattctaagtgctcttaggcttgttggttctttaaacattacctgtagtaataagcattatgtaaccatgacaacttttttttttgtttttagctaaagttgcatggacagtgtattaaccaattgttctgatgagtgatgacttcatgtactaattccagctatccaaatgaacaatatgaaaataaggcagtttacagtttgatggtctttgctgcggattttacagtctgtatccaggtatagatgtatagggatgccagcatgtatattctttccatagtgtaatgcgataggttttattcattattgatgatagaacagatttagcctgacatttcaattctatagtgctgattctattcttcaccactccttaatattactgtgtgtcgtggtggcatttgtctaatccatcattccagcttggtgacactaaacatcttgagcataatttggtgagcttgtaacggaggctgctagactaggaagccccacaactagagcactcatttttttcccgatagaagtatatatacatgatttgttagtctttttcagtggatacaccaataacattaagattttcttgcgcatacactgatacacagctttagcctcatttctcaaaggttgaccttcagcactcctcacagcttcagattttatggttttgcctctctgcaatctttccttgagtacccctgccccctgagcatttgacttaatttaaagctagtatcttttttggcaggttacaagttggttgatgcatctactaatgcgtataacaatattccttgtcggtttaacagttctttttctgcaaatagagcaagcatttgcctttcgttcatgcttgacaagcacagatatcaacattgaattgaccagctttgttctggcaagttcatctatttatcataatgaagtaacaattaagagagccgaggaaagaaaacagaactgttacacattaagtttaaagaaaatgcagattatcatatcaaacatgattaaaggtggcatggcagaatcaatctatatatgaacttgaacaacaaataagcttacagaaattgcttctacttgtaaggtaatgcagaaaatgatcatcagcattctgttggtaatcttatcctgtaagttatgaactattgcaaacttgagaacttgtctcaatattttgaaaatgaatttatcatgtaagttacattgtcattcatcgatggacacctcaatcactttgatgcccttactatgcccgagatgtatttttcaacagagaacttggacgtggagtaactttttacatctttatgggtgctttcttgttgaatatttttttagatgtattcattcaatcccattagatcatgctccatatactgagagaaaataaccaaacactgatatctcagacttggaggtagaagagcaaccaaagaagggctccttctgattgaattctagcttgcctctgttgcaatcataggccagagacaaaagactcatattttctggtacggttgttgtttcttgaactatctgtcaattcatccaggaattataaggttgggcaaaagcctgttgccttgtgttctgttattatactatcatatactagtctatacatcagtttccttatgtcagccctgttggataaagaaaaagataaggaagtgacctacccagcccatactcaatgtatcactagctgtttactttatatttcttttactgaaattaaatcctactgttttggtacttattcagtgattgatttttgcagactaccctgtcatttgtcactctagaaatcagttgatgccatgcttccaatggtaaagaaagaagggaatatggtaggcaaagcatgagggacgcatggaggcgtacttccaagttctctatatctcagagggactttgcacgcaaacggaagtacttgtgcaggcccatgcccccatatggtactttagagtaccgcactgtaacttgctccatgatcaaagtgccaaacccccacactgtagtaactcacagtaaagacagtattgcctctgcttccctcttggccacttcaccattgttcctgcaagatgatgacgatgatgatggagagaatgtgataggggacttggtgtcggcagaagatggtagctgcagatgcaaggcacattcagttcaaccacttcggcattgtgtcctctatataaaatacttatggtttcctgtgtcttctgcctgtggtgtttcgagagaagataaatatgcagtgcagtaaacaatagttgatgatggatcttgattcttaaatatagatgaaggccggaaggtgctgagattctgcttcctggggtcttgaattcttgaccaaaaggtcagtctttcaggatattttgtcagggagttgcgacaataaacccagaacaagtttgtgatctttgtcagtttctggtacctcgaccgaacaagttttggtttattaagaaacgcacggtggtaagcaagc

SEQ ID NO: 26663 - DNA, 2637 bp, Oryza sativa
  ref <308>: DATABASE ACCESSION NUMBER: AK102105
  ref <309>: DATABASE ENTRY DATE: 2002-08-28
gtttggtccacaagagttaacaaaagcatcccaccatctgaggaccttaagaaccctcaatcatatgttccaatgccaacaacttcagatgagcggagttcttctgagtgcagtgttgatagggcgaaccgacttagctttgacccttatgatcttccaaatgatgtcagacaattggcccaaatagtttattctgctcatggtggtgaggttgcagttgcattcctgcgtggaggtgtgcacattttttcaggtccaaactttgaacaggttgatagctatcatgtcaatgttggctcagcaattgctccaccagccttctcctccagtggttgttgcttggcatcagtatggcatgacacactcaaagatcgaaccatactaaagataatacgtgtgcttcctcctgcaattcttaatgctcagacaaaggttagctcagctgtttgggaacgagcaatagcagatagattttggtggagtctattggctggtgtggattggtgggatgctgttggctgcacacaaagtgctgctgaagatggtattgtctcactgaacagtgtgatagctttgctggacgcggacttccattgtcttccaactatacaacagaggcaacaacactgtcctaatcttgataggataaagtgtagattgttggaaggaacaaatgctcaagatgtcagagcacttgtgttggacatgcaagcaagattgcttctggatatgcttggcaagggaattgagtctgccctgataaatccatcaactctgctacctgaaccgtggcaagcttccagtgacatgttatctagcattgggcctgacaaaatgactgttgacccagctctacttttaagcatccaggggtacgttgatgctgttctagatttagcgtcacattttatcacacgcttgcgacgctatgcgagcttctgccgaactttggctagccatgcagttggagcatcttctggttcaggcaattctaggaatatggttacaagtccaaccaacagttctccttcaccttcaactaaccaaggtaatcaaggtggagtagcgtctacaacagggagctcacaaatgcaagagtgggtccaaggtgccattgctaagattagtaacaatactgatggtgctgcaaatgctgcaccaaatccaattagcgggaggtcatcattcatgcctattagcataaatacgggaacattccctggcacaccagctgttagacttattggggactgccatttccttcatagattatgtcagctgttgctattttgtttgctttttcggagaaggcaatctccaaggatacctgcaaatgcacaaaaaagttctgattctagcatgcagaaacaacacttgatgaacagtaagacagaggataatactttggcagtcagatctggtctaggtgctgccaaattggaagatggcacaacttcacgtggacagatggttggagcaaagggtgctgaagaaaatccagtgggcaacaaatctgctaggataggttctggcaatgctggccaaggttatacttcagacgaggtgaaagtcctttttctcatattagttgacctatgtaaacggactgcaaccttgcaacatccgttgccttcttctcaggttggttcgagcaatattattataaggctgcattacatcgatggcaattacactgtgctccctgaggtagtggaagcatctcttggccctcatatgcagaatatgcctcgtccacgtggagctgatgctgctggccttctacttcgagaattagaactgcagccccctgctgaagaatggcatagacgcaacatgtttggtgggccatggtcagaaccagatgatcttggtccattggataatacgcgacagctaaaaatcaatggctctaccaatcgccacttatcggacatggaagaggatggcgacagctcctttgggattcaaaatctttggccaagaaagcgccggttgtctgaaagagatgcagcatttggtctgaaaacatccgtggggctgggatcttttctaggtgtgatgggttctcggagagatgttattacagctgtgtggaaaacaggcctcgaaggtgaatggtacaagtgcatacgatgtttgaggcaaacctgtgcatttgctcagcctggtgctctagctccgaacacgtcgaatgagcttgaggcatggtggatcagccgatggacccatgcttgcccaatgtgcggtgggacatgggtgaaagtcgtttgaatttgacgcctccgggcgacaccttcaccgtactaaccactctgccaatagctttctcggccaaatctgtgtaggcgccatcggtttttggacaattttgtatctaactttagattgtttggtctcaggccctccctggtatggtatcatagtttacctgcagcagtcagagcagattgcaccagcagctgtgtaaaacggtaggaaaaaacaggattaggacatgcccaaacactgtcagagtcagcagttgtgttgtgcgatccttttgtacataaatgtagtgtactaatttgcaacattggaaaagaaactccgttagatactgcttgatgtcaataatatttgctggtgattgaaaagacc

SEQ ID NO: 26664 - DNA, 1719 bp, Oryza sativa
  ref <308>: DATABASE ACCESSION NUMBER: AK102106
  ref <309>: DATABASE ENTRY DATE: 2002-08-28
gacttcgcgttccatcgctcgctcgctctctcgctttgcttcgagctgagaatgcacctaaggatggcgtcgccgccgcagcccgggccgtacatgccggacctgccggcggtgccggcgtggctgaacaagggcgacaccgcgtggcagctggtggcggcgacgttcgtcggcatccagtcgatgcctgggctggtggtgatctacggcagcatcgtgaagaagaagtgggccgtcaactccgccttcatggcgctgtacgcctacgcgtccacgcttatcgtgtgggtgctcgtcggcttccgcatggcgttcggcgaccggctgctcccgttctgggccaaggccgggccggcgctgacgcaggacttcctggtgcaacgcgcggtgttcccggcgacggcgcactacggcagcgacggcacgctcgagacgccgcgcaccgagccgttctacgcggaggcggcgctggtgctgttcgagttcgagttcgcggccatcacgctggtgctgctcgccgggtcgctcctggggcggatgaacatcaaggcgtggatggcgttcaccccgctctggctcctcttctcctacaccgtcggcgcgttcagcctctggggcggcggcttcctctaccagtggggcgtcatcgactactccggcggatacgtcatccacctctcctccggcgtcgccggcttcaccgccgcctactgggtgggcccgaggctgaagagcgacagggagcggttctcgccgaacaacatcctgctcatgatcgccggcggcgggctgctgtggttgggctgggccgggttcaacggcggcgcgccgtacgcccccaacgctcaccgccacggtcgccgtgctcaacaccaacgtcagcgcgacgagcctcctcacctggacctgcctcgacgtcatcttcttcggcaagccctccgctcatcggcgccgtgcagggtatgatgacggggctcgtctgcatcacgcccggcgccgggctggtgcacacgtggtcagcgatgctgatgggcatgttcgccggcagcgtcccgtggttcacgatgatgatcctgcacaagaaatccaccttcctcatgaaggtcgacgacaccctcgccgtcttccacacccacgccgtcgccggcatcctgggcggcgtcctcacgggcctcctcgccacgccggagctctgcgctctcgattgcccgatcccgaacatgcgcggcgtcttctacggcagcggcatcggccagctcgggaagcagctcggcggcgcgctgttcgtcaccgtctggaacctcatcgtcaccagcgccattctcctctgcatcggcctcttcatcccgctccgcatgtccgacgaccagctcatgatcggcgacgacgcggcgcacggggaggaggcctacgctctgtggggggacggtgagaagttcgacgtgacgcggccggagacgacgaggacgggaggtgcaggcggcgcgggcagggaggacaccatggagcagaggctgaccaacatgggagccaggggtgtcaccattcagttgtagaagacgggaagggtgtgcttgctcgttccagtgattctgatgatgtatggcactgatgtatgttactttcaacgtttagtgttaattcggtgatgtaatgctggtgtagtttctgttattgttaactgaattagttcatcgaaaacatgagaattatctggtt

SEQ ID NO: 26665 - DNA, 1726 bp, Oryza sativa
  ref <308>: DATABASE ACCESSION NUMBER: AK102107
  ref <309>: DATABASE ENTRY DATE: 2002-08-28
gcttccctccaattctccacttccccatccatggcaaccgccgccgcaggcgatgatccaccgtcaccgccgccgccagcggagcggcccggagggtggttctccggcctggtatgcggcgccggccgcctcctcgccgccgtgctcggcccggactcccccgactccggcaccggcggctccgcttcctcctcgcaggagtcgtcgtcccagtctccgccgcctccgcgcggccaccgcggcagtggcgataatactgcgcactttgctactaacaatcagttcaaccagagcggaaaggagattactctaaaagacagtggtgtgggatccttagcacttgtctcagagatagatcccaaggatgctatactgcagatgcttttgcaagaaacgtactcaagatcggaatgtgatatactgataaagataattcacgagcgggttgtggactcagaccctgatgtggttgaaccttctattgttcttccaattgcttggcaaactagccaacagcaagatcatgttccatactcttcatttcgtccaaacacttgctctgcgagttcaaatgttcatgattgtagccaacagcttgacaacaacattgttgagaacggatggcttgaagagagtcagcatgctctgaaaagaagtaattcttgcactggacataacctcgatgagtctcactcccgaagtgtcagaccaaagctaaatgatttgaacatttcaaataggcaggatggtattcttaagagtcattcagatatagcttcatttgaagaggcaaccaccaagtaccctaatgcattcagggggataccagaagatacaaagaagctgttcaaagatatcccccttctcgggacggacaacctaatattttccaacattgtttcatatgatgacactgataatgacatatcagctctccgtggtaagcgtcctgctgtaactgcacggacctttgcttcagccactagtgaagccaaccgggataaccgttgtcctaccatgctctatccatactctgatcgggacctgacaaatacctttcctattaaggtggaacctttggatgatattgttccttttgatcctgaaatagtagtcctttcacgcaaaaaccgtaacacaggcaccatctgcaatgacccttgttctgtttcaaaacttatgtttcaagaggacaaggaggctgcgcccagttcatcaacaggcgtgccgcttgaaaacagtcctaggaattgcacaggagctagcctgcaaaggagcactcaaactaggagaagttcacctgctaatgtatatcgtcgccaatacattgacagcagaacccgatcaaggagtggtccatcacatcaaggcgaaccgatagcggttggccaggagccagacttggctccaacccaggcgaagaaaccggttgggaggccaaggaagtcaagaaggtgaggtactggaaggccagcagaagatgaagaatgcgcaagatcagaactgtaaaaggctcactccaggttcgagctaacaccagtaatttctaattaccagtattcagggagaaactgcttaatgcctttgatcgttgctatcttcagtagactaactaagcaatgctactactattctgaatttaccttcagtttcttagcacttcggaattctaaaacttttgatgagttcctttgatgtatatatatggcaagcctagcgcggcacc

SEQ ID NO: 26666 - DNA, 2703 bp, Oryza sativa
  ref <308>: DATABASE ACCESSION NUMBER: AK102108
  ref <309>: DATABASE ENTRY DATE: 2002-08-28
ggctccccgctactccgctagtaatcgcaacgcgagcgttcctcaagaacccgacgaacaagcatgaactgcctcaccatccaccgccgccgcgtcgccccttccccaatcccatccaaaattcctccgatccccgccggaatcgaagacaggagccgaccacatcaccaccccggcggcgcatcgatcgcgtatgcgctggatgcggccaaaaaaaaatcccaaaaatcagcacggatcggagagaagttatgagtcatcgtcgtcatcatcatcccatcgcggatgcaagcgcgacaaggggaagcgtgctagggatatctccaccgcggcggcatcagtagcagcatcagcagccgtagcaatgtgaggaatccgtgcgccgttcgatctccactggctcgccttgcagcgttcaagttcaaccatgtctcatttcaagagcggctcaagggtgaagtgcacgatgcttacagttctgtgcggtaaggtaggcaagcagcggacgccacctggtccagtgcccgagtcccagcggccgcggccgtcattcccattcctggagttgatctcgtccgggaggttggatgtgcacacgctgatcaatcctacggttgatcaatttctggaggcacaacgggctttgcagccccgcttcatatacctccagggacagctgcttgacaatgaggaagaaatcggcgcacttgtttggggcgatgctgatgtttctgatccacagacatttagttcactcatttgttcgccttttcctaccatagtttatttggaagttccaagtggagaaaagattgctcaatctcttcaatcgaaggggatttcatatataatgtattggagatattcattatcatcctatgcggcatctcattttcgccattccttattgtcagttgttcggagctcctgcagccatgcatgggatgcatttcagcttgcatatgcttcttttgaacaatactgtgtaagaaataatgacgtgcaacgtcttatgcttgggcctcatcttcttggggatgctccaaggatatatatcacccctcctggaaacaaaatggctgaggaagaagatacctctgaatactttccagacataaagatatacgatgaagatgtgcacttaaagcttcttatctgtggagcacattgcacccctgattcatctatattgaactcactagaggatggtttgaatgctcttctcaatattgaatttcggtggtgcaaactccaggatagagtcagcgctgctcctcctcttcatgttgattcagctctgttagacggggtggttacaatatgttgtgatatcactacatccagttcttcacacgtgtcactgcttctttctggcagtccacaaacctgttttgatgacgagcttttggagaagcatattaagaaagaacttattgagagccgccggttagttcgtgttgtctcggttagcgaggatgatggaccatcttcagccgagcctttgacttcaatgtccgtggcttctggagcttctacttttgaagtgttgatgaccttacctaagtgggcagcacaggttttgaaatatcttgctcaagaaacgtcttacaaaagcctggttccacttggaattgcttctgtaaatgatactccagtttcttcgttcgataaagaagatgtggatcggcttcttttcttttgcacaaaccaagatgaagatgaagctattggaaatggtctatatcaccatctgccaagatggtctgcatcccttgcgaaggacagagtgaagagaaattttgtgtcaaaaccagctaggtgaaggatacaagggcaacggcaatttgtagttgtgcaaaggtgttgtcagtgctgaatgttgagagaatgcacaactcacttgcacatcaacaagcatcgcaagggcgaggctctatgttgagcgaatccaaatttcggaaagcaaaacaggctgtgcagcccaacttgatgtacctccagggtcagcagcttgagaatgaggaagaaattggtacacttgtctggggcgaggctgatgtatctgatccatagatatttagttcactcactagtccaccttttccgaccatagatgctatgtgatccgctgcggcggcagcattagcatccgcagcagctgtagcaatgtgaggaattggggagatccctgcttccttgcgcagttcgatctccactggctcgagcggcctttgcagggttcaacggttgcggatctgtggtgtttttttgttcaaccatgcctcatttcctgagcagctcaagggtgaagtgcacgatgcttgcagtgctgtgcggtaaggtaggcaagcagcggacgccacctggtccaatgcccgagtcccagcggctgtggccgtcattcccattcccggagttgatctcgtctggaaggatgctagttagttgggctaaattagcagcaattaaatcttgccagaagagcagaaatgttcccgacacattaagccggtgtttgaactgcacacaacgaggaagccagtcctgtggacacaagcaaaagcccaatatacttaccccgtagaaaatgttaggcgattttcttagggcttctataagaatttgtgggacacacatatttcccgaaacactttttaccatgcaccctagtaagcttttctcaatcatgactaaattagtact

SEQ ID NO: 26667 - DNA, 1713 bp, Oryza sativa
  ref <308>: DATABASE ACCESSION NUMBER: AK102109
  ref <309>: DATABASE ENTRY DATE: 2002-08-28
gagtcctgatgagtctctctctactctctctcctgccgcctcgccaaaacggaaacgagagggctgagggctccatggagatcgcggtttcgatgtcggcgaggcgccgtgaactcgcagccggcggtggcaggccagccgttgggcgtgaaggaacagtagcgggctaatatccggccacaagacggcgaccgccgccgggggagtgccgcttggtggcggtgcgcgccacccgttcggcggaatgcccagcgggacttcgccacggacgggcggctcgccgcacgccgcttcagtcgatcgcgagcacgatccacacctcgaggatttgtaagtgacccaatctgtacgggattccaactaattcagaattcaagtccgacgggggcggagtgcacggggacctcaccatcactgcagcgaggatccctcttgttgcgtctgctatcgattcttcgatttatgaggtgttatgtgcgcaagtacatgcaactatggacaaaattggaaccgagctacgattacacatgagacggacgacaaccactcttgcactgcgtaaggaggttgaagttgatggaccgtggaccgctgttgatattgttagcgacatcaggcatgtcgaccacacatctgttggtcatgctgctgctgctgttgcacttctgtggttggccaaactctatgtttgcagtcattctatccatgtttgggagtgtgaaggatgatgcattgaaaaccatggatgcaatgtcaatcccagctgtaatatcaagtgggattgctgagaggatacccatggtctgatgctctgcaaccggtgagggtagaggtacagatgcatctggcctgctgttgctgtcaatcatgctgagtgggttgtggcatgaaggaactgttgaaggtaagtagctacttccggtgaactggatggtggaggagatggcatcggtcattactgatgatgtgttatctgaggtatgctgacttctctgtgtggtctgcgagacaggggcagtgtaggcttcatttgtgctggacaagggaggagatacccatgagtgtgagagcgctctttgtgccgtggaattggttttcttgaaaatcctgcagattgcccaggaatcctgctcatgataagaaaaaagaagaataagattagggcagtgttttcaggtaaaaagtgcattcaacttatcttcacaaggaaatggtatatgaaattgttggtgtcatactgaattagctcggaaagcactacatatgctaggccttttgcagtttatattgcaagttttcccattgtaattatgggcagacatgtattgctcagatcatctaccttagtgccagttttggtagctatgcctaagctacttttgtagcatatgtgttaaggtttgaagtttttgttttcaaatgttgcagcatgccagttgcttacatttggtggaatgatcttctcgagtggcttcttctgtggcaatgaagggtcagtgagcgatggcagccggaactcgtgcatcatccagtcagttttgacgcctttagctgctctgcccttgtagaagacaagggacttcttcaagcctatgcactttgatccatcggaggagtagattggcctatcggttccagtggccttccagaaacctgctccagtcaccctgtttggccttgtgctgttccggtacttcctatcccttgggcagt

SEQ ID NO: 26668 - DNA, 1577 bp, Oryza sativa
  ref <308>: DATABASE ACCESSION NUMBER: AK102110
  ref <309>: DATABASE ENTRY DATE: 2002-08-28
gggttacaagctgcagaagtgcagaggccattccgttccgcgtgtgtgcgcgtccacccgcctccccctccccttcttcaccgagagtcgtcgcggtcactcgtccgtatctgcctcggtgggggcggcggtgcgtgcgtgcgtgcgcggccgctgtatttggcaggactcctcgtctcgtcgtctccctctcccccgagaaaaccccaccccactactcctctccaccgccatcattgtcggcgcgagcgagagcccaagcccaagccgacccccgagggaaggggaagacggggccgagatggcggggcgctacgacagcaaccccttcgaggaggacgacgtgaaccctttctcggaacaagcgcgtggtaaggctggagggcagcccagctatggcggcggcgcgttctacatgccgaatccacggaatgtgccttctgtgtcgtcgaattcgcggctttcgcctcttccccctgagcccgcagcttttggggctacggtggatatccctcttgactcttccaaggacctgaagaatagggaaaaggagctgcaagctagggaagcggaattgaacaagagggagaaggagctaaaaaggagggaggaggctgcagcgcgagctggtattgtcattgaggagaaaaactggcctccatttctgccactcatccatcatgatatcaccaatgagataccgagtcaccttcaaagaatgcaatatgttgcatttgcatcatttcttggattggcttgctgtctcttctggaacgtcatagcagttacttcagcttgggtcaagggggaaggcgtgaagatatggttgctggcaatcatctacttcatctctggggttcctggtgcatatgttttatggtatcgacctctgtataatgctatgaggactgatagtgccttgaagtttggattgttcttcttggtttacctgttccatattcttttctgtgtattttctgctgtggctcctcctgttgtcttcgaggggaaatcattggcggggattttaccagcaattgatctcatcagcaagaatgctttggtggggatcttctactttgttggatttggattgttctgcgtcgaatcattgctcagcatctgggttatccagcaagtgtacatgtacttccgaggaagtggaaaagctgctgagatgaagcgtgatgcaactaggggtgctatgcgggcagctttttaattatcagaaaagattattggtccgactcatatctctgatggaatggatagattgtggtataaacgaacatatatgttttccctgtttgctgactacaatttcaaattgttagtaggttacagtgacgttgtatgacctgtcctcttgatccatcaatatagagaatgtgcagttgttacttgttacaggctttacagctggtgttactagcgtagaacattttcgttttcgtctgggctaaaaaagtataaatcgacaccaatgaatgattcagcccatgaaagaattctctttgttatatgtacaggaaacaaatcagataggcaatcaaatgctatttgttggtgactcgtcc

SEQ ID NO: 26669 - DNA, 1907 bp, Oryza sativa
  ref <308>: DATABASE ACCESSION NUMBER: AK102111
  ref <309>: DATABASE ENTRY DATE: 2002-08-28
gactacaagcggagttccgagcagagcggctgcctctgcctttgccttgccagtcagtgctcgagttcgtctcgctctccgcatccgcaactagggtttccccccaagcaagtcgcagatggaggcgccggcgatggagcccggcgagatggaagcgatgctccgggcggcagcggagttcgcgtcctacccaggagcgcatggtgatgacaccgtgaggcagttcctggagcaataccctctgcccaagctgttaggtgcattgcagagtgaggctgatgtacctgggatggatgaaactattgccgcatgcttggacaaagtattttcttcgagatatggagcatcatttctgccaagctatggtgcatttattcaagctggattgcttgcaaactcgaagaataccagacaactagcctgcaaagctgtgatacatcttcttgataaggctggagatagtgctgttgttgtggacacatttgttcagcacaatctatatcctcttctgatgaattgtttaactgagggagatgaggagatttcagcaatttctctggatggcataaaacgtttagcacaaattcctaaaggcattgagatcatatttccaccaaatggtcaagggtctgtgcaactccacaaagtggcagctcagtcatcgtccatggcacgaattcgcattctatcactgatagctaagctctttgctgtgtcaacctatactgctactgccatttacgactcaaatcttctcagcttatttgaggatgagataaaagatagaagagacatgcttaaaaccctgagtgcactagaggtcctctatgagctcgtggaacaccctcacagcaatatcttcttgctgaagactaatttacttcaactcatggttgatgtgatcaacgattcatcggctgattctattgtacggtcaagggcaacattgattagtgggaggcttctttcttcagctgatgctttcacgacaatagatcgaaactgtgttgcaaatctgcttctagctatagacaaattattgaagatggaagaaagtcaaaatacagatgaaactgagagtgcattggaggccttaggcctgattggtacaacatctgctggagcatgtttgttgctcacagattcatcaaatgctgccagacatgtggtagaggcatcctttggtcggcagggtagaggtaaacagctggctgctttgcatgcatttggaagcatatctggtgttgatcggcaggaagaccaaataaaactggataatcaagcggaagaacgcctgaagcgttttgtctataccacagcaagaaacagtccaaaactgacaccttcggctcttcttctgtcggtgttacaacaagatccagacataaggataactggttacagagtaatatctggccttgttgccagagaatggtgcctaatggaaatttgttcaaagttggacataatcaaccttgttacagatcccaaaatggagatgacaaaacttggcatggaagcacggcatgattgttgtctggcgatcagcaaggcattatcatcatcacatcttcttcatgaaccaagcctttctgaactcattggaaagttgaatgaagcggttaaaaggggtccttatctttctgagaggaagcgtgtggagccacagccggtggttgtcccggcagagaggttttaactctttacctgaagcacaggccgtctaacctttgcaacccagagaaaactgaggatgcctatgcagctggctttttgtatatggttaaccaaaaatagagatgatggatgtaccacctgtgttcctggtgcgctaaacatgtctttgacgaccgaagatactgttatttcagctaagtaatataactcagtggatgctgttgggaacg

SEQ ID NO: 26670 - DNA, 1473 bp, Oryza sativa
  ref <308>: DATABASE ACCESSION NUMBER: AK102112
  ref <309>: DATABASE ENTRY DATE: 2002-08-28
gctttttctcgtctcctcctatccgcgtccatctctctccccgtctcgattccccaccagcggcgaaaccctaaccctagagcggccaccgccatggagaagcgcgcgaccaccaccagggcggtggtgctccgcctcgacgacctctcccttccgccgcgccgcctcaccgtgccgtcccgcctcccggtctcccacctcctccgcgcgctgccgcagccgctgctcgagtcgtcgtcgttctacctcaccgccgatggccgcccgctcctgctgtccgcgcccgtggcgtcgcttccgccgtcgggttcggtccagctccgcctccgcgcgctccgcggcggtggcggcgacggcggcgccacgggcgccgagtcccgcgactgctacctctccatgtacctcgcgaagaagcccgacaaggccgaccccaacgaggcgcggctctcccgcttcacctgctgcgcgctctccggcgagccgcttgccgcgcccgccgtcgctgatcgcctgggtaacctcttcaacaaggaggccctcgtcgaggcgctcctccacaagcgcctccccaaggcgctctcacacatcaggggtctcaaggacatgatccccatccacctgcatcctaagcctgatgccgatgcggctggtgaggaggtccggttccagtgcccggtcaccgggctcgatttcaatgggaagtaccaattcctcgcgcttcgcaagtgtggccatgtgctcagcgtgaaggctctcaaggaggtgaagacctcggcgtgcttggtatgccataaggagtttgatgaggcggacaagatgccgctcaacggaactgaggacgaggttgcggcattgaggctgaggatggaggaggagagggggaaggtgaaggaaaagaaggagaagaaggtgggaaatgggctaagtgggagtaagcatgctgccgctgccgtgatggcaaggggtgctgagaagcttgaaaatgggaagaagggggaggctccctctttgaagcggttcaaggctggagaccatgcaccagcatatgcaaacaaagaagtgtatgcatcgatttttacttcttccaagaagtcagatttcaaggagacatactcatgccggtcacttccccttggaaggaactgaagcgatcttctattgagagatggtaatggcttggaggtgaacatcctgcactgatttgcttcatagcatggttcacctgcaagtttcttcattgtaattttagttgtcggtgttcttcatgctttgattactgatgtggggctctgtgtttccattgtcaaggaagcaaagtgtcggagtatttgaaagatgtgtgaaatatgtaatagtttgataccattaacaagcaataccagctctgaaatcttctgtagcagcttgttggaataaagttgcttatttgtatatctaaggggatttaccaaaaagtaagttattattttgact

SEQ ID NO: 26671 - DNA, 4185 bp, Oryza sativa
  ref <308>: DATABASE ACCESSION NUMBER: AK102113
  ref <309>: DATABASE ENTRY DATE: 2002-08-28
gagaggatggagcaatttggcatcaggcttccacggcgaggccaatctgcatcacctgcccgctcgatccctgaaaatcttcttccgtttctctctggagattgctgacagcgaggctgcggaagcaggcgaggggttcagggctggtgactggtgagatcgatctctcatctctccgtcttgctatctttctccctatctctaagtcgatcattcctgtaaattgtattgctggtaggcttttcttgttacctttgctgttaaagccatttaggatttttctattgcctgtgacctgtttgtggaaatgcctcaaaaagatatcacagctcacaggggcaggattctaggttcccaggtgaaaagcaacatggaagagggaggaggatgaatctgagtttttttagagtatttctttttttgtatttgtaattggagaatttagattatttaccacctaattctcttgtaattgaggcattcattttctaaatcatatttcttttggctaactgcactatgagcacctgcaaacaccaaaaggtatactattagagcatgattttcatacatatataacagaagtttcagtaaagctctactgtaatcagattctgctttattgaattgcaatttctggtttagtgatacaggattttaggtgactatgcaataaggaaattcgtgcccttgtgtgcgtttgggggctgatgtttacaaaataataatcactatgttgaggatgttaaatggaacttgtttgctctttatatttagcattgtcttgcactatgtctcttaagggttatattatacgagttacatcatccagaattggactagaagtagaacttcatatttggaagtggaattaccagtctaattcggatcataatataacagtcatcatcccctaacaaattttgaccactagcagctacatggcacaggtaacaggtaatttagttcatagtatatatttgccataaggcatgcagatagggactaagcccagatcaattggtgagaggtgtggatgtacaccaccatcaccaaagttcagaaacctcttggactcaacttgggtctctatttcttctctattaatttgataccaagttcctttttagtatttgtttttgtgtcaatcaattaatcttcacaaatataacgcaagtgttcttgaatcttatataatatctttttctatgaaatcacccatttctaacaaaagttcactatttagccttaaaagtcatgtgctgattcattttccttccttatcgagtggcctatattgtatggcatccacaggtctgtcacatattttactttttttcagaaggctcagttcttacaactatggccgaagtacttctgtcaagttttgccgtgtcaattattggaaaaataattttgtttgttagtgaacacggtttgatggggattaaatcagacaggagtgtgcatcaagaactggggaagctacagaattcgttgcaagctattagtggagttcttctagacgcagagaggaagcagagtacttctagtgcactcaaggaatggctgcgaaaactgaaagatgtcatgtatgacatagatgacattttggacgatgcgtcaactgaaactttgaagcgcagagttagcaaagatgtggttactcaaaccaattgtgtacatatttctcgattgaaattgagaagaaaattgctcaaaaggaagaagaaatggagcagcagaataagagaagttcatgaaaagcttaacgaaatagccgctagtaaaaaggactttggactgaccgattggacagtgggtggtcagtgttctgaagaaccagaaagagaatcatattcttttgtgtatcaacctgatataattggaagggatgatgctagagatgagattgttagtaagatactaagagcagcagaacatcatgatatttttgtgcttcctctgcttgggcttggaggcattgggaaaactgaactagcaaatatggtgtatcatgatcaacaaatcagggagaggttcagcaagatgatgtgggcctgtgtctctaataaatttaatctgaaaaatatactacaagatataatcgagtctgccagtggtgagagttgcaagcatctaaacttggaacatttacaaaataagctcaggggaattctgcagaatggaaattatttcctggtattggatgatctgtggactcgtgatgtaaatgaatggagagagctgaggaatttgttgtcaagtggtgcaaggggtagtgtgataattgttactacacgcgaaaatgttgttgcatctatggttggtacctcagacccgtacaaggtgggtgcactcccttttcatgagtgcatgcaaatttttaccagagttgcattcagacaaggtgaggaaaataaatatccgtggttgttgaaaattggagagtccattgtgaagaagtgtgctggagtaccactggcaataaaatcattgggttctctactatttaccatgcgtgatgaaactcaatggctacgtgttaaagaagaccacttgtgcaaaattgtacaaggtgacagagatataatgccagtgctaaagttaagttacaatgctcttccagctgcccttaaaccatgtctttcctatttatccatatttcctaaggacttcgaatattacagaagatgcataatcatgttttggatggcacatgggctactgaactcgaacaaattgagtgaagaaatagatgttggtaatcagtacattattgaattgataggaagttccctttttcaagactctctaattacttttgatggaagcatgccacattgcaagttacatgacattgtacatgatcttggtagatatgttttggacacagacctagctgttgtgaactgtgaagggcaacaagtctcagaaacagtcaggcatctagtatgggaccttaaggatttcacacacgagcaagaatttcccaggcatttaatcaaagcaagaaaagctcgaacttttattagttcgtgtaatcatggttctttaagcaaaaaatttctggaagtgctgctgtccaagttattgcttctacgtgtattgattatatccggagttagaattgacgaactcccagattcaattggaaatttgaagcacttgaggtatctttacctcacctggaacaaaaccataaaataccttcccaattccctatgcaagctcataaaccttcagacacttgatctttatcgaagtgaccaactaatcgagttgccgagagatgtaaacaagttaatcagcctcaggtacctgagtttgacatcgaagcaaaagcagttgccagaagcaggacttcgtggctgggcttcactaacatccctgcagcttcactcatgtagtgaactaacatcactgtcagaagggattggctcgttgactgccctacagatgctgtggatcagtgattgcccaaagcttccttctctcccagccagcatgacacacctctccagtctgcgagagctgttcatcgacaattgcccggagctggatttgatgcatccagaggaggccatggatgggctatggagtcttcgatcattgcagatcattggacttccaaagctagagcgtcttcctgacactctttgttctgcctcgggttctcttcggtatttattgattgagcaatgccccaatctaagggagcttccaagcttcatgcaagatctcactaaccatcagaggcaggggggtattcattaaggatttcccgagcataattatataaagggatgacaattagttgattactatctccccataaaatcttcatggaggtatagagcttatgctaaaagaaaagccccacaggaagtgaaataggtatgtatggaagtatagcaaccagtgaagctaagaaatcccttttaggcaccaattcaatggatttccttttgttgcagagaggaccaaagtacacactagctgggatgaaaaacaataactgagactgctcataatttgttaaccgaataggccacaagtttgaattacgatgctcattagggtgattgtaaggttgctctttttgaaatgtatagtgatgctctgaataccatgtccctgtttctaaattgtaatgatgcatttcaaatgtgccatgtctaattc

SEQ ID NO: 26672 - DNA, 1235 bp, Oryza sativa
  ref <308>: DATABASE ACCESSION NUMBER: AK102114
  ref <309>: DATABASE ENTRY DATE: 2002-08-28
gggtttccctcctccaccgccacccccaccgccgcagcatcgccgacgagctagcccgccgccgctcgagcgcaagttgaggagaggagggatggatcggtaccagagggtggagaagccgagggaggaggcgcccatcaaggagaacgagatccgcatcaccacgcaggggaggatgcgcaactacatcacctacgcgaccaccttgctccaggataaaggttccgatgaagttgtattcaaggcaatggggagggcaatcaacaaaactgtgatgattgcagagctgatcaagagaagaattgttggtctccaccaaaacaccaccactggatctactgatatcactgatatgtgggagccactggaggaaggcttgctcccacttgagacaacaaggcatgtatctatgataactattaccctttcaaagaaggagctggacacatcctccatcggatatcaatctccgttgcctgctgataaggttaagcctttggttgaatacgagaacgaagaagatgctccctcacctgctggccgagggagaggccgtggtggtcaaggtcgtggaaggggaagaggcagaggcacacgtggaaatggttacatggactatgctgatggtggatgggaggatgaccatgctcctcctgcatatgcgggcaacgggtacacccgtggaagagggcgtggttttaggggccgtggcaggagaggtggcggctatggagcacaacctgattatcagcaagatggaggatactatgatgaggcaccagttcacgcgccgccccgaggccgtggtcgtggtcgaggccgtgggagaggcccggtccgaggtagaggacgcggtggcaacgtcaatggcgttatgcatgctactgcagttggcgcctaagctggctgctgctattccaaagctgttgtttgttggatgcctgctccaagtatgaagatgtatcatctgtgttgtttatgggttaacaccatactctgtataagcttgacattctgttagaatgctgccggattttgatttttaactaggtttgtaggatagtctctataatgtttgtttttcttccagtagtagttgcaaactaattgtagtgttcagttggtaaaggtttagagcagtgcattctttcaatttttatataaaccgaaatcctgttgccatcttataatgtgccagcttcaaatagtgaacgcgcaaatgcagttggattttc

SEQ ID NO: 26673 - DNA, 1791 bp, Oryza sativa
  ref <308>: DATABASE ACCESSION NUMBER: AK102115
  ref <309>: DATABASE ENTRY DATE: 2002-08-28
ggaggcggggagtggggagatcgggatcggcgggggggatggcgtcgccggcgaaggagcgcgacggggatgggaggcgggcgcacgcgacgatggttggggtgcagttcatcaacgccgggtaccacgtcatcgccaagcaggcgctcaacgtcggcgtcaaccgcgtcgtcttctgcgtcttccgcgacgtcctcgccctcgccgtgctcgcgcccctcgccttcctccgccaccgcgggtcgccttcgcaggcccgcacgcctctcacctggcgcctcctcgtctccttcttcatccttgggctcacaggcatcttcgccaaccagcttctcttcttgttcggcctcagctacaccaatcccacatacgccgctgcaattcagccttccattcctgtcttcaccttcatcttggccgccctcatgggcactgaaacggtgaacctgagcacacatgagggcagggccaagattggtggaacgatcgtctgcgtgatgggggctgttttcatggtgttgtacaggggtcctgctttgttcggtagtggcgagctcgaacttgatgatgctcatagtcatggtgtcattgctgacatgtcacagcctgagccagtcggacccttgtccattgtgtttgggctccaaaagtggcacattggagtgctgtgtttgacagggaactgtctttgtatggctacttatcttgctttccaggcgccaattttgatgaagtatccgtgtagtttgtcattgacagcgtactcgtacttttttggtgctgttttaatggtcatttcaggagtttttgcaacaaattgtaaagaagattggactttgactcgatctgagtttggtgctgttgtatatgctggattcatttcttctgctcttaatactggtttactgacatgggccaacaaaattttgggccctgctatggtgtcactttatatgcctcttcagccagtggtttctgctctactgtcgaagttttttctgggaagctcagtttaccttgcaagtattattggagggtttctgatcatctctggtttatatcttgtcacctgggcccggcatagagaaaagttgacaattggagtaccatatgaaacatgtgcatctgagttgcttgaaagtacttctcatgtcgtaaagagcagaaacatggcctcggtaccctatatatcgctttctaggccgtcaaacgttccacatgaatcataactcttaagaagttggtcactgctatccccttccttactcagaatatagatagagaaagcatgcattagaaaacatgaagtgccgcaaagaagattcaagtgaacgtagttaagactatatgttaacaatgctgtcatctgtccttggcttagttccccatatggcttctcttcagaaaacagcattcttattcttcatttcctaggagaagttgatttgtgtatgagtaaagagaggttatgctcatttagttttgtgagactaacaactctgaggatgctgcctgaattgactgtcctttcaccaaatgcaaagccagctcagaagctccgtcggcttagtgaatccccaacaaggcaacaatacgtatcctgttaacctcctgcatatgtaattactctgtaaacattatacatgtgcgcaagtcagagcggttaaatgacttaaaaatctatgtatctcctaaatgctagtagtacatttgaccagagtacaccatgtactgtataaattcagtcctggaaatcatgcaagttgcaactcttgaattgatgtttttgtg

SEQ ID NO: 26674 - DNA, 1348 bp, Oryza sativa
  ref <308>: DATABASE ACCESSION NUMBER: AK102116
  ref <309>: DATABASE ENTRY DATE: 2002-08-28
gggccgtcgcgctctcgaagccgtacgctgttcaaagcgaagcgaatcgaataatcgatcatatccattgcctaattcgtagcacgtcgatggatcagctggtcgtcggcgtggcgcggccgtcgagcccctcggcggcggcgcacgtcgcgtacaagatcccggccggcgacgggccgtacgctcgggccaagcactaccagctggtggagaaggatcttgacgcgtccatcgcgtggttctggaaggcgatcaactccggcgacaaggtggacagcgcgctcaaggacatggccgtcgtcatgaagcagcgtggctaccacgccgacgccatcgacgccatcaagtcgctccgccacctctgccccaagcagtctcaggactccctcgacaacatcctcctcgacctctacaaggcgagcgggaggacgaaggaggagatcgagctgctgaagcagaagctgcggaagatctacctgggcgaggcgttccacgggaagacgacgaagcgggcgaggtcgcacgggcggaagatccacgtctccgtgaagcaggagacgtcgcgggtgctgggcaacctcgcgtgggcgtacatgcagcaggggaatttcatggcggcggaggtggtgtaccgcaaggcgcagatggtcgacccggacgccaacaaggcctgcaacctcgcgctctgcctcatcgagcagcgccgccccgccgacgccgaggccgtcctcgccggcgtgctcgccgggaggtaccacgcccgcgacgacgaccacggcgccccgcacaccggcggcaagatcctcgccaaggtggaggagttgatggcccgcatcaccggcgaggtcgacggccggagcaacagcagcggcggcagcagcagcgacgacgacgaccgcgacgtcgaggacgagatggtggagctgctagacgtggtggtccggcagtgggcggcgccgtacaggaggagcaaccggaggctgccggtcttcgaggagatcactccggtctgcagggagcagatggcagcttgctagaagatggtaattaattaagagtagtagcaaattgttaattaaattagcaggtccatcatctagtgttgggtagatatatagaatttcatgcacctatccgacgtgtcaacggcttcaactttatagggagaactagctgcaggtgcatgaagctaagcatgcatggatgtttttttttcttgtgagtgtgtgtgtgtgaaattaatagtgtgagatagagaagtataatgtgtgtgtgaccagttgcatgttttgtactctggttgtgttgttgtgtacttatgtagagttgataagtgcatggcttggtg

SEQ ID NO: 26675 - DNA, 1290 bp, Oryza sativa
  ref <308>: DATABASE ACCESSION NUMBER: AK102117
  ref <309>: DATABASE ENTRY DATE: 2002-08-28
gacccacaaccaagagaagtagaaacaaacagagagcaattctcttctcctacctagcaacctagtgcagtgcagtgcagtgcagcgaaggtttacttggcgacttccatgggttgcctgttgatgctctgcttggtttctcccctcctcctcgccacctctgtccacggcaacccgtggtatgggtatgggtatggcttgttcccgcagttctacgaccactcgtgccccaaggcgaaggagatcgtgcagtccatcgtagcacaggcggtggccagggagaccaggatggcggcatccttggtcaggctgcattttcatgactgctttgtcaaggggtgtgacgcgtctgtgctcctggacaacagcaccaccatcatcagtgagaaggggtcaaaccctaacatgaactccctcaggggtttcgaggtcgtcgacgagatcaaggccgccctcgaagcagcttgccccggcaccgtctcctgcgccgacatactcgccctcgctgcacgcgattccactgtcctcgttggtggcccgtactgggatgtgccacttggccggagggactcactgggtgccagcatccagggctccaacaacgacatcccagctcccaacaacaccctccccaccatcatcaccaagttcaagcgccagggccttaacatcgtcgacgtcgtagccctctcaggtggccacaccattggcatgtctcggtgcaccagcttccgtcagaggctctacaatcagagcggcaatggcatggctgactacacactggatgtgtcctacgcggcacagctgaggcagggatgcccccgttctggtggtgacaacaacctcttcccgctagactttgtcagccccgcaaagttcgacaacttctacttcaagaacatcctgtctggcaagggccttctcagctctgatcaggtcctgcttaccaagagcgctgaaacagcggcgctcgtgaaggcgtatgctgatgatgtcaacctcttcttcaagcacttcgcacagtcaatggtgaatatgggcaacatctcgcctctgactggatcacagggggagatcaggaagaactgcaggaggctcaacaactactaccactgaggttgtcttgtgtgctgagttttacaaggtggtggtagtggcatgttttgtttaaataagtaaagctggttgtaatgcgtcaaggctgtttgatcatttgtgttattgtgattgcgttgcaaaacgtgtatgtttaataattcaatatataaaatgagttcatttggttgttct

SEQ ID NO: 26676 - DNA, 1321 bp, Oryza sativa
  ref <308>: DATABASE ACCESSION NUMBER: AK102118
  ref <309>: DATABASE ENTRY DATE: 2002-08-28
ggggggggagagtgtcagtgactcagtagagagagaggggggcagcggaagaatggggcggtggtggccgccgacgtcggcggcggccgcgacggcggagccgcggtcggtgcagctgctgctgctgggcgtcgccctcgtcgctgcctccttctacgccggcaccgtcttccgctccccctccgcccccgcgctcttactgcccccatccgcctcccgatcgcccgatccttccagaaccccaggtgctccaaagtttacaaacagagtctctctttcttatcgaacaaaaccaatctcagttccagattatggagttgatgtttgtcctttgaaatacaacgagtatattccctgtcacgacgcatcctatataagccaattaaagaaactggatagatctaggcatgaggatcttgaaagtatttgcccaccacaagagaaacgcttgttctgtttggtgcccccaccaaatgactacaagatacctataagatggccaacaagtcgggactatgttttggtagtaacgtcaaccattcacgccttgctgaggtaaaaggaggacagaactgggtgcacgagaagggtaagctttggtggtttcctggaggtggtactcacttcaagcatggtgcatcagagtatatagagaggctagggaatatgacaacaaacagtactggtgatctccgctcggcaggagtggtccaagttttggatgttggatgtggtgttgcgagcttttctgcttaccttcttcccctagacattcatactatgtcatttgctccaaaagatggccatgagaatcaaatccagtttgctctagaacgtgggattggtgcaatgatctctgtgttggccaccaagcaattaccttatcctgaaaatgcatttgaaatggttcattgttcccgttgtcgtgttgactggcatgaaaatgatggaatattgctgaaagaggtagatcgtcttctgcggcccaatggatattttgtatactctgctccaccagcttatagaaaagataaggactttcctgttatctgggagaagttaatgaatataacaacatcaatgtgctggaagcttattgctaaacatgttcagaccgccatatggatcaagcctgaagatcaatcctgccgacagaaaaatgctgatacgaaactactgaatatctgtgactcgtatgataattctccaccttcatggaaaattccattgatgaactgtgtgagattgaacaaagaccagtcaaatatgcagaaactgccttccagacctgaccgcctatcattttattccaggagtttgg

SEQ ID NO: 26677 - DNA, 1828 bp, Oryza sativa
  ref <308>: DATABASE ACCESSION NUMBER: AK102119
  ref <309>: DATABASE ENTRY DATE: 2002-08-28
ggaaacaaacccactcaccccagtcccgtgtattccccgctcttccgccttccgcgccaccaacccgcgaaccctaaaaaccctagcgcctacgcgcaccaatccaccggagaggggaggcggggaagcggccatggcggagcacgacctgacggcgcggatggcggggcacctggactgccacctggtgctcccgctgctggagttcctgcaggagcggcacctctacccggaggaggagatcctcgaggcgaagatccgcctcctccggggcaccaacatggtcgactacgccatggacatccacaagtcgcgctacggcaccgacgacgtccccgaggacatggtcaagcgccgcgccgaggtcgtctccaggctcacctcgctcggcgaggccatcgacaacatccaccagaaccagcagattggtcctgatcagattgagactctgtatcagtatgccaaatttcagtttgactgtgggaattactcatttgctgctcagtacttgcatcaataccgtgctctgtgcacaaacattgagaggagcttgagtgccctgtggggaaagctggcagctgagattttgatgcagaactgggatgttgcactggaggagctcaaccgtttgaaggagattattgattcaaagaacttctcttcaccgctaaatcagcttcagaataggatatggctgatgcactggagtatctttatcttctacaaccatgaaaacggcagaaatgggatcatagatctgttcttccaggagaggtacttgaatgcaatccagacaaatgcaccacatcttctgagataccttgctacagcagttgttgtgaacaaaaggagaaggaatatgcttaaggagttgattaaagtcattcagcaggagcagcacagctacaaggatcccattactgaatttctggaatgcttgtttgttaactatgattttgatggcgcacaacagaaactcatagggtgtgaggaggtcatattgaatgatcctttcctgggaaagcgcattgaggaagggaattccatcactgttcctttgggagatgaattccttgaaaatgctcgtctgtttatctttgaaacttactgccgtattcatcggtccattgatattggcatgctctctcagaaactgaacatgcgctatgatgaaggggagttgtggataatgaacttagttagaaattcaaagctcgatgccaagattgattcagtgtctggaactcttatcatgacgaccaatcatgttaacatccacgagcagtttatcgaaagcttgaagaatcttaacatgcggacttccatgctagcaaagaacattgtggagccagctcaagcaatgcaacaggcaactcggtgatattgacagagaacatcaattttgaggcgcccagaactcgtgaagttagacaaactattaaacttttagcaccgacgtcgcgttattagtacttgcgattcctctataaagaaaaaggattcaacaactagtgtacagaaatatttctaattacgtatcaaagctactaatacagcaatatcccggggcaaaaggaaacccaggaggtgtgttctcgttcgctgcagcatatgctgaagtttttgttattttgtacttggaatcctgtggctgaactgctgaagttaatcctttcttttgtactagactgtactagaatcaagcttacctgattgtggtggtgtttcgtgtgtctgtgaagtgctgaagtgtggttgctatttagtttcgagttcgatgctttttgtctagattcggaaaatgttctgtcgaattattcatttttgc

SEQ ID NO: 26678 - DNA, 2415 bp, Oryza sativa
  ref <308>: DATABASE ACCESSION NUMBER: AK102120
  ref <309>: DATABASE ENTRY DATE: 2002-08-28
gtaaataaaggaaaaaaaaaacactcgagaagttcttctcctcctcctctttccccttcctctcgccgccccaaatcacccgcccaccaaaaccctcgccgcggcctccgccgccgcgggattccggccaccaccagcagccgccgcggccaccggggcgccctcctcctcctgccccccggcaccggcgaccgaccatccccttgccccctttccccgtcgggttgtgaggcgagatgagggagctgcgcgtcgccgtcctcatcatcgcggtctcgctgccgtccttctccgcgtccgaccgccaaggagatgccttatatgatatgaaacaaaaactgaatgttactggcaatcagctttcggattggaaccaaaatcaagtcaacccttgtacatggaattctgtaatttgtgacaataacaacaatgttattcaagtaacattggctgctcgtggatttgctggagttttgtcaccaagaattggagaactgaaatatttgactgtcctgtccttggctggtaataggatttccggtggcataccagagcaatttggtaatctttctagtttgacaagcttagatttagaagacaaccttttggtgggagaaataccagcttctcttggccagctttctaagctccagttgttgatacttagtgataataatttcaatggatcaattcctgacagtctagcaaaaatctcaagcttgactgacatccggctggcgtacaataatctgtctggtcagatacctggtccgttattccaagtagcacgttacaacttttctggtaatcacttaaattgtggaaccaacttcccccactcttgctcaaccaacatgtcctaccagagtggatcccatagctcaaaaattggcatagtacttggaacagttggaggagtaataggacttctcattgtagctgctctctttctgttctgtaaagggaggaggaaaagccatctgcgggaagtttttgtggatgtagcaggtgaggatgatcgacgaattgcatttggccagctcaagagatttgcatggcgagaactacaaatcgcgacggataatttcagtgaaagaaatgttctcgggcagggaggttttggtaaagtttacaaaggtgttcttccagatggtactaagattgctgtaaaacgattgactgattatgaaagtcctggtggtgaggccgccttcttgcgtgaggtggagctgattagtgttgcagttcaccgcaatcttctaaaattgattggcttctgcacaacacaaacagagcgcctcctggtatatccattcatgcagaatttgagtgttgcctaccgattgcgagattttaagcctgaagaacctgtcttaaactggccagaaagaaaacgggtggccattggtacagcacgtggactagaatatctgcatgaacactgcaacccaaagatcatacaccgtgatgtcaaagcggcgaatgtcttgcttgatgaggactttgaacctgttgttggtgattttggactagcgaagctagtggatgtgcagaagacatctgtcactactcaagtccgtggaacaatgggtcacatagcacctgaatatctatccacagggaagtcatcagagagaactgatgtttttggctacgggatcatgcttcttgagcttgtgactggccagcgtgccattgacttctcacgcttggaggaagaggacgatgttctattgctcgatcatgtaaagaagctacaaagagaagggcagctaggatccattgtggaccgcaacctgaaccagaattatgacgacgaggaagttgagatgatgatacagatagcattgctgtgcacacagtcatcgcccgaggatcggccatccatgtcagaggtggttcggatgctagaaggcgaggggctggcggagcggtgggaggagtggcagcaggtggaggtgacaaggaggcaggagtacgagcggatgcagcggcggttcgactggggagaggactctgtctacaaccaggaagcaatagagttgtctggaggtagatgacaagggccgtgacaacagacatcaaacaaacggcgtaagccgaatctgtactttttctgtaatggatgtagcgttgttctttgtagagtagatagaattgtcctggaacaacagcgtaagcgatagctggtaaatgatacaatcggatggataatgatatgatagaaaaataaagttgtatgtgtttggttgggcatggctgaaccttagcagttgtgtgctccccatgcactgttatcaaatcggccgattagtcgtaaagtcggtcaaattagttgactaaagagccatgactctgaccaaattagtcgtaaagtcggttgtaaattagtcgtgattattgtagcaaatcacc

SEQ ID NO: 26679 - DNA, 1582 bp, Oryza sativa
  ref <308>: DATABASE ACCESSION NUMBER: AK102121
  ref <309>: DATABASE ENTRY DATE: 2002-08-28
gggaggcgcatccaccggcctccgccacggggagagcgcagcgggaggcggaacggcgccgcgcggtgggcagaggttgccggccgccgttggagaccgcgggcgagccgcccgactcgccggaggggacgtgcgcgactgactggtgactggtggtgggtgagaacatcgcttggtcacttcctcagatccattcgggtcaagccagtatctttgtacaattggctgaagaaactggttttatcttaggatgaagtctaaggaaaatgggagcattcagaaggcaggaaaagttgatcactcccaaagaggcagaccaaactgggttcttgttgcaggaggagttttacttagcacactgtcagtcagacttgggtgcaaattaaagcaaatgttcgatgcaaagaagcaaaacagtatgcccaaagtaaaaagaaggcctggggcatgtgatctgcactcgaatctctaccggtttaatgaccaaacaagctgctactgttgtatgtcagcggttgcagatggagtggaaatcaggcaggctcctgggagtcctctaccaaaatcaactgacctctcccctcttcttcttgtggagataccagggccagaatcaagcaaagagaacagtggtgtcatgtggacatcatcacctgatcggctcgaagatcctcgtaaaccatttcagtactcgaacagttctggctctccctgtttttcagaatcaggttctgacatctataacaagagagaggttatacagaagctgaggcagcagctgaagagacgtgatgagatgattgcggagatgcaagctcagattgttgatcttaagaactctcttgttgtccaggtgacgcagaccaccaatttgcagtctcagttggatgctgctagccgagagctttttgaatctgagagagagattcagcatctaaggaagatcattgcagaccattgtgttgcggaagcactctctcatgataagcctttgcaagctggacattggcaatcagatgctaccaatgggcatgctaatggctatgctgatagcagtgttgatgaccctgagctgcattatattggtattgagaaaaggaagggagaggtagagaaggtggaaatgctcaagcgggaggtctgtgatctgaaggaagttattgaaggaaaggatttcctgattcagagctacaaggagcagaagctagagctctgtgggaagatcagagaattgcaagaaaagctctctgcacaagttcccaacatcttgtaggatcttctgaaagtttttaattaagttagtcatggagcagaaggggtggagttctgcttcacattaggccacggattttctggagaaggtctcagcacatggaacatcttgctaggatctttgcaggatgtttggctatcttcatttctgtgttgttaggttgattcgctttcttcagtttttctcctttgttgcttgtgctgaaagggtccctcttttcccaattgataggcctaggtagctgaactaatgatgaacttgacacgtacgtgttgtacaggtttctgatttgcaagcaaagttatgcgg

SEQ ID NO: 26680 - DNA, 1231 bp, Oryza sativa
  ref <308>: DATABASE ACCESSION NUMBER: AK102122
  ref <309>: DATABASE ENTRY DATE: 2002-08-28
gattcagacaacggtagtggagtgtgtgagtagctgaggaggtcgaccatggcggcggctagggttgcgatgtgggtggcgtgcgtgttggcaatggcggcggcgtgccaggggcggcttagggttgggtactacaagcggaagtgcgcgccggcggagtacgtcgtcagggccgtcgtcggcaacgccgtccgccagaaccccggcgtcggcgccggcatcgtccgcatgttcttccacgactgcttcgtccaggggtgtgacgcgtcggtgctgctcgacccgacggcggcgaacccgcagccggagaagctcggcccaccgaacttccccagcctgcgggggttcgaggtgatcgacgcggcgaaggcggcggtggagaaggcctgcccgggcgtcgtctcctgcgccgacatcatcgcgttcgcggcgcgcgacgcctccttcttccttagcggcggcggcatcagctaccgcatccccgcggggaggctcgacggacgcgtctccctcgccaacgagacgctcgcgttcctcccgccgccggtgttcaacctcacccagctcgtcgccagcttccaggcgaagggcctcgacgccgacgacatggtcaccctctccggcgcgcacaccatcggccgctcccactgctcctccttcgccgaccgcctctcgccgccgtcggacatggaccccggcctcgccgccgcgctccggagcaagtgcccggcgagccccaacttcaccgacgacccgacggtggcgcaggacgcggtgacgccggacaggatggacaggcagtactaccggaacgtgctcgacaggaaggtgctgttcgactccgacgccgcgctgctggcgtcgcggccgacggcggcgatggtggcgcggaacgcggcggcgcgcgggaggtgggagaggaggttcgcgagggcgatggtgaagatgggcgggatcgaggtcaagaccgccgccaatggcgagatcaggaggatgtgcagggttgtcaacgagtaactgttaatttcagaggaggatgcatctagctacgtacgtgccattttgatttgttttcttcagaattcagaagcatgaattgtcacatttcaatattatttcgttgcttgattcgagatgatctggggcaaatgttgtatttgcacctgacggaattaattgtacgctccattagagatatgatcgaataaagtttttcagtttttagccagcc

SEQ ID NO: 26681 - DNA, 1281 bp, Oryza sativa
  ref <308>: DATABASE ACCESSION NUMBER: AK102123
  ref <309>: DATABASE ENTRY DATE: 2002-08-28
gggggtgtttggctgcgtgagtgcggagcggcggctataaagggggaagaaagaaacagcgccaccccgatctcctacctctaccgctgctactcaccacaccagccgccgccgcctcctgagccacgcagtttgcaggtctgatactgcttgttggttcctccccatcaaaatgcttggctcacttatgtcttactcaccttcagtggattcaaagacggagaacactgatgagttaattgcgactggtgttcttgctagtctgcagaatttcatccgcaaatgcattgtagctgtcctctcgtatggcccaatgcctaagcatattgcatttattatggatggtaaccgtagatatgctaaattcaggagtatccaggaaggctctggtcacagggtgggcttctctgctctcattgccagcctgctctactgctatgaaatgggcgtgaagtatatcacggtgtatgcatttagcatcgataattttaagcgagatccgactgaggtgaaatccttgatggagttaatggaggaaaagatcaatgaactgctagaaaacagaaatgtcatcaacaaggttaactgtaagatcaacttctgggggaacttggacatgttgagcaaatcagtgagggtagcagctgagaaactgatggctaccactgctgaaaacacgggactggtcttctctgtttgcatgccatacaactccacttctgagattgtcaatgcggtcaataaggtctgtgcagaaaggagggatatactgcagagggaggatgctgacagtgttgcgaataatggtgtgtattcagacatttcagtggcagatctggaccgccatatgtacagcgctggttgccccgatcctgacattgtgatccggacctcaggtgagactcgcctgagcaatttccttctgtggcagacgacgttcagtcatttgcagaatccagaccctctttggccggagttctctttcaagcaccttgtctgggccatactccagtaccaaagagttcacccttctattgagcaaagcagaaatctggctaagaagcagctgtaatcacatcctccctgggaggagatagaaaccatcatacaagatatctgtagttacacaataatctgtattctcctgtggtatctcctggaatatgaaatatataaaggatagctatgccattgtatgcttgaacatgtgtatgcttgagttggtccaaatgtgtgaaatgtaataacatttggtctaagcaaagtgccttactttccccg

SEQ ID NO: 26682 - DNA, 1379 bp, Oryza sativa
  ref <308>: DATABASE ACCESSION NUMBER: AK102124
  ref <309>: DATABASE ENTRY DATE: 2002-08-28
ggctcttgcggcgccgcggattcttcgtctccaccaccgccctcgacgtcagatcaggtggtgcggtcgatttgaatccatggcggcgacggtggcggaggcgctcgcggtgacggacgaactggccttgccgcttcgcgcggtgggggatctggcggccgccgcgggggtctcgcgggaggaggtggtggtcatcacgcagtgcgcctcgcttggtgggaagttaccttttgatgatgcatcagttggttctgttcttgctgtcattaagaaagtggaaaacttgggcgatctgttcataactgaaataagcagggttcttaaagctggaggcatggtgcttatacagagttccccctctgatcaggatcccaataactctattcagcgcaagctactgttaggaggatttgttgacgtgcaagcttctgctgcaagttcccaggatagcgagcattctgttactattaaggcaaagaaggtctcttggagcttgggctcttccttccccctcaagaaagccacaaagggtcttccaaagattcagattgatgatgattctgaactgattgatgaagacagcctcttgactgaagacgacttgaagaaaccagaacttccagttgttggggattgtgaggtgggagccacaaggaaggcatgcaagaactgtacttgtggccgggctgaggctgaggagaaggtggagaagctaaatctcacatcagaacagatcaataaccctcagtccgcttgtggcaattgtgggttgggcgatgcatttcgatgtggtacttgcccatacagaggtctaccagcattcaagccaggcgagaagattgccctacctggcaacttccttgcggctgacatgtgatgatagaagggaacatcggcaacagcagcagataggaattggcttctttaatttgttcgttcgttagaatgttgaagttgctgaccaagtatgggtgtgatagtagatggaaagaagaggaccattgctgtagtccctgctagggattgggatccagtgcagttgctagggtaactgcaacttaagcagttgcactagcaccacatgataacaaattaatggttctagcacctgtatactgtagcagaaattactgtttcacgtgttttgtagcaacaaatctggaccattggatgaaaatacaaatggatctcaatccccctgctagttatcaccactttctggttcccaggtttcaggtgtgagtgtgactcgcctatgcgttctgttttgatgatatatgtaactgagaaaatactgcactgttgtttcattgtgaaactgtcaaatctcaaatcgcacgtcgctgctctctgctgatcttgcaagacagtgacccctt

SEQ ID NO: 26683 - DNA, 885 bp, Oryza sativa
  ref <308>: DATABASE ACCESSION NUMBER: AK102125
  ref <309>: DATABASE ENTRY DATE: 2002-08-28
gcctaaccaccaccaccaccaccactccagaagctctcgccatcccccacttcccccctccgatctccgctccgatccccccgccgccgccgccatggatcagtccatcgtcggccagatcttggagaagcaggtgctgtcggtggccaaggcggtggaggacaagctcgacgagcagatcgccgcgctcgaccgcctcgacccggacgacatcgaggcgctccgcgagcgccggatcctgcagatgcgccgcgccgccgagcgcagggccaagtggcgcgccctcggccacggcgagtacggggaggtccccgagaaggagttcttcgccgccgccaaggccagcgaccgcctcgtctgccacttctaccgcgacaactggccctgcaaggttatggacaagcacttgtcaattctcgcgaaacagcatgtagaaacacgttttgtgaaagttcatgctgaaaaggctccctttttgacagagaaactaaggattgttgttctcccaactcttgcattggtaaagaacaccaaagttgaggattatgtggttgggtttgatgagcttggtggtaaagatgatttcagcactgaggatctggaggaacgtctagcgaaagctcaagtgatcttccttgatggagaagggcctgcacatgcatccaagcaggcaaccaaacgaagcgttcggcaatcagatactggcaactcatcggactctgaatagttttgttactgcttctgaacttatgctaaatgtttttattggctgttacggcaaacggttatgttatccctattagtaataggaaaagttaattagtctagcattgaacatttgaactgggacttgggagttaaaagaggtatctagagtgacacatc

SEQ ID NO: 26684 - DNA, 2656 bp, Oryza sativa
  ref <308>: DATABASE ACCESSION NUMBER: AK102126
  ref <309>: DATABASE ENTRY DATE: 2002-08-28
gcttcccaaaccgcgccgcctctccccgtccctcctcctgcgccccaggtgcagccgcaacggcgacgaacgttaacgcggccgccggcggtgggggtatccgccgagactcagtgaccgcggcgccgcagcttcagggcaacaaggaatctgtggaattcaatttttctgcgggatatcggcaagggaggggattaattgattgattggtcgatggaggaggcttctgttacaggggaattgttggagcaagaagctccatcttcttcaatctccggtgtcgattggtcccagcttccggcggacttgctcgtctgcatcttcggcgtgctggaggtcccggatgtcttcagctccggtgtggtttgccgcgcctggcatgccagctttctggaggcccgccgccttggcatttgctccagtaaccctgggccctgcctcgtgttctcttccggcgaccgtgatcctagcgtggtcaccctgcacagcctcaccacggggaagaactactatgtaaccatgccggaccctcctttccgtacccgctacatcgttgggtcttcccatggctggcttattaccgccgatgagcggtccaatctgctccttgtcaatcctgcgactcaggctcagatccccatgccaccaccggagacaatagcgaatgtcaggatacgttgcaatggtgagggagtgccacatggctatgatctttttaaattggatatgtcatcacaagattttgatactgaaacagagccagatgatctttcctgggaagaaggccggttttacttctacacgagggttgtcctgtcagcagatccatccagtggaaactgcactgtaatgatcctgcacttgctacgtaatctccttttctttgcaagggtgggtgacactcattggacctggatcaatgttaatgagctatgttggaactatcatgatgttttgtacaatgacgatgatagattgttctatgcaatccgaggcaatggtgatgttcatgctatcaatacaaatggaccctctccaatattaagggttgtcttagacgccaagagctcacttgtcgattgtgccaagtacattgttctgtcagaattgggtggtcttcttcaagtatggaggtatcatcactatgttaataataataaggagaggaggaccagtgaattggttgtttataaggttgatcttgttgaacacaagcttgttgaacttaaggattttgaaggccatgcattgtttattggtttcaatagctccttcttcctacgagaagaagatttccccatgttgactccaaatagtgtctactgtacagatgatacagttacttatatttgtcattcaaggtttggctttcgagaggttagtgccttccatttggaagatagtagtttcaccgatctactacctattggctcacggttgaattggccacctcctgtttggtttaggccatcattttctaaaggtccactatgacataattctgcagattgattgatctgatcaatggagcaggtttcttcttctgttaccggtgaattactagagcatgaagctccaccttcgacccccggtcttgattggtcccagcttcctgcggaccttctcatctgcatccttggcacgctggagattccagatattttcagctccggcgtggtttgccgctcgtggcatgccagctatctagaggcttgccgcctcggtatttgctccaataaccctgggccctgcctcgttttctcgtccagcgaccgtgatcctagcatcaccacacttcacagcctcaccacggggaaggatcactatgtaaccatgccggaccctcctttccgtacacgttacattgtcggatcctcccatggagcggtctaatctgctccttgtcaatcatgcgactcaggcacagatcaccatgccgccaccggagacaatagcaaatgtcaggatacgttgcaatggtgagggtgtgccagatggctatgatctttttacaatggatatgtcatcacgggattttgatactgaaacagagccgaatgatctttcctgggaagaaggccgattttatttctataagagggttgttctgacagcagatccatccagtagaaactgcacagtaatgatcctgcacctgctagatgatttcctttcctatgcaagggtgggtgacaatcattggacctggatcgatgttgatgagctatgttgctgctatcatgatgttttgtacaaggacgacgatagattgttctctgcaatccgagccactggtgatgttcatgctattgataccaatggaccctctccaatgttacgggtcgtcctagacaccaagaattcactcatcaataataccaagtatattgttctgtcagaatcaggtgatcttcaagtatggaggtattataaacacgtcaataacgacaggaggaccagagaattgattgtctataaggttgaccttggtgaacaaaagcttgctgaacttaaggattttgatggtcgtgcgctatttattggtttcaatagctcgttcttcctacgggtagaagatttcccaatgttagctccaaatagtgtctactgtacagatgattcaatggaatatatttattgtgtgaggtttggtttc

SEQ ID NO: 26685 - DNA, 1841 bp, Oryza sativa
  ref <308>: DATABASE ACCESSION NUMBER: AK102127
  ref <309>: DATABASE ENTRY DATE: 2002-08-28
gggctgcctcccctaccccacctgtcagacaaccccaccgccgcttcgcttcactctcgcgttcgagtcacacagcagcagagttgaacgacgcgtccgcatcgagccgcagatctttctcaccgccaccgatgggcagcggcgaatccacggcggcggcggcggcgacgatggcgtggccgcgctggcgccgccgccacggctggcagctccccctccaccctctccagctggtgggcatggcggtgttcgccgtcctcgtcgccgcgttctacgtcgtcctcgggccgtacctcggcagcaccgtcgcggggaacaccctcctcgccctcttctcctcctcggcggcgggcgcggcggcgctctacgtgcggtgcacggcggtggacccgtcggaccggacgcacgcgaagaagatgaagaggcggcggcagctggcgagggcccgcgcaggccgccgcggcggcggaggaggggggaggttgccgaggctgaggtacgggtacatcctgtggcggtacgtcgtgcggctgctccggcgggtggaggtccgcgtgatgaaccggtgggtgcggcggagctacctcgagcagtggaactccagcgtccagctcgaccccatgctccccttcgccttcaccagcctcgacgacatcgtctcgccgcacgccgccgccggccacgacatctcctactgccccgtctgtgattgcgaggtgaaattgcgcagcaagcactgcaagacctgtgatcgctgtgttgatggatttgatcaccactgcaggtggctgaacaattgcattggaagaaggaactatgcatcatttattctgctcatgttctttgtcctgctcatgcttgttattgagggaggaacagcaatcgcgatcttcgttcgctgctttaccgacagcaaagggttgaaaatggaaatggaacacaggcttcacatcaggctcccaaaaggagcacatgcagcgttatcaatggtttttgtgatcttcaccttatacagtactgtagcactgggtcagctcttcttcttccatgttgtgcttattagaaagggaatgaggacatatgattacatccttgctatgagagaagcagcacaagcatttgaccctttcgatgactctgattcgtcgtctgatgagagtatcgacttcgattcaccagaaaggccatcctttctgtcaaggatcttctgcagaaaagatgaattaagtgaaagtacccgaaagctatccatcaggattgaaaatgagcccagtgatggaacaagaaggaaagatgacatccagatcaacccatggacgttgatcaagatgagcaaggagaaggctatggcagccgctgagcgtgcccgtgagcgaatcaggaacaagctgccatcaacaacaacctcaccgatgaaaccattaccggtggagacaaagagaggtcctctgaaccaagagagaaagcacatcatgacagggaaggagattgttcctgttttcaccaagagctggttgtcaggatccccgacagcaaggctgtcaagcccaagaagacgattctccggttcaccatctccgaaaccacagagacaccggagcaacttcgatctgagacttgcagaggtgtcaagagagcttgagtcccacatctcaaagcaggttctttgctccgttgtcatgaagggtgttgaagatgaagattctccatcctgatgcgggacgttgtttacttcaacaagattcatttcatttttgtgtctctcaatctctgagaattgtgtgatgtgcttgcttagcccatgcaacccttttctcaggttcattcatgctgctctacat

SEQ ID NO: 26686 - DNA, 3098 bp, Oryza sativa
  ref <308>: DATABASE ACCESSION NUMBER: AK102128
  ref <309>: DATABASE ENTRY DATE: 2002-08-28
ggccgtcgagatcacgcgccaccgaggagaggagattcggcggtccgcctatcgcgtgaggacgagcgagactgcatactccagaaggtgcgtgatttcttccggatcgaagatactctttgtcaaaaggaaaaaaaaagggtatatagaaaagaaaaattttgagtagaagaatatcaacagagacgatgatgcggcggtttgtgaatttggtggtggacaccgccggcggcggcggcgacgcgacggcgtacaagctgtaccgcgtcgctgcatcggccctcttttcatgtccagcacgtcggcaagcagccaaagtactagatccagatgacgtggaggacgccgccggcggcctgcctcctccggccatcaccttccacccttcctcattgtccggccctggaaacgtcgatttcttgtacctctacggcagtggcggcggcagcgacggcgacgacagccttctcgccctcgacgtcgacggccgtggtctgctctacagcgccgcctccgccgccgtccgctacatgcccgacccgtgcaagcccaagatcgagccaatctccttcaccgccgacgatggccgcctctacgtcatcgagagggtgcccttgtccggtaaccccggctgcttcgaggctctcacctacggcttactccccgacgacgacgactcactgtcctccaggatgggctggtactggcggtctcttccgccgcctcctttcgccaaggctggctacgacatcaccgcctccgcggtggtgcagttgaacgaatcgaaggagctctgggtgacggcggcgcacggagccgggaccttctcgttcgacacgaattccaaggttggggagtggagggagcttggcgaaaaggggatgccgttcatggggcgcggcgagtacgtggaggagcacgggcaatggtttgggctctcctccacgccgaggctggggctgtacctctgttcctgcgatctctcctatctctgctgttcctacgatgcgcaggtgatggtcaggtgctggttggatggcctagaccggctgccggcggcggcgccgcccaagcgatcgttactgatggagacctatgccgtgcacctcggctccggtaggttctgcatcgccaggttcatggaggaggaggagcaacacaacatctcacttcatccattcttccgcgtcgccggcgaaaaaagcaagaacgacaggttcttgctgctcaccggcgttgatgtggtgggcagtgacgacgccgtcgtcgtgcacaagtctatacgctacgcattccaaaacggtgatttcgttcgtggttactctcgagtcttttaatttcatcatcccctaatttacttattacacctctctagtctccggtaaaactagctatattttgttttgtgacggagtgagtatatcatttatatatatcccttttccttttcatttcgagcgagtttgcaataaaataatggtactccattcgtttatattaccaacagacaaggaattcacagccttattaagaggttgtcctcttattatatatgctccttcttcattctggaaaatttagctgcagctattttgacaattaagaaagcaaaatgttgtaaaatttgggcacaataaaatgatatatcttccttagcagttagcagagcaacaacatcccaaagctgaaatgtttttgaccggagtgatgcacctgcaacagatattccaaatagattcgctctacaaaattaaactattcaactagttccatctcattgcgcgcctgcgcctgcctgatgtgttgttcattgtatctcaaaaatcatatttgcagcagagcagaaaaaaaatcatttgcagcatcagtaatccatagttattattaattgctcacatcacatccggtggctcatggacgcgagcaaatgggtaataacgcaatatatatagctggatgagatgatcatggcatgttggcggcgtgatcgtgatcgatggcggcgacggggaggtgagtggaggaggagggcggcggctggtcgtcgtcctcgtggcagcagaggcagagcatgccgcggaggaggttgcacttgccgcccaggaagccgagctgcttgcagcaggcgttgcacttgcctcttatgaagcctgatactgtgctgcacttgctttgatttctgctggactgcaactgcaatctaaacagtttgtttcagtctcccagatgatcagcttgcaattgaccaatcattcaaccaaccgtgtgtgctgattctggtcatcagaatatatactcatatcatatttgtgctgcattttgtttctaatcctgaaagatcaacattctgtgatctctgcaagactgcaaccgcaaatccaaatggttttgtttcagtctctcagatgaacagcttgcaattgaccaaccattcaaccaaccgtgtaagctgatgaccgaatgaaatccagttgttcaggacacagcaagttggggaagaaactttgcagaattggataaaggggcattgatactagtatacctttgcttgatgcaatcaaagggttgactcaaatcgggctgcacctaactcttgacagccagaggatggtgctgaccaaagatttcaatgggcagagatgtgcaggccatcaagggggcagcaggcagctgagctggggattagctgtgagaccttggcactttgtcaattgacaattgtcaccgcttcactgcacaactgtatcagctgtatgtactcctagttcaactaatttgtcctggaccccatggatggtagtaagatgatgggcctgttcactttgatgtcaaaaaaaaccttaataaggtcaaaattttagcaaattttggtaaattttggcatgatttcttatatagttaccaaaatttagcaggaaactaaatgtagccacttttttggtaactttaccaaaatttggtaagtttgaaaatggcatcaaagtgaacatgcccgatactactactactagtattttgtgactaatcttgcagcaatcctgaagctgtactactgtctgtgaatattctaatccatcattatatcctttctggaaagg

SEQ ID NO: 26687 - DNA, 2455 bp, Oryza sativa
  ref <308>: DATABASE ACCESSION NUMBER: AK102129
  ref <309>: DATABASE ENTRY DATE: 2002-08-28
ggcagcttgctttgctcctacgcccgtgcagctcgcgcgattccggctgcagcgcacgttgggatcgatggagtcggtggccgttgaagcggcgcggtggatggtcggcaaggcgctgagcccgctgtcgggagggctcgtcgaggcgtggctggcctgctcggagctcggcaccaatgtcggcgccgtcaagctggagctgctctacgcgcaggtgatgctcgacaacgcccgcggcagggagacccgcagccccgcgctgaagcagctgctcctgcagctgcgtggcctcgcctacgacgccgaggacgtgctggacgagctggactacttccgcatccaggacgagctcgacggcaccgacgaggccgccgacgagcacaccagaggctgcctccatggcctcctcctcaacacccgccacaccgccagaaacattaagaagaggtacctttctgcttgttgctcgggcggaggtgacgagaaagctgttgccggcagtgacctctctttagctggtgaacatgatgccgatgacgactgtaccgatgaagacgacaacgacaccggctctactgatatcgaccacagctctactgcaacgcacatgcctagaaaagaaaaacagtggggatcacagagggaggacactatgaaaacaccaaagctgaagttcgatagggtggatctgtccacaagaacgaagcacatctctgagcagctgaagctagtctgtgccaaagtctctaccattcttaatctagagttgccggaatcaaatcgcaccattcgaagcagcattgctatgcttcgtcctgtgaccacttcagcgactatagagcctgaattttatgggaggaagggtgagaaggatagaattattaaagacataactcatggtgattgctgtgtcaaggacctgaccgtcattccaattactggtccaggaggaatagggaagacagctctcactcagcaaatttacaaagcagtaaagaacctttttgatgttaatgtttgggtatgtatctctctcaatttcaatgcgtacagattgaaacaagagattgctgattcaatacctaaagttgagaatgagcaactgggtgacctagatgagaatgagcaactgggtgacctagatgacttgattgagcgaagattgaagtcaaagaagattttgcttgtcttggatgatatgtggaattgcagtaatgaggatgtttggaaaaggctattagcacccctcagaaacgcacaaacaaagggaaatgtgattctagtcaccactcgttttccagcagttgcagaaatagtacaaaagacttatcgtccaatacaattggaagggctggaatttgaagagttatgggaattgttccaagcatatgtgtttggtgatgagaaattaataaaccatcatgctatcttacaacagactggagaaatgatagccaaaaaactaaagggctcccctttggcagcaaaaactgtaggtcgattgttgagaaatcaccttgatttcaatcattggacaagtgtcctagaaagtaaagaatgggaattacaaactggtgacaatgatattatgccagcattaaagcttagctatgactatctccctttccatctgcaacaatgttttatatattgtgctttgttccctgaagattacaagtttgacagtgatgagttgattcacctatggataggactagacattttacaatcacatcaggaccaaaacaaacgaactgaagatatagcattgagttgtttgaatcatttggttgattttggatttttcaaaaaaaatgtgaatgaagatgggtctccttattacagtatgcatgatctactacatgagttagcattgaaggtttcatcctgtgaatgtcttgctgtcagtagttctaacgtaaggtttgtgcaaattccaccatctatacgccatttgtctattgtgatagatgacatggatgtaaatgatagagtgacttttgaaagcatcaagacggatttcagcacactaagtaagagactggatgttgaaaagctacactcttttatgctatttggacgattccatggaagctttatcagtcctcttggtgatttgttaagtaacgcaaaatcactccgcgtcatcttgttgtctactccatcatatgcagtggagaatatgttgcacaacttttcaaatctcgtccacttgcgctacttaaggattattaggggatattttccagaaataaggctacccaacaccatttcaaggttttatcacttgaggatccttgatgtacgaaaatgcaatggtcactttggtttaccaagagatatagataatcttgtaaggctacgccattttcttgtccccgatgacaatctccactctgacgttgctaatgtgggtaagttaaaatgtttacaagaactaaggagatttaaagtg

SEQ ID NO: 26688 - DNA, 4546 bp, Oryza sativa
  ref <308>: DATABASE ACCESSION NUMBER: AK102130
  ref <309>: DATABASE ENTRY DATE: 2002-08-28
ggcagagagagaaagcccatagccttatccccccacgagctcctcccttccccctcccctccggcggccggatccggcgatctccggcgagccaccgacgagatccgcccccaagtcttctgctctcgcgagatcccccgcctccgctccgtgcttcccccatcggccgcgcggcgccgcgcaccgcacgaatcaggtccccctctcgactggaacctcctcgattgtctcgtcgttgggaaggtagggttccgcccacccgggctgctgctccggaggcggtagtcgatcaccgggtttgtgtgagcctagtgggtgggtggtgatggggatagaagattaccatgtcatcgtgctcgttggggagggctccttcgggaaggtgtacatgggaaggcgcaagtacactcgccagacggtagctatgaagtttatccttcagcatgggaagactgacaaagatatacataatctaaggcaggagattgagattctgaggaaactcaaacatgagaatataatcgaaatgatcgattcatttgaaacccctcaggaattttgtgtggtaacagagtttgctcagggagagctgtttgaggtgcttgaggatgataagtgccttccagaagaacaggttcaagcaattgctaagcagctggttaaggcactgcattacttgcactccaatcgtattatccatcgggatatgaaacctcagaacatccttattgggaaaggatctgttgtcaagctctgtgattttgggtttgctcgtgccatgtcagctaatactgttgtgttacgttctataaaaggaacacctctatacatggctccagaacttgtgagggaacaaccttacaaccacacagcagatttgtggtcccttggcgtcatcttgtatgaactatttgttggacagccccctttttatacaaattcagtctatgcacttatacggcacattgtcaaggatcctgtgaaatatccagaaaatatgagtgcacattttaagagcttcttaaagggtttattaaataagtcgcctcagagtagattaacctggccagcattgttggagcacccatttgtcaaagacgattcagtggagccagctgctgacaatggaactgttccttatgaagttaaaggatctgaggctacctggaaagcagatgaaatccaaacgtccaggaaacaacctcctgttactgatccacaaagtagaaatactgttgaaaacagggaaattgtttacgataaacaaaacaacaaaaaagtggaaggccctaagcatgctgctgaggatcatcatggttcagctactggtcctggttctgacatcagcattctgtcagaatgttcagctttagataagctggaaaaaacttcacaaacagtaaaaggtgcaaatgccattattgaagatagtgaagcgccgtcaactgccctcagccccatcaaaatttggttgagcaatacttctacttcacccagggaactgaatattgatgatgcaaaccaatcactcaggattgtaaaaaatttaattgaagcagggtcatatcaatcttttgcagcaattgatgacataatctgcatgtttcttgagtgtacaagtgtcattatcaaaactaagatttcagatgcttacagctttgcagtgaagtgcctagccattggacgaaagctgcttgatacaagtgaaggtcctgtgctgcaatcttatgacagacactggtcctctctatatgagctttattctcagattctggtttctacaattgatccatctggaagaatctctcgtgagtcgactgcatgccttgctctgatgttatctcgggttatttctggattgaaaacaagtatctcctctgagagtccaaagccaatggaagaaagtctcatcaagatcatcaatcatgcaaggagttcacagttactagaactcttatgtgagtgtctaatagcttcaggttcagatatagtatctgggtccactaacatggtaccagcagcttgtgaggcatgcaaggccatttggtatctagctcatgctgttgacattatgtcccttggcacacataatttttcatttccattagctaactcatggagacaagttcatgcaaaactggatggtaaaatgcaagatcaaggatcattgccagcctcacaaaaaaaagattcattatcagatatagactctacccatctgataaatatatttgtcaaatcattcctggcttcaaaaccgatgcaggttgctgtttatcactgcttgcataatggtttggagtctgctattcatgcttctcttcagctaatctcaagagcttgtctactggatgcttctttctgtgctatgatttgtggcccaataaatccatcatccaatgtcaatgaagtagaacatggtggagatggaacaattgtatctgacatgttttctctattgtcactgtgtggctcatatttgaataaggagtccaagcaaaacagtaatcagaaatgcaggctatccaatcctcatgccctagtagtgcactgttgccttgcactggcaacaatagctgcatgcctgaagtcagaagggaattcttcagcatcaattatcttaacgagttcccagaagaaacagcggtcccgactttctgttcttgcgcatctctcttcggttgatgatacagtcaagagttgcctccagccacactgtgcatctgcaatgcttgcactatcgtcgcttatttcattggaaaatggagggcaaagtagatcttctcagtgtgaaactgcccttgcattgtttcctcgtatggcaacaatacacacattgctgaagctttggctatctgatggtagtgaagcactctgtcgatataatgctggtctgctaaatctgttcggccttcgtgatgggtgtgttgggctgttggaaacaagactgaaatggggtgggccattggccattgaacaagcctgctctgttggcatcccacaactcctaattcgcttgcttactgatggattctcaaaggaaccatctgatgaaaaagaaggttcaatacaccgtagtggattatcaccattgggagttgtctggactctctcggctttatctcaatgtctacctggtggtgttttccgtgaaattttgtatagaagggagcatgtaaagcttttaactgacctactgtctgatacacacctcaaggcattggcagcttggactggtcttggtggtgggaaaaagggggttcgggagctgataaactcggtcgttgatattttagcatttccctttgttgcagtgcagagttctccaaacatgccatcaacatcggcgtccatcaatagtggtttccttcttagcattgcatcacctggtggaagaatcggtactgagaataaggaaatgctgaaaactattgagaaaaacatggctcagtacattcaagttctactagaggttagtgttcccgggtgtatacttcactgctttgatcatgttaacatggaagatctatcaaggcccttggccatagtggccaaaatggttgggtatcgtccacttgcttctcagcttcttagagaaggtttactaaatcatagcagggttgaaaaattactgaaaggccctattgctaaagagacattgcttgacttcctcatgatagtttctgatcttgcccggatgtcaaaggacttttatgaaccaattgataaagcaggcatggttggttatttaaagaactttctatcaaatgaggaccctgatttaagagcaaaagcttgcagtgcaattggcaacatgtgccgccacagttcctacttctacagttcacttgcaacaaataaggtaattgagctggtagttgacagatgctctgacccggacaagcgcactcggaagtttgcatgctttgctgtaggaaatgctgcttatcacaacgacatgctatatgaagaacttagacggtccattcctcaactcaccaagctacttcttgcacctgaggaggataaaaccaagggcaatgctgcaggagcgttgagtaacctagtgaggaactctaacatactctgtgaagatattgtctcccagggcgcaattcaggccctgctgaagatggtcagtagctactccaccgtggctctgagccccagcaggaaagacgtgctaacagaatctccgctgaagatcgtgctcttcgcgctgcgcaagatgtgcgaccacgccgcctgccggctcttcctccgatcgtcggagctgctcccggtcatcgtgcacctgaggcaatcgccggatccagccatctctgagtatgcttctgccatcgcgaccaaggcttgccagccttgagcctttgacatccctggttcctcccggccgtggcgggggcatgatcatgccgccgcaatgcgaatctgaaatctttgtaatgtcctggaattgtaatgtagtacagtatatcacggatcaactatttgtatatatatgacttgatccatataattacccgacatatgaaatttgcagctc

SEQ ID NO: 26689 - DNA, 918 bp, Oryza sativa
  ref <308>: DATABASE ACCESSION NUMBER: AK102131
  ref <309>: DATABASE ENTRY DATE: 2002-08-28
gtttccacctcgcctcgcatccaccgtgagcggagcgccaactcgctagcaaatcagaagaggaggttagagtttcgtcgtgagcgagcgagagtcatggaggcggacaagagcggggagggggagaaggccggcggcaagacgatctccttcaggtgctcggacggacaggccttccacatgccggtggccgcggcgatgctaagcacggccatccgcaaaatgttcgacaagtaccccagcatcgaccacggcggcgtgatcgagctcccccaccaaatctcctccggtatcttccccaaggtcaaggaatactgcaccaagcacgccaaggtcgacgacaagggcaaccccaccgtctccaccaacaccggcgcggcggcggcggcgtcaagcagcagcaccgacgacgaggaggaggacctcaagaactgggacaaggagtttgtcaacatggaggtgaagcccctccacgacctcctcctcgtcgcccacctactcgacatcaaaggcctcttccacatcacctgccgcaaggtcgccgacatgctcaagggcaagacctccgaggagatgcgccagatcctcaacatccgcaacgacttcaccgaggaagaagacaaggcaatcaaggagcagaacccctgggtcttcccggatccggagtagaagctagcgtcccctccctccccgatcgagcatctgctctgctcatcatcgcttaacccgtcgcgtgtggttgctccccgtagttatctctggtaggttcgttcagaacttcagatcgaatcggcgttcttgcctttttacctttcctttgcatcatgtccaactagaacagaatctggtgtgtgtcgatcgaaatgttcaactgcttaattgtttgcatcaactgaaatgttttgcccctgccgcttt

SEQ ID NO: 26690 - DNA, 1357 bp, Oryza sativa
  ref <308>: DATABASE ACCESSION NUMBER: AK102132
  ref <309>: DATABASE ENTRY DATE: 2002-08-28
gattctgctttcgtctccagaggttcgtcttcttctccttcccccagctttgcgccttcgcgcagccgcgtaatctcgtctgccctcgctgctggatgtcggcgatccgcgcctcttctcaccggctacaagaactgtggcattaacaaggacaaagatgtcaagcatggcaggcttgggagcttctcagcatggatatcctccccgaagtcatgagccctggactaaacttgtacacagagagagattacccgagtggtttgcatacaatccaaagaccatgaggcctccaccacttagccatgataccaagtgcatgaagattttatcctggaatattaacgggcttcatgatgttgtaacgacaaaggggttttctgcacgtgacttggctcagagagagaattttgatgtgttatgtcttcaagagacacatttggaggaaaaggatgttgaaaagtttaagaatctgatagcagactatgacagctattggtcatgcagcgtctcgaggcttggctattcagggactgcagtaatttcacgggttaaacccaatttctgtccaatacgggattggcatacgtgaacatgatcatgagggcagggttattactctggagtttgatggtttttacttggtaaatgcctatgttccaaattctggtcgttttctacgtagactgaattacagggtcaataactgggatccgtgtttcagcaactatgtaaaaatactggaaaagtcgaaaccagtgattgttgcaggagaccttaactgtgctcgtcaaagcattgacattcacaatcctccagcaaaaaccaagtctgcaggtttcacaattgaagagagagagtcatttgagacaaacttttctagcaaaggccttgtggatactttcagaaaacagcaccctaatgctgtcggctataccttctggggtgaaaatcagcgcataaccaacaaaggttggcgattagattactttcttgcgtcggaatctattaccgacaaggttcatgattcatacattcttcctgatgtatcattcagcgaccacagtccaattggcctggtactgaagctatagtatcggcgagactctaaaattcgagaccttactgaagccaactgtacataatcacttgacaaatgcttatataaatctttggccagcctgaaatgttgcaagatgtggtagagttagtctccatatccatttgccagtcaatattacgatttgttctgtcagtctgtcaggtgttcgtcctgagaccttctgtatataacgcgatgcatttgtttgctgtctctgggccaaactttcataggcattttatcatgaaatatgattcc

SEQ ID NO: 26691 - DNA, 4086 bp, Oryza sativa
  ref <308>: DATABASE ACCESSION NUMBER: AK102133
  ref <309>: DATABASE ENTRY DATE: 2002-08-28
ggccgccgccgccgccgccgccgccgccgcagtagagtctgcagcagccgcagccgccgccgacgcggcggctctctctgctcgccatccgcgtccggcgtaccggctgccgacgcagatccgaagtcaggctctgtacggttctacgattatttgatggagcatgatatgacagttgaagattttattagaactaatgggttaggggcaagtggattgatagagaccaataatcaaggtgtatccacttcttctgtgtctgattgtcggtcctgcgagcatgtcgagaatgggagcccttccacggcccctcccttttgggactctgatggtgaagatgacgatcctgttacctcagggcctagaccttcagatttatttgggcgatatacttggagaattgaaaacttttcaaaggagaaaaaaagagaaatgaaaagcgaaccatttgaagctggtggttacaaatggtacattctagtttaccctcaaggatgtgatgtctccaatcacttgtcattatttctatgtgttgctaatcatgacaaacttctcccaggatggagccatttcgcacagtttactatagctgtgggtaatcttgatccaaagaaagttaaatattcagacaccctgcacaaattctggaagaaagaacatgactggggatggaaaaaatttatggagttgtcaaaaatccaagatggtttccttgttgatgatgttcttgaaatcattgctcaagttcaagttatcagggagaaagtggatcgcccatttcgttgcctcgatcgcccttatcgacgagaattactccgtgtctatatgaccaatatagagcaaatttaccgacgctttgttgaagagcgcagaagtaaactttgcaagctcattgaggacaaaatgagatggtccagtttccgtgccttctggcttgcaattgaccaaagcacaaggcatcgcatgtcgacagagaagagtgatgtcatactgaaaataatagtgaaacatttctttgtggagaaagaagtaacttcaacgttagttatggactctctgtatacggggttgaaggcgctcgagtgccagagcaagagcaagagcaagaaaggcataatagactcagtggattttgtagagctgccagtgcctatggtccatgttgatgtggacatgtttgttttggctggtgatgtcatagctttgcttgagagggcagctttagaacccttgccttgtcagcctgtgtctccaaaggatgacaaatgttcccagagccgcactaaggatggcagttctggagaagttaacaaagtttcgattgaacgtgaagaaaggcgcctaactgaacttggtcagaagataattgaaacatttgcactatcccatatattcagtgggattgaggttgcctatcaagaagctgttgctttgaagaggcaagaggagcttattcgcgaagaggaagaagcctggctacttgaaaatgagatgaaggggaagcgtggcagtaccactgaaaaggataaacgtgcaaagaaaaaacaggcaaagcagaagaagaacaatcgtaaggttaaagacaaagatagagaagaaaaatgtgattcaaattttccagaaagaagtcaagatgaaaacacaattcatgacagggaagactctaaacaggcaggacaaatatccatgaaagtagatacctctgaagaaggtgcctcagatgtttcagacaatttagatgggtcaattgagattcagaagaaacattctactatggagaataagtcattgtcatgttcatctgagtctgctactatgaacaatgcgcaaggcaaaataaataacttgttagaaagtaaagatcagatatcacgcaacagagggaaagctcgcagcaggagcacaagcaatatgaacattaccgaggatgtggatgatcttccatcaagcacgactagctcagacaggaatacatctggctgtggcccagctccaaagcttgatcaagagactgttctacttaccttgaaagataggcttcggaaacttgggcaacgtttacatgagaaggaaattgagggcaggaaactactccaggctcatttggaaaagaaggcagcagctgagtcagcaactggttcatcctcatcactctcatccaattctttagaagagactccagaggttctgaagagcccagatcaatcttcagtaactatctctgatgctgatattaatgcatcaccttcaaagtttggtgccagtaaagaagtcactccagtaacaccaaccaccatcctaagcactgagcctgtgcctactgttgcttccaccctgagtaaagatgagccagttttgtgtgaagatcatgtatcatgttcaactccacaaattgatactccaatcacctcaaatccaccgcaagttgttaaaactgttacccttccttcaggcatgctgcttgttggtcacgctattcaagcaccgtctagatcaccggcaccacaggttgatagggtctctaaagctattgctgctcccaccaaatcacctgctccacaggttgataaggtctctatagctgttccgactccctcaaaatcacctgctacacagggtgagaaagtcgctaaagctattctggtgcccccaaaatcacttgctccacaagttggaaaggttgctaaaaccatcccgacaccaaaacaacctgcacctctggttgacaaggttacgtcacttgaccctgtatcaaagcaaatgtcttccatgtctaattcagaagcccgagaagctattcttcccaaaaaggctgcagtcctgtctgtttcccaaactcctgcaatatcgaggccttcaagtgctcctctgttccaggtaccaagatcaactttaccacctacgccagcagttcaagttcccccaatgctttcccgctcaatgaccctggctggacgatcgaggaatgaaccatccccttctgttccaagttatacagcacagacctaccgaaatgccatcattggtaagagtaatcttgatacagcatcagcaagtcttgatcattcaacttcttttggccaaaacgtcgcactttcacagccactatcatcgtatgcatcagcagcatctgccatggtacctccggtcggaaggaatggccaattaccaggtaaacagggcttcatgtttgggcaaggaaagtccgaagcaattgataactggaacccatggaaaggtgatagtaatgctaacaaatacatgtggaaagatgattctccttaccatcaaatgaccaagggtgatgcacatactcaatcttggagggacaattcttatcagcaagcaggatgcagtggaacaggggaacaaggcgaatttggggggcttcaatataggcagttccagagggagattccaacaaaccttgtctcataccaattgccagggccagttggagaagaatttccacaccttgatatcatcaatgacttgcttgaggaggaacaaagcagtgggagtatggcagagcctaccctccacggatatcatacattgggcttgccgtattcttccagaggaaacttagtagactctgaagtgacttccataagtagttctggccggttaaacttggccgatcattactatgacgagggctacccgatggcttatgacaggctgaatgctctttataggttaagagaagggcaaaattccacattggatgcttattccaatggaaggatggactcgattacttcaaaaccttggctacataacttctcaaatccagcagtgaaccttggagttaacccaaatggattttcacagcaaatggggaactacaccaatttagggagtgggagggtgaatggagaacatctgtatcgccatgccaacgggcaatggtgatgcctgtacacaattgataataaatcctgctataagttgtcacagaccatggtggcagatgtaagcgtcgccatggccaccaggttgtaacttttaattttaaaggggcaaagaaataatacattgtgtaaagcattccagtgtccgttaaattttctgtcggctgctttc

SEQ ID NO: 26692 - DNA, 3968 bp, Oryza sativa
  ref <308>: DATABASE ACCESSION NUMBER: AK102134
  ref <309>: DATABASE ENTRY DATE: 2002-08-28
ggctgcagcagccgcttgcttcctgtgagacttcgtcgtcgtcttctccgagcttagctttcaccaaaccactagtacttgtactcactcttcgcttcccaaatcttcctcatcaattgctaacacgagtagtctatcatcattaactcgcatcccttccccttccattgctcattgtctttccattcatacggtgttgtgttgttgtggcccaagaagaagaacaagtacaccacacgccattactcccatctctcttactcctcctcgagtttgattgattcgagtggtcgcatcgcatgatcagaaagtgaggcgatcgatccatggcttccagcggcggcggcggcctgcgtcacagcaacagcagccgcctctcgcgcatgtcctactccggcgaggacggccgcgctcaggcccccggcggcggcggcgaccggccgatggtgacgttcgcccgccgcacccactcggggcgctacgtgagctactcccgcgacgacctcgacagcgagctcggcaacagcggcgacatgtcgccggagtctgggcaggagttcctcaactaccacgtgacgatcccggcgacgccggacaaccagccgatggacccggccatcttggcgcgcgtggaggagcagtacgtctccaactcgctcttcaccggcggcttcaacagcgtcacgcgggcgcacctcatggacaaggtgatcgagtcggaggccagctacccgcagatggccggcgccaagggctcctcctgcgccatcaacggctgcgacgccaaggtcatgagcgacgagcgcggcgacgacatcctcccctgcgagtgcgacttcaagatctgcgccgactgcttcgccgacgccgtcaagaacggcggcgcctgccccggctgcaaggacccctacaaggccaccgagctcgacgacgtggtcggtgcgaggccgacgctgtcgctgcctccgccgcccggtggcttgccggcgtcgaggatggagaggcggctgtcgataatgcggtcgcagaaggccatgaccaggagccagaccggcgattgggatcacaatcggtggctgttcgagaccaaggggacatacgggtatggcaatgccatttggcccaaggagaacgaggtcgacaatggcggtggcggtggcggaggcggcgggctgggtggaggcgacggccagccggcagagttcacgagcaagccatggaggccgctcactcgcaagctcaagattcctgcgggtgtccttagcccatacaggcttcttattcttattcgtatggctgttcttggtctattccttgcatggagaattaagcacaagaatgaggatgcaatgtggctatggggcatgtctgttgtttgcgaactctggtttggcctctcttggctcttggatcagctgccaaagttgtgccctgttaaccgagcaactgaccttgctgtcctgaaagataagtttgagaccccgacgccatcaaatcctaacggaagatctgacctgccggggctcgatatatttgtgtctactgctgatccagaaaaagaacccccattggtcacagcaaatactattctgtccatccttgctgctgattatcctgttgagaagctttcttgctatgtttctgatgatggaggcgctctcctgacatttgaagcaatggctgaagccgctagctttgcaaacatgtgggttcctttctgtcgcaaacatgacattgagcctcgcaacccagagagctactttaatctgaagagggacccatacaagaacaaggtccgttctgattttgtcaaggacagaagaagggtgaagagggagtacgacgagttcaaggtcaggatcaatagcttgcctgattcaatccgtcgccgctccgatgcatatcatgccagggaggaaatcaaggccatgaagcggcaacgagaggctgctctcgatgacgtggtggaggctgttaaaatccctaaagctacctggatggctgatggcacgcattggcctggtacctggattcagccctctgctgagcatgctcggggtgaccatgctggaataattcaggtaatgctgaaacctcctagtgatgatcccttgtatggaaccagcggtgaagaaggcagacctcttgatttcactgaggttgacatccgtttgccaatgttggtctatgtgtcccgagagaagcgtcctggttatgatcacaacaagaaggctggtgcgatgaatgcgttggtccgctcatctgctgtcatgtcaaatggacctttcatcctcaaccttgattgtgatcactatgtttacaactcacaagctttccgtgaaggcatgtgcttcatgatggatcgtggtggtgaccgtattggctatgtccagttccctcaacggtttgagggcattgatccatcagatcgatatgctaaccacaacactgtcttcttcgatgtcaacatgcgtgcacttgatggtatcatgggaccagtctacgtcggcactggatgtcttttccgtcgcatcgctttgtatggatttgacccaccgcgctccaaggaacatagtggttgctgcagctgttgcttcccccagaggcgcaaggttaaaacttccacagttgcatctgaagagaggcaggctttgagaatggcagattttgatgatgaggaaatgaacatgtcacaatttcccaagaagttcggtaattcaaacttcctcatcaactctatcccaattgctgaattccaagggcgacctcttgctgaccatcctggagtcaaaaatggacgtcctcctggtgctctcaccgtccctcgcgaccttctcgatgcttccacagttgctgaggctatcagtgtcatctcatgctggtatgaagataagactgagtggggtcagcgtgttggatggatctatggttcagtcacagaggatgtggtcactggttacaggatgcacaaccgtggatggaaatcagtttactgtgtcaccaaacgtgatgctttccgtggcactgcaccaatcaaccttactgaccgtcttcatcaggtgctccggtgggctactggttcagtggaaatcttcttctcccgcaacaatgcactacttgcaagccgaaagatgaagtttcttcagaggattgcatacctgaacgttggcatttaccccttcacatcaatcttcctcattgtctactgcttcctgccagccctgtccctcttctcgggacagttcattgtgcggacgctaaatgtgaccttcctgacctatctgctcgttatcactctgacaatgtgcatgcttgcggtgctcgagatcaagtggtcaggcatcagcttggaggaatggtggaggaatgagcagttctggctaatcggaggaactagcgcccaccttgctgctgttcttcagggtcttctcaaggtgattgctggtatcgagatctccttcacgctgacatccaaatctggaggagatgaagcagacgacgagtttgctgatctctacatcgtcaagtggacatcactcatgatcccaccgatcgtcatcatgatggttaacctgatcgccatcgctgtcgggttcagcaggacaatatacagtgaaatccctcagtggagcaagctcctcggcggcgtgttcttcagcttctgggtgctggctcacctttaccccttcgccaaggggctaatgggaaggagaggacgaacaccgaccatcgtcttcgtctggtctggcctccttgccatcaccatctcattgctgtgggttgccatcaatccgccgtcacagaactcgcagataggcggctccttcacattcccctgagcttcctcatgaacatgaaccttttgtatgatgaattataagagtggtcccagtagcagttgtccttgctgttggacaagtaaattctttacctatgtttacttaggtttttcttttttttttgggtcg

SEQ ID NO: 26693 - DNA, 2835 bp, Oryza sativa
  ref <308>: DATABASE ACCESSION NUMBER: AK102135
  ref <309>: DATABASE ENTRY DATE: 2002-08-28
ggggttccgttcctttccgtgttgcctcccaccgcaatctcgtttcggctctccggccctctcctagggtttcgattcctcgccccctcgatcctcgacgacgcgaggtggttttcctttttttttggttttgtttgtgagagtggggggagatgccgccgaaggctaggaggggcgccgcggcggcggggaggaaggggccagggacgaggggcaggctggtgaaggcgcaggcggccgtggaggaggtgcccgccgaggaggttaaggctgcggaggaggccccgaaggtggaggagcagaagcgccagccgtcaccgccactgcagcagccggccgcggaggagaaggcctcgtccgacgctgcagcgaacggcgcgagccacggtgaagatgagggaactacaaaagaaacatatgaagaggataaaggtgaacgattggaatttgaagatgaaccagaatatgaagaggaggctgctgtggactacgatgagaaggacttggagcaatatgaagagcaatacgaggatggtgatgaagtggtggaatatactgaagatgtgattgaagaggagacggatatggtagacgaggaattggatggtggggacgatggggagggtgaaggatatgaaaatgccgaagaagagcataatgtggatgtggaggatgaagagcatcatgaaatggtgaaagagcatcgcaagcggaaggagtttgaagtttttgttggtgggcttgataaagatgcaacagaaagcgatcttaggaaggtttttggtgaagttggcgagatcactgaagttcgtttgatgatgaaccctgttacaaagaaaaataaaggctttgcctttctgcgatatgcgactgtagaacaagcaaggcgggcggtgtcagagctaaagaatccttcggtgagaggcaaacaatgtggtgttgctcctagtcatgacaacgatactctttttgtgggcaatatctgcaagacatggactaaagaacatctgaaggagaaactcaagagttacggtgttgagaattttgatgatctactattagttgaggacagcaataatccaggaatgaatcgtgggtatgctttacttgagttttctactcgccctgaagcaatggatgcttttaggcgattgcagaagagggatgtagtttttggagttgatcgtagtgcaaaggtttcctttgctgattcctaccccgaagttgacgatgaaataatggcacaggttagaactgtatttattgatggccttcctccctcatgggatgaagatcgtgtcaagaagtaccttaaaaaatatggagctattgagaaagttgaactagcccgaaatatgccagcagccaagagaaaggattttgggtttgttacttttgatacacatgataatgctgttgcatgtgctgatgggataactaattctgagattggtgaaggtgacagcaaggcaaaagtgagagccagattgtcgagaccattgcagagacctcctagaatgaagcatggattaagaggaaattttagggttgggcagggtgctcctcgaggtggacgttttgcatatgatcgtcctcctccacttcgccggcctccacctcgtcttttaagacccgatgttagtcgcttaccaccaccggtcaggagccgcccactgaagaggccagtagatattagagataggcgccctgttatgtcaataccagatagagttaggcgtttgcctccacccgagagatcatatgacagaaggcccccagctcctgtgtacccaaagagaagcccaaggagagaatatggaaggcgtgatgaacttcctccgccaagaagcagagctacctttggtgactatagttcaagagttccagtggatagacgcccctatagggatgattattcaccccgggggtcagcctattcggacctaggtcctcgtagtgctccccgcctttctgataggcgagcatatattgatgatggttatggagggaagattgaccgtcctttaccaacatatagggagggccgtggtcgtgattatgatacaatgtctggttcaaaacgctcatatgctgagatggatgatgtgccacctcgatatcatgacattagtgttcgtcagtctaaggcacgcttagactatgatgttggtggcagcagtgcccggtatgcagatacatatagcgagaggcttggacgatcacatgcgggatacagtggtggcagatctgtctctggtcatgatccagtgtacagtagtggtcggcatggcatgagttatggaggttccgcaagcagtaatgatgctggtggaatgtactcatcaaatttcagtggtagctacatgtctcgtgggtctgatgttggtggaagttcatattcatcactttactcagggcgtaatgtaggtagcagcagtggctactatggcggtagtggttctagttcatattactgagattttgcatcatatcgtctatggaacacacatggcaccgtaggaggttggtgtaggccccggattgtatggagctccttaatttaaggcctacggacctggacaagaagtggcaattgtgtgtggtgctcctgaattagacatgatcaaagaagtcagaaacaccaagttggttaaagcaatagtcttgtggatgttctggctagtttctttaatgtaaggctttgctttatttggtcaagaattgtgaacataatcgccagctatggtatcttggcatgtttacttccagtgtttctaaacatttttgagagatatggagtgtttcagtaaaatagtattatgaggtagttccctg

SEQ ID NO: 26694 - DNA, 2244 bp, Oryza sativa
  ref <308>: DATABASE ACCESSION NUMBER: AK102136
  ref <309>: DATABASE ENTRY DATE: 2002-08-28
gcccaatgatcaaatcaagcaaagcaccactgctgctgcaaagaacaccagatagatcaaactctctctctctctggtgttgctgttagttggtagtttggtactacttggtactctgggaagaagaaagagattattatagcagaaaagcagcaccatggcatagctccaggcagcaaaaccagaatacaacggggataacgattctctctcagctaaaggaggtcggggaaacaagtgggataggatctctctcaagtcgaggtgagtgagaactcagccaagaacaacaatggagtctctgttgctttagttctgccagccaattggtttcaactttcaacgctgctacttgttattcatcacctcctcggatcggtttgatttatgctcaaggttgtgctatgcatggtcatgctgattgagggcaagatttgcagggagaggaaggatccactgtgtttcttttctgggagaaaggaaagttgagatttgcaatatatacaagtgtgagcagcagcagttgagatccttaattcagccatggcttcttttgggatgaactggaatcagaagagccctgtgttttgggactgggaaaatccagcgcctttcggtccgaatacaatggaaaatcccaagagcatacctcaccctgaaccaagaggtgtagttgtcgcggccgcaaatcatggatccaccaattcatccggtggcacgttcacttctagctcggagctagccaatggttcatcgaagagctccttgtcagcgtcgttcgattcctcatccaagctggggaacagcttagagttcaggtttgcttctgtcaaagggcatggcaagaacatgtgcaaggatggcgaggccggtagagttgaagactcgggcacttctccagctgtggcagttagccatggtgagccggtaataggactcaagttagggaagagaacttactttgaaaatgtttgtggagggcagaatgtcaagagctcctctgcagcttcaggtgtgacttgtccatctactgtggtcaagaagatgaaggtgtctcagcagagcacacaaagctcatactgccaagttgaaggctgcaaagtcgatctgtcctccgcaagagaataccatcgcaagcacaaagtttgtgaagctcattctaaggcaccaaaggttattgtttctggtctggagcgccgtttttgccaacagtgtagtcggtttcatggtttagctgaatttgaccagaaaaagaaaagttgccgcaggcgtctatctgatcataatgcacgaagaaggaaaccgcaacaagaggcaatttcatttggttcatcaaggctcgccacgatgttttacgatgcaaggcagcagacagatatttactttggccaatctccttttggccaagtgagaagcaatgcaatttcttcatgtgacaacctgggaggcttcaaatttacagaagcaaaactcccctggatgaagccaatgaaaactataggccttgaggatctgaatttctctaccctgcagatgccaggcaatgttgtgtcgcatacggtgcatcatcatgattttgatgggctcataccattcaagggaaacaccccgaaggtcctcaaccaaggtgtggatccagcctgtgccgtcgtgtcctccaactcgaatggagccccggatcttcggcgtgctctctctcttctgtcaagcgattcctggggcccggccgacgttcaggccggctcccaggtgcatcccggtggagtgatgccgcccctcgccgttgccgccgccaccgtcaccgccccgacgaaccctgtcagtgtgatgcatgctctgcacccgtccaccggaggaggaggattctggcaagacggcgacgacccgcctccgctcgatcatgcctcgcaggctcaggcgttcatgcatcctggcaatggcagcagctccggctatggccatctgcactgattctgctgcatctatttggaacgggttgatggctggttactccgttcatgatcttaccctgtcagtgatggactctgaataatttgggggcgaattgtcctgcaaccccaggatttattatttctatttttgaaaccaaaccaccaggatatttgccattggatgagaagtgttcatgatcatgaaatgatctgttttgttccacagaatctgacatatctactactcgtcttgggaatgagctgagatcgattcgtgtgttgttcattcagg

SEQ ID NO: 26695 - DNA, 1965 bp, Oryza sativa
  ref <308>: DATABASE ACCESSION NUMBER: AK102137
  ref <309>: DATABASE ENTRY DATE: 2002-08-28
ggtacataggccgcggcgacggcgagagtggcaagtgggggagtccgtgcggtggtcgctccctcctctcgcgcggtgacatctaagtgccgcgtgttctcctcttcctcttcccctccacctccatttcccattccacccccttcccttctctcgtcctcctcctcctcctcctcctctctctctctctctctctctcttcaaaataggtgggcggtgctctcgcctcccctccaatcaatccacgtgctccagaaccctaaccctcgtgggggcgacgggggagaggttggcatctggcgatggcgtgttgctgcctccgtgccagcacggcgccccgcttcctcctcttccgcgccgccgcgcggcgagccccattgccggtcgcggtttccaggaagggtttctcggaacagtccgtattgccaatcacagacatgatcgagaattttcaaggaccatccatggagaacattccacgaattccattatatgatgatagcttgccctcaagcttgttgacaacttctccgaatcctagtgatagtgtagctcatgctgacccttcaaagagtagaataatgcttgttgatggaacctcagtaatgtacagatcctactacaagatattggcacagctgcagcatggtcaattggagcatgctgatggaaatggagactgggttttaactatatttaaagctctgtcactggttctagatatgctggagttcattccatctcatgcagcggtggtgtttgaccatgatggagtcccttatggtcattatactgccatgccatccaaagaatgtcacatggcaaaaggaatgacttttcgtcacatgttatacccttcctacaagagcaaccgcatcccgacaccagacaccattgtccagggcatgcaatacttgaaggcatctattaaagcgatgtcaatcaaagtgattgaggttcctggtgtcgaagctgatgatgttattggcacactagctgtcagcagtgtatctgcaggctacaaggtacggattgtctcccctgataaagacttcttccaaattctttcaccttctttacgtttgctgaggattgctcctcgtggttctgggatggtttcatttggagttgaagactttgtcaagagatatggagcactgaaaccatcacagtttgttgacgttgttgcgctttctggagataaagccgacaatataccaggagttgaagggattggagatattaatgcggtaaaactgataactaagtttggttccttggagaatctgttgaaatctgtggatgaagttgaggaagaacgaattaaacaggctttgatatctcaatctgaacaagcaatgctttgcaaaagcctggccacattacgttctgaccttccatcctatatggttccttttaagacatcggatcttgtgtttcagaagccaaaggatgatggagccaaattcataaaactcttgcgagctttggaagcatatgcagaaggctcgtcagcagacctaatcataagaagagccgcctatctttggaacaaacttaactcatgactatgctgatgtttccagcagtgacaacatacgaacttttcaagcacaaaagttccacctgagaagataggtgccttggtgctatgtttctgtcaaatttggtgcgagcagctcgctgtgctttctggcacaaaaggtggacggtgcatgtttagacaggctgtgcataccatgaaactgataattagttagttttgtagataaaagcacgtcatggctcatgcaatctacagaacatgatattttttacactctaatgaatggtggctgctggctggaaggtggaagaatggcatgtaggtacctgaaagcttaatcattcgattatgtgcaacttcgtagaaatattatctagtgacatgtcactattcatatgcacaatgataccaagttggtc

SEQ ID NO: 26696 - DNA, 879 bp, Oryza sativa
  ref <308>: DATABASE ACCESSION NUMBER: AK102138
  ref <309>: DATABASE ENTRY DATE: 2002-08-28
gatctcaaacccaacttcttaaagaacaaaaaacgatcagccatgaagagcggcagcctgctgacgctcaccctgggagccctcctcctcgccggcatccccatctcctccgccgctgtcacccccaacagcaacatccgcctccccaccgacggcggcgacgaatggccgtcaccgccgtgggactgctgcgacaagctgaagcagtcgccgctcaggatctggccgcccaagtacaagtgcctggacgaggtcgaccactgcgccgccgcctgcgaggactgcaagcgtgccgacggcggcggctacgtctgccgggactggtactggggcgtcaaccccgggcccaagtgcaccggcggcggcggcgaggaggcggtgaggtcgaggccgtggaaatgctgcgacgacgccgtgtgcacaaggtcgatgccgccgacgtgcagctgccaggacaaggtgaagtcgtgctccggcggctgcggcaagtgcgtgcaggtggagtcgcagccgccgcgcttccgctgcctcgatcgctaccacggcttcccggggcccaagtgtcacaaccagccagcttaattagctactcatgttaattagcctcagatcatacgatccaacggtgaataagagcgacgcgtcgagcaggggcgcacgcgctgaccgctcgatcagcgttaacgccttgcttgctgccgagtagcagtgacatatgtgtaacattcgtgtggtcacgtatgtttttttcctttattgtgtttttttttctttattgtgtttgttttatctggatcgtgagggaatgtttcggtgaccagagtacgtagtactagtatgttgtggttgctgtccaataaataagatgaatttggtagc

SEQ ID NO: 26697 - DNA, 658 bp, Oryza sativa
  ref <308>: DATABASE ACCESSION NUMBER: AK102139
  ref <309>: DATABASE ENTRY DATE: 2002-08-28
gtcagcagcacagcacacggctgcaacaatggccacctctcctatgctcttccttgtctccctcctactagtactagtcgccgccgccacaggcgacgaggcatcgccgtcgaacgcggcggcgccggcggcgcccgtgctggtcggcgggaggacggagatcagggacgtgggcagcaacaaggcggtgcagtcgctgggccgcttcgccgtcgccgagcacaaccgccgcctccgccacggcggctccggcggccccgccgaccccgtcccggtgaagctcgcgttcgcacgcgtcgtggaggcgcagaagcaggtcgtctccggcgtggcctactacctcaaggtcgccgcgagcgcgagggacccccgcggcggcgccgccgccggcggtgaccgggtgttcgacgccgtggtggtggtgaaggcctggctcaaatccaaggagctcgtctccttcacgcctgcttcttctaccaaataatcatgctcaaatatatgtattagtttcactctaattatattaattattactagttggactttactccctccgtctaataaaaaatcaaccctagtacggatgtaatacattatagtactacgaatcagacatccggtaccatagttttttatggaacggagatattagtttttt

SEQ ID NO: 26698 - DNA, 3768 bp, Oryza sativa
  ref <308>: DATABASE ACCESSION NUMBER: AK102140
  ref <309>: DATABASE ENTRY DATE: 2002-08-28
gagtggagcgcgagctgaagaggaggaggggagtggaggaggcggcgctgcagatctggaggcggagcggcgaatggtggtgtcgccggcggccgccgcgatctaggcttgccgcgcgcgcgcggatctgcgagctgcgtagccgtttctcgctgtgagtggaggaggaggaggaaggggaggaggatggcggcgaacgcggggatggtggcgggatcccgcaaccggaacgagttcgtcatgatccgccccgacggcgacgcgccaccgccggctaagccagggaagagtgtgaatggtcaggtctgccagatttgtggcgacactgttggcgtctcggccaccggcgacgtctttgttgcctgcaatgagtgcgccttcccggtctgccgcccttgctacgagtacgagcgcaaggaagggaaccagtgctgcccccagtgcaagactagatacaagaggcacaaaggtagccctagagttcagggcgatgaggaggaggaagatgttgatgacctggacaatgaattcaattataagcatggcaatggcaaaggtccagagtggcagatacagagacagggggaagatgttgacctgtcttcatcttctcgccacgaacaacatcggattccccgtctgacaagtgggcaacagatctcaggagagatccctgatgcttcccccgatcgccattctatccgcagcggaacatcaagctatgttgatccaagtgttccagttcctgtgaggattgtggacccctccaaggacttgaattcctatgggattaacagtgttgactggcaagaaagagttgccagctggaggaacaagcaggacaaaaatatgatgcaggtagctaataaatatccagaggcaagagggggagacatggaagggactggttcaaatggtgaagatatgcaaatggttgatgatgcacgtctacctctgagccgcatagtgcctatcccttcaaaccagctcaacctttaccggattgttatcattctccgtcttatcatcctgatgttcttcttccaatatcgtgtcactcatccagtgcgggatgcttatggattgtggctagtatctgttatctgtgaaatttggtttgccttatcctggctcctagatcaattcccaaagtggtacccgataaaccgtgaaacataccttgacaggcttgcattgagatatgatagggagggagagccatcacagcttgctcccattgatgtctttgtcagtacggtggatccactaaaggaacctcctctgatcacagcaaacactgttttgtccattctggctgtggattaccctgttgacaaagtgtcatgctatgtttctgacgatggttcagctatgttaacttttgaggctctgtcagaaactgcagaatttgctaggaagtgggttccgttttgcaagaagcacaatattgaaccacgagctccagagttttactttgctcaaaaaatagattacctgaaggacaaaatccaaccttcctttgttaaagaaaggcgggcaatgaagagagagtatgaagaattcaaggtacggatcaatgctcttgttgcgaaggcacaaaaagtacctgaagaggggtggaccatggctgatggcactgcttggcctgggaataacccaagggatcaccctggcatgattcaggtgttcttggggcacagtggtgggcttgacactgatggtaacgagttgccacggcttgtctacgtctctcgtgaaaagaggccaggattccagcatcacaagaaggctggtgcaatgaatgcattgattcgtgtatctgctgtgctgacaaatggtgcctatcttctcaatgtggattgtgatcactacttcaacagtagcaaagctcttagagaagcaatgtgcttcatgatggatcccgcactaggaaggaaaacttgttatgttcagttcccacaaagatttgatggcattgacttgcacgatcgatacgctaatcgcaacatagtcttctttgatattaacatgaaaggtttagatggcattcagggtccagtttatgtgggaacaggttgctgcttcaataggcaggccttgtatggctatgatcctgtactaactgaggctgatttggaacctaacattgttgttaagagctgctgtggtggcagaaagaaaaagagcaagagctacatggatagcaaaaaccgtatgatgaagagaacagagtcttcagctcctatctttaacatggaagatatagaagagggcattgaaggttatgaagatgaaaggtcagtgctgatgtcccagaagagattagagaaacgttttggtcaatcgccaatttttattgcgtccaccttcatgactcaaggaggcataccaccctcaacgaacccagcatctctactgaaggaagccatccatgttatcagttgtggatatgaggacaaaactgaatggggaaaagagattggctggatctatggttcagttactgaggatattctgactggatttaaaatgcacgcaagaggttggatatcaatctattgcatgccaccacggccatgcttcaagggttctgcgccaatcaatctgtctgatcgtcttaaccaagtgctacgttgggctcttgggtctgttgagattctgcttagcagacattgtcctatctggtatggttacaatgggcgtttgaaacttctggagaggctggcttacattaacaccattgtttatccaattacatccattccacttatcgcctattgtgtgcttcctgctatctgtctcctcaccaacaaatttatcattcctgagattagcaattatgctgggatgttctttattctgcttttcgcctccattttcgcaactggtattctggagctccgatggagtggtgttggtatcgaggactggtggagaaatgaacagttctgggtcattggtggcacatctgcccatctcttcgctgtgttccagggtcttctgaaagtgttagcaggaattgataccaacttcactgttacctcaaaggcgtccgatgaggatggtgactttgctgagctatacgtgttcaagtggaccagtctcctcattcccccgaccaccgtgcttgtcatcaacctggtgggcatggtggcgggtatatcatatgccattaacagcggttaccaatcatggggtcctctctttggaaagctcttcttctccatctgggtgatcctccatctctaccccttcctcaagggtctcatgggcaggcagaaccgcactccgaccatcgtcatcgtctggtcgatcctcctcgcgtcgatcttctcccttctgtgggtcaagatcgatcctttcatttcgcctactcagaaagccgtcgccttggggcaatgcggtgtgaactgctgatcggcaccgttacgaagatgaacttcaatcaatcaaggtctacccccccttgtgtaaatacctgaggggggctagaatgggatcttctttttgtgtagatgaagaccttttttatctaagttatgccactgtttattagctacttcagtgctggcgctagctgctgatacgatggaactgtgaagccttattttgcctgcgaagaagccagcccagcagcgtaaattgtgaatttttttcttcttttgtgacacccgttattttagtcatttgtttgaggggtcgttgttacacatactatgggatgttatttatacggatatattccaattacattcttttgcggtgagc

SEQ ID NO: 26699 - DNA, 1968 bp, Oryza sativa
  ref <308>: DATABASE ACCESSION NUMBER: AK102141
  ref <309>: DATABASE ENTRY DATE: 2002-08-28
gaagcggcgcggcgagcagcagccggcgaggcaggatgaacctggcgcagtgtcgcgtccagattcataggccgcgccgacctataagtacactcgcggggcacgctctctctctctccgaggattgcggttgcaagcaggataaacggccaccggtaggcgtcggcggagaggagaggagcaagagagggtgggaaggagaggcacctccggattaattcctccgcgggagctggatattgtgagggaatcgagcgatcgagtcgtcgtcgtcttcccctgagcaatccggacgcacgcgccccccgcctgttctgcttccatcttctccacgcggatcggcgagacaagaatcaggaagcacccagcgattgagtcgtcatctttccctgagcaacccggagtgccccacctattctgcttcctcttctccacacggatcgtcgagacaagaagcaagaagcatccagatatggcaccaagaggaaagccttggaagcattgttgcaacaagtgcgacaagagcttccgttcagggaatgctcttggaggccacatgtcctgccacaggagtgttggtaatcagccaaagagcacgtcaagcccacccactgttgttgatctgcacatgccactgctgagttcctgtgatgataatcttttgcttttgcccccagaaacacaatgccagatgtgctcaaaggtgttctccacccccggatcgctgagggagcacatgatgatgcacggtggggagaaggtggtggtcaaggctgaggaagaagctgccgggctgattgaagcactgggcattgctgatagcatgcaagatgtaatggtgttttcttcagtgaagcgtaagcgatcattccgatcaaagaggcagacaccagcactcagtttggaggagatagaggctgcagatgctctcctactgctttcagggtgctttgacaagacttcagcttatgaggattgctatctgggagatatagaagacagtagcttgagatccattgtgctgacagaggttaacatgaatgccgtggatcgttgttcggttcgatctgttggctccaaggagccaataaatgataataactcaggttacaaggattgctatggacaaagtgacaaggaaaactgtttgatcgttcccaaggaggagatggatccaaatgattttgatcatgagctggttagagatgctgctctcaggaaaccaagaaccgacaattcagatgaggagatgaagtttggtgatcttccagctgctgctatgaaggacaacagccaccgttgcaatacctgcggaaagtcatttggatcagggcaggcactgggaggccacatgcgacgtcattatgttcggaagtgcaatcgtcaacggggggttgctgaccacgctggttctgttcttatgaaagtgcaaaagctgaagcttagattggaccccatcttgtttgatgtcacacttccagctctcactgatggagactgctgcatttctgtgggtgtgaagcctgaacctcagctgtggtgtgtcacgagcaatcttcagtgaaccaatccggtgctcgatgtggtctgaaactctctgttcttttggtgaaatctggggtgttgtctgaaactggtacagttccttgagctgtctgtagactgtaggtagttcatcagccaggaagcaaaaaaaacccatgttgtcttccgatagatagtcacaagctcacaatactgataggagtagttctcttgactgacaaacttccatggatagcaaaggccaggatcttgagtgatagcttggttactgaacagtgaagctgatttccatgttgcatgcaatgcaatggacgagcttgtcattttttttttgtaccaacaatctgtaaaatcagttttgctttgctttctgtaaatgtctgtaccttgattcttgaaaggaatgctggtcagaatgaggtg

SEQ ID NO: 26700 - DNA, 1313 bp, Oryza sativa
  ref <308>: DATABASE ACCESSION NUMBER: AK102142
  ref <309>: DATABASE ENTRY DATE: 2002-08-28
gccgctccttgcgccaagacgagtagcggctgaacacaacaggcgaggggcggcggtctccatctggcgagcagagcaggggatgggaggggatcctggtgagcatccacatcctctttctgattcatctctcaatcccaccgggactacttttgtctggaattcgcttgcgtttgttaaccctagcttctcttctagatctggaagaagcccttctcttaatttcagagccttaaccttaatacaagtagcagtttgtttgttccccccaaaagtttcccaagttggatccgcccctggttgttaacatagtagcaaatacaatatgaacaatgagagtcgaccaaagtggagaaaagttgcctatgggggaaggcagccaggctatgacgataaccacacggacgagtcattccttgaggagatggttatgaacgccaatgttgtcaagagggacctcctgaaagtgatggtcgactcggtctccatatctcagtatctctgcattgttgctcttgtggtttcaacatggacctatacactgaacttggtcattgatgaggtcactcttttgaagctagacactagtctacttcttgccgggttttcgatgctcttgctcacggcaagtccgttctcgctcaagcttctctccaagtatgtcctcaatacatcattcttcatcagtggtctgtatgttttggcaccgatttatcaaaccctcactaggtccatcagttcagattccatatgggcacttgctgtatgccttctgttggttcacctctttctgcatgattattctggttcaactataaggccacctggtgcactcaacaacccaaaattgaccagcaatacctccttgaatgcatcgatagtagcatccgtccttgtagcttcgcgcctgccatctaggctgcatgtctttgcaatcatgctattctccttgcagatcttcctgtttgtgcccctcgtcgcgttttgtattaagaagttctctcttagacttcatctgctcttctcctttgctctgatgatcatgaccctaggcgtcacataccaattgcatcacatgttcttcatcctactgctggcactgcttgtttttatctcaattgtttgcccttactggcttataagaattcaggaatacaagtttgagatcaatggtccctgggatgaagctaaactctgctttgatataactgaataacagaggaaagtgcatgtgcagaattttggtttcaatgttcattatctataattgatgtattaccattagtcttattattctggagcaatttatgtgc

SEQ ID NO: 26701 - DNA, 1060 bp, Oryza sativa
  ref <308>: DATABASE ACCESSION NUMBER: AK102143
  ref <309>: DATABASE ENTRY DATE: 2002-08-28
gtgcgtcgctactcccaaatccgcgaaaaatcgacagagaccagccgcccaatctgcctgatccatcggaggaggacgacgaggaggaggtttgcgaggcagcggcagggagaggaagatgtcttcgctgcggaacgcgatccagcggcgcgctcacaaggagcgcgcccagccggagtcgaggaagaagttcgggcttctggagaagcacaaggactacatcgttcgggcgaaggctttccaccagaaggaggaaaccatcaggaaattgaaggagaaggcatcatttagaaaccctgatgagttctattttaagatgatcaacagcaagactgttgatggaattcataggcctaagcctgaagcaaacaagtatactgaagatgaactcatgctgctaaaaactaaagatatgggatacatccttcagggtattcagagtgaaaagaagaaaattgaaaaattaagctccatgcttcatgaactagacaacaagcgaccaaacaagcatgtttactttgctgaagacagagaagaggtcaaagaaatacaatctagaatagaacaaaagagcagttcacttggtttggacaacatcccttcgcgtataaagaggaaaactgcttcgtcctatagggagttagaggagaggaaacagagggttcaaaagcttgagaaactgtatgcagacatggccttgcagaaagagttgaagaaacctggacggaaaagaaaactccgtgaggatgagattgagaatcaaacatcccggcctgtttataagtggcgagcacaacggaagcggtaagatgatgtgaatggcttacaatggaatcattgagaatatatggagtaaccagtagatcctaaagcaaacggagactattgtttattttcttgaattctaatgcatttacatgtagcagtgcccctccacaaccgtctctcttcatagccttcacttgattgtatttgtggatccatgttggataccactttctgctacctgctactgatgtgatgtacctctgctttttacaaaatgttgggtaactacatc

SEQ ID NO: 26702 - DNA, 2477 bp, Oryza sativa
  ref <308>: DATABASE ACCESSION NUMBER: AK102144
  ref <309>: DATABASE ENTRY DATE: 2002-08-28
gagatctctctccccgttcacttccccgaaacgtccccatgctgcgctccctcgccggcgccgccgagtcggggcgctcgtcggcggccgcggcgctccggcggtccctccacgcaggagggcgggaggaggtggagagcgtggcgtaccgcatgtccatgctccggcctccccctgtcgtgccgaggagggggctcccgaggaactcgtgcagcctcatcggccgcctcgacgggccggtgcgcccgtgcggtggcagctccgacgagcggcccatggcgtacactttcctgtcggtctcctcctcgccctcatccccgccctcctcgagtccgtccaacttccgtgtgacattgaatttgcaaggcgagctggcacatgtaagcctaaagcatttgaaacaaaatgaccttgtttatgtatctggccttctgaattcatatcataaagttgatccaagtggagagaagcatacgttctacaaggtttgtcaatgataacttcttttgaacactttttgatgttctttgtgaaatataaaaggagcgcacacctaggccctaggaccttgatgatttgtatgtcaccagattgtgccttctctaatatattttctattccacaaccttcgcttatatagattatacatcttcgtatgcagaacatttattaacatcagaactttagctcaaattaaaaatacaaagtttgctcagaatgtttgcttgttccgtgctgcttttgtgttgtgaacaccttttgtggtggatgtgcataattgtcaacaagggaagaaaagctacaggagtggcagttggaaacaggttcatagaaagagtttgatgtccacaaataacagcaccatgtccttgaggaaagtttgtgctagttggttagtagattttgcactaactagtatatagcaggttagtagtggattgacattggaatagcagataccacctgctatattagtggaataaaaaaactcaatttttttaagttaatcgtgcatacatcaagagttcacaactctcttaacacaataaaatggtgacatttataggtccgaaacactcataaaagatatagatagacgtacaactcactagtatatgcacgaaaagtggtagtaattaacaaggtagtcaaagtttagatctggattctcaagtagccaacatgacttaacactgcaactacaaaattaaactttaaaattcagacttcagactccagtgcatatagcagttgctattttgtaacccgctattttgcagctgtacctcatctcagtagcggtagtacccactactgctaatgcgagcactggctgctaccaccgctgctatttggaaccttgaaatttgtaatagtagttagatgcatcatttagttatatcagagatacatagtcaagagttgttgaagttgcaccaaaacatgttagtatgcttgataccttagaagaaataaaggaagttcctccatccagaagtactggttcctgctgtatttttctcttgactgtcttctctctccctgttcattctagattctgtttctccccattcaagccctccttcacctattgctgttcttcaaattgtccttacctgatttcctctgacaaatgtttagttagcaacgcattgtgatatttgtggccaagaaaatatgttttcagtgcaatatcccttccatgccattgtgattctaactccgtcttttttatagatacatgtcacagacctaaactatgttcttgatcaaaatcagaggcctcaaaatgatgagaattcttcagacaaatcatcaatgctgtctaccacaggtatttctgctgagttatcttgtacagttatattcttttctattatttaccaaatcttctaaccttgtacttttcaaaagttagatgaaatacttacagaaaagaagtacatagatcggcttcgcttgtggcaggtcttcttcgctagcccttacgaatggtgggacaaccgacaatccaagccatactcctactatcctgatttcaagcacaaggacactggcgagaagctgtggcttcgtgcagatgatcctccttgggtaagaagacagcttgaattgcaagaccaacaactggcagagaatggacacagggatggtagtaggacactgaaaaaccacacatggaaatcacaagattttgactgctctccgtctcaagattttggctattctgatgacgaagaattgcttcattcatcaggtgcatgatatggggagatgtgagataatgctaactggtctcttgatctgcaattattatgcctagcttcactgtagaactcacttagttgtagaggatatagagtacttatgttagcgtagcaagttattaatggcttgaatggcgaatactggtaatgtgtgcggtaactcatgtacatgcatgatgtggtggaaatgtaaaaaaagtacttataacc

SEQ ID NO: 26703 - DNA, 2103 bp, Oryza sativa
  ref <308>: DATABASE ACCESSION NUMBER: AK102145
  ref <309>: DATABASE ENTRY DATE: 2002-08-28
gaccggcgacattattactactccggtcgaggccaacggcggcggcgccactgtccctctccctctagctccgccctccaatcccccgccacccaccgatgataccccgtctacaccgtgccattgcccgccgatcactgctaacctccaccgccctcctccccgccgtcgcccgccaccgcgatgcgccgctgccctccgcccccggcctcccccgtctgctccaccacgcgccgggggcgtccgatcaagcccggaaatcaggtcctcttacgctctacagggatctggtgagccaagggaaactccaacatgacatctaccaggaaaatgtagcaactcagctggacaacttacttagacgacttgagcaatacgagatggaaatggaggattaccatgcaagactctctatgtgggaaaatacccgggagaaacaaaggcgaaggcttcttgttcaagaagctgaggataaacagcgtgatggggtgtggatagatgagaaaagggggtttcttgacaagttagtgtcaaggaaaagaagaggaaatatagaacctggagttgggaaatgggtctcatatttgaaccgagaaaagaaactggataccttggttggccagaagcctgttgcacccattgctccgaaaggaatatatctttacggcaatgttggaagtggaaagacaatgctgatggacatgttctatggggccacagaaggtcttatcaagcacaggaggagattccactttcacgaggctatgcttgaaatacatgatcatatgcatgatgtatggaagagacgtgatgaggacaagtctattgagtcgagtgctttcagttggatatcaagcctcccttttgatgggaaaattaaggagtggctaattggggaagagaagtacaaacaaaatacacaacaaaaccatatccttttagctgtcgctgacaaatttcttgttgatagacaagcaaataagagtggagcaagcattctatgctttgacgagatacagacaatcgatgtatttgccgttgtagctctgtctggtattctcagcagattgttaagcacaggaactgtgcttgtttcgaccagtaataaagcacctgaagatctgaatcaggatgggatgcagcgggaaattttccttgacttattgtctaagttggacgagaactgcaacaaaattctttggaaccgaaacagattatcgccgcctaattccaactgacggcttaactcagattcactacttttggcctctcacttctgacattcggagtatgtatgaggctatgtggcacgatataactagacaaacaggaggaaacattatttctgtcaccattccagtaatgtttgggaggtatcttgagattcctaaaagttgcaatggagtggcaaggtttgacttcgagtatctgtgtggccgcccagttggagctgcagactatatagcaatagccaggaactaccatacaattttcatatcggatattccagctatgagtatgaagattcgtgacaaagcaagaagatttatcacccttattgatgagctctacaatcatcactgccgtcttgtatgtctagctgcctcatccattgatgatctttttcaaggaactgatgaaggacctctttttgacttggagagttttcagttcgaaggtgaagctgaaggggcaaagcttaggagggatgttttagcagaaggtaatgttggtgcagcgccttctcctacaggcctagtggcaattttgtctggccaagaagagatgtttgcattccgtagggcgatatcccgtctcatagaaatgcagacctcactgtatctggagcgcgtcgagcgtgtgcactcatccctccaacagcagagttcggttcttacaaagagcagcactgtttcgcagtctgctccgtccgtttgacagacgagacccttatagtaccattatttcatttcttatcgtggaaaaaattgtcggaagcactaataagattggagaacctacttgccgtctgtacaatgcactgaaccgtacaaaacataagtgattcgagcaattgcgtcgcacatattcttatgacttcct

SEQ ID NO: 26704 - DNA, 2699 bp, Oryza sativa
  ref <308>: DATABASE ACCESSION NUMBER: AK102146
  ref <309>: DATABASE ENTRY DATE: 2002-08-28
gagagagagagaaagaggagagagagagtacagcggtatagagagagagacacagagagagagagagagagagcagcagcaggtagcaggtcgaggagggtttgtggccatggcgatcctgtcggatgtggccaccgaggtgctgatcccgatcgccgccatcatcgggatcgggttctccatcgcgcagtgggtgctggtcgcccgggtcaagctggcgccgtcgcagccgggagcgtcgaggagcaaggacgggtacggcgactcgctgatcgaggaggaggaagggctcaacgaccacaacgtcgtcgccaagtgcgccgagatacagaacgccatcgctgaaggagcaacatcgttccttttcaccgaataccaatacgttggcgttttcatgtcgatattcgcggtggtgatcttcctcttcctcggctccgtcgagggattcagcacaaagacccacccctgcacatacagcaaggacaaggagtgtaagcctgctctgttcaatgccctgttcagcaccgtctccttcctgcttggagccatcacctcagtggtttctggcttcctcgggatgaagattgcgacttacgtaaatgcgcggaccaccctggaggcgaggaagggtgttggcaaggccttcatcaccgcgttccgttcgggagcggtgatgggattcttgctggcatcaaatgggcttctggtgctttacattgccataaacttgttcaagatgtactatggcgatgattgggagggtctctttgagtccatcactggctatggccttggtggatcctcaatggctctgtttggaagggtgggtggaggtatctacaccaaggcggctgacgtcggtgctgatcttgttggcaaagttgaaaggaacatccctgaagatgatcctcggaaccctgctgtgattgctgacaatgttggagacaacgttggtgatattgctggaatgggatcagatctgttcgggtcgtacgctgaatcttcctgtgctgcccttgttgttgcttccatttcttcctttgggatcaaccatgatttcactgggatgtgctacccgctgctggtcagctccatgggcatcattgtctgcttgatcaccactctctttgccactgacttcttcgagatcaaggccgtgaaagaaatcgaaccgtcactaaagaagcagctcatcatttctacggctctgatgactgttggtattgcactggtcagttggttggcgctcccatacaaattcaccatcttcaattttggtgaacagaaggaagtcactaactgggggttgttcttgtgtgtttcgatcggtctatgggctggtctgatcatcggatacgtgacagagtactacactagcaatgcatacagccctgttcaggatgtcgcagatgcttgcagaactggtgctgccaccaatgtcatatttgggcttgctctaggatacaagtctgttattatcccaattttcgctatcgcgcttggtatctacgtcagcttcaccattgctgcgatgtacggcatagcagtggctgcccctggcatgctgagcacaattgccactggactgtccattgatgcttatggtccgatcagcgacaacgccggtggtattgctgagatggcagggatgagccacagaatccgcgagagaaccgacgctcttgacgctgctggaaacacaaccgctgctattggaaagggttttgccattgggtcagcagcactggtgtcccttgcactgttcggcgccttcgtcagcagagccggggtgaaggtggtcgacgtcctgtcccccaaggtggtcatcggattgatcgtcggagcaatgctcccgtactggttctccgccatgacgatgaagagcgtcggcagcgcggcgctgaagatggtggaggaggtccggcggcagttcaacaccatccccgggctgatggagggcacaggcaagccggactacgccaactgcgtcaagatctccaccgacgcctccatcaagcagatgatccctcccggcgccctcgtcatgctcacgccgctcatcgtcggcaccctcttcggcgtccagaccctctccggcgtcctcgccggcgccctcgtctccggcgtacaggtcgccatctctgcgtcgaacaccggtggcgcatgggacaacgcaaagaaatacatcgaggctggggcgagtgagcacgcgaggtcgctggggcccaagggatcggactgccacaaggcggcggtgatcggcgacaccattggcgacccgctcaaggacacgtcgggcccgtcgctgaacatcctcatcaagctcatggccgtcgagtcgctggtgttcgcgccattcttcgccacgcacggaggaattctattcaagctcttctaggagagagagatttaaaattcgatcgaatttgaggacggacggagattttcgaataataactagaccacgggatcatgtgggctgaaaaaaaggaacctctgcaaataatgttgctttggtggtagtgggacactatctctacgatttaattttgtctcatgtaggttttgtaatttgtttttaacttgctgcgtcgttttcagtttctgtctgcctgagccctgaggcatcgtgaacttcttttagctgatgtacggcttgtataaagtgaccagatggttttcatctgcagtttatgtgc

SEQ ID NO: 26705 - DNA, 1863 bp, Oryza sativa
  ref <308>: DATABASE ACCESSION NUMBER: AK102147
  ref <309>: DATABASE ENTRY DATE: 2002-08-28
gatccctcccagtataagccaaaccaatccatagaggaggaagaggaggaccaggtggtggcacacctaagctttgtgcagtgccattcacgcacctgcagcttccagctttgccacatggaccagccggcgccggcgccggagccgatgctgctcgacgcgcagccgcccgccgccgtcgcctgcgacaagaagcagcaggagggggaggcgccgtacgcggaggggaatgacgcggtgaccgggcacatcatctccaccaccatcgggggcaagaacggcgagcccaagaggacaattagctacatggcggagcgcgttgtgggcactggttctttcggtatcgtctttcaggctaaatgcttggagacaggagagactgttgccattaagaaggtattgcaggaccgacggtacaagaaccgtgagcttcagcttatgcgcgccatggaccaccccaatgtcatctccctgaagcattgcttcttctcaaccacaagtagggatgagctgttcctcaatcttgtcatggaatatgttccagaaacactctaccgtgtgcttaagcactacagcaatgccaaccaccggatgccacttatctacgtcaagctttacatgtatcagttatttagggggcttgcgtacattcatactgttccaggggtctgtcatagggatgtgaagccacaaaatgttttggtggatcctctaactcatcaagtcaagctctgtgactttgggagcgcaaaaacactggtcccaggtgaacccaatatatcatatatatgctcacgctactaccgagcaccggagctcatatttggtgcaactgaatatactacatcaatagatatatggtcagctgggtgtgttcttgcagagctactccttggtcagccattgtttccaggggagagtgcagtcgatcagcttgtgagataattaaggttcttggtacaccaacccgtgaggaaatacgttgcatgaacccgaactatacagagtttaggtttccacagataaaagctcacccttggcacaaggttttccacaagaggatgcctcctgaagcaatagacctcgcttcacgccttcttcaatattcaccgagtctccgctgcactgctcttgatgcatgtgcacatcctttctttgatgagctgcgagagccgaatgcacgcttgccaaacggacgtccatttccaccactattcaacttcaaacacgaactagcaaattcttctcaagagctcatcagcaggctcataccagaacatgttcgacggcaagctacccacaacttcttcaatactgggagctaaaaatgctaaatgcacaccaccagaccttttgttggatcgttttcgcggaaccggtgaagttcacatgaaggctgagtcagatgattcttcgaatccccgcaaaacaagaagaatagaaaatatgattcctcagatgatgatatgcaaatgcttcgttggaagttcaattcaatcatcgaagaagaacaacattgtaaatcgagaagtttttgcatcgcgagtttggtagtgaaaccgggatcagctggtatgacggaggaaaccgaaatgtttagatccatgactgagttttctttcattttttttgcccaattgtaacagaagaatatagttccctaatgtaggcgtagttgtaacctgtaaactgccactgttttgttcacattccatgatgtaaatgccaccatgcctctgatgaataactctccttgtaaccttgttccttccatccttgactgtttaccttaaagccgtggacagtgtacactgtacatgtaccgtgctacacggaaggacatatttgaattttttttctctc

SEQ ID NO: 26706 - DNA, 1093 bp, Oryza sativa
  ref <308>: DATABASE ACCESSION NUMBER: AK102148
  ref <309>: DATABASE ENTRY DATE: 2002-08-28
ggtctcaggacatagattcctcatgctcttctcactcccatccatgtaggcttagctccgctaaaaccctagcaggttacattcccagccagcggcagcacgcacgcgccatggaggctaggcgttgccggcgccgcaccgccagcgcagcagcggcggcggcgaggaggcggctgtgcagcctcctcgccctcgccggcgactacctcaagtacctcctcacgaagcggggccggttcctcggcagggtggccaggaggtccctcgccgccctgctcctgtcatccggcggcggcggcaagccatgcctcgccacggcgccgtggccgccgtgcgcgctggcggagcgcgagttctcgtgcagcaacagccccagcccggcgttcctcgcggcgaggaggctgcggtcacggctgaagcgccgcgcgggcgccgcctcctgcttcggcgcgctccggtccccctgcggctgcgggccgtcggcgacagaggcggcggaccaggaggaggaggaagaagacgaggaggttgatcagtacggcgcgtgggagtgcggcggcggggagctgatcgacgtggactacagggcggaggagttcatcaacatgttctacgagcaactcagggcgcagagcttccacccgcccactgttctccagtgccgctcgccatgaccggccggtgccatggacgtgcacgtgttgaccagagcgagctagctctatcctcctctctactgcgtacgcgtgggcgtcgtgtattgtgtggttccaaccttcgaggagtcttcacttttgagcgttgcgctgtaccggtggtatctaaggttaaggtaaaggtgtaggtggctaacccgcgaatccatttataaattaaatgtttatttatttaatttataagtaggttcctggattagccacttacaccctcattaatctacggtacttactttcgtcttcttctcattcctctatggctctcagtaatatccctcctcctcggtgttgtaatttgtaagctattatttacatgtgtagagtgtacgtcacctgcgtcagtatatatgaataaaagagtagcaatggagtttggg

SEQ ID NO: 26707 - DNA, 884 bp, Oryza sativa
  ref <308>: DATABASE ACCESSION NUMBER: AK102149
  ref <309>: DATABASE ENTRY DATE: 2002-08-28
cgtccgattcggcgggctcatccgatcagagacgttcgtgcccccatcctcccccagtagccagaagctactctcgaaccctaatccctctcctcttcccacgaggagccgccgccgccgccacggccaccgtcttcccctcgagctcgtgaagccggagccgccgccttcttctcaagctcgcggagccagccgtcgccgccgccgtgcggagccagtggttaccgtcgctgtcttcccatcgacttcttgcgagtcatttccgtctccttccccatcccacgcagactttggttcttgcaagatctgtgcccgcatcgagcccccacaagcacgcggtaatcagaaggtgaagctcgacgtgggtgtggcagtagctaaatctcctcctgctgatacgaatcctcaaattgattgctcacttctgtttaacagtcctctgtctcactgctctctttcatatcaaacccggcagcctctgcttgatttttctgtatgtagtgcatggtcattcaggtctgaacatatgaggcctgcagatatttttggaagcacaaacgaaaggatcacgtattgattggccgatatcccaaagtaaaatcaataagtgactgaaggtaattcattagtgttttatgtctatatatgatcataaaagtgtctgcagggtgcatcagacaagcaaaaagtatatgggcagtgatggcacatttcttagggaagggatttatgagttcaacggcaaaatcctctctatcagtccatatagtagcagttgcctagcatttttaacttacctacattgctcccctatttttagctacataagaactatatgtatgtcaccccatcagagttgttgtatttaaatcacatattcttgt

SEQ ID NO: 26708 - DNA, 1128 bp, Oryza sativa
  ref <308>: DATABASE ACCESSION NUMBER: AK102150
  ref <309>: DATABASE ENTRY DATE: 2002-08-28
gacacagccggcggcaggcagctcagctcagctccgatcggcggcggcggccatctccggtaataatgtcgtcgtcctcgtccaagctgcatctcccggctgacgacagcgtcctcctcctcctcacgcactccaacctctccaccttctcctccgacatccgcgtctccaagcagacctccgtcgaggcgctcaaggacaagctctggaggaagaccggcacatccgttgccttcatgcgcctccagctccgcgacgacaccggcgccatgatcgccgacctcgaccacgatgacgccaccctcgcctcctactccccatacgacgggtaccgtctgcacattatcgatctcgatccttcgtcaatcacctctggtggttggttggaggatacttcccttgttgaaaagtacaccatctcagatgaagcatataataatcttgatacaaactttcgaaaattcaaagaaaagatggcctttaaaaaccctacgtcagatgataaacaacaacaatctgacaagcatatggaggaattgtgcgccgacatcaaggtgggtgatagatgtgaagtcgagccaggtgctaagaggggtactgtaaaatttgttggcagagctgaagctcttggacgtggattttgggttggagtccaatatgatgaaccacttggaaagcatgatggcatggtgaaaggcattcgctttttcgagtgtcctcaagggcatggagctattgttaggccagagaaagtaaaggtcggggactacccagagagggacccttttgaagaggaggagatctaggcggtgcgccatttacgttggacatggtcctctagggatacccatattcagaattgctcccgttaaaatctttcgccctttttttggtctattggtttgagaattaagatcattgaacatgaagaatatatgtgcgtgtgcttgttcctgatcccattctgggatgaccatggtgaaattggggatactgttgtacttttaagtactgagccatctggacgcttgagttggaagtttggttgaaattggaacgatgtgacagaaaagttggaagtttgtgtgtgtagaaaagttttgatgtgatgaaaaaattggaagtttg

SEQ ID NO: 26709 - DNA, 1518 bp, Oryza sativa
  ref <308>: DATABASE ACCESSION NUMBER: AK102151
  ref <309>: DATABASE ENTRY DATE: 2002-08-28
gcgccgcctcacctcaccgccgctgcgtcccgactcccaacgatggcgccgcctccgccgccgacgcgatgcctccccgtcctcctcctcctcctcctcgtcgtagcgccactcctcgcgcatggccgccgccccttcatttccgacggcggcaacgctaacgctaacgcgaacgcgagcgtgctgcggctgccgtcggcggcggcggcggcgggggaggacatgggctgcgagatgtcgtacgggttcctgccgtgcacgacgacggcgtgggggaacctgttcctggtgctcgcctacggcttcctcatgttcaagtccgccacctacctctcctccgcatcggcaggttggctccagcgataggcggcttcggtggcctcttccccttcggtgaccaatttcttgttgctggaaccgatggagtcgggacgaagctcaagcttgcgtttgaaactggtatccatgacacaattgggattgatctggtggctatgagtgttaatgacattgtgacttcgggtgcaaaaccactgttcttcctagactactatgctacgagcaagctcgacgttgatctagcagagaaggttatcaaggggattgtcgatggatgccggcaatcagattgtgctctgctaggaggagagacagcagaaatgcctgatttctataaagaaggtgaatatgatctaagtggctttgctgggggtgctgttaagaaggataaggtcatcgatggtaaaaatatcatggagggagatatcatcattggtcttccttctagtggggttcattctaacgggttctcccttgctagaagagtactggagaaaagtggactttcgttgaatgaccagctccccagaaatgatggcatgataactactgttggtgaagctctcatggcaccaactgttatctatgttaagcaggtgctcgagattattaacaagggtggtgtaaaaggaatagcccatattactggtggtggcttcaccgataatatcccaagagtatttccttctggacttggggcaaagatttttactgcagcatgggaagtgccacctgtattcaggtggattcaagaggttggaaaaattgaagatgcagagatgaggcgcacgttcaacatgggaattggaatggtccttgtggtaagcaaagaagcagctgatggaattctcgaaggtacccatggaccgaaccacgcatatcgcattggagaggtgatcagtggtgaaggagtccactacgtctgatctaattaatgatctttataatgctttgagtagtttgaggtttgttcatccgacaggcaaaccagcctaatttttgtaatcgcataacataaagggggccaagtcctggagcaacagtgagtttagtcctgtaagataagaaagcatggggcgtactccttttagttccacatgagaacttgcccccaaacggcagaacctattatttggacttgcatctacgagaggtgtcatcttattaaaatgttcttgc

SEQ ID NO: 26710 - DNA, 3114 bp, Oryza sativa
  ref <308>: DATABASE ACCESSION NUMBER: AK102152
  ref <309>: DATABASE ENTRY DATE: 2002-08-28
gcgttggtacgcttcatgggcgcagatgcctccctcgagatcgctcgcgtgccttctgctgccgccgctgctgctgctgctcgagtccgtgcgggacgcggacgcggggcccctggccgtggagatcgtgcggcccagcttcacggcgactagctacgactacgtcgacaccggcggcgcgttcttggtgtccaggaacggctcgttcagggcggcggtgttcaaccccgggaagcagcaggccagcttctacctcgccgtgctgcacgcgccgtcggggacgcccgtctggtcggccaaccgcgacgcgccgacgagctcgaccggtaaggtccagctctctgtgggagggatcaccgtgtcggacgccaatgggacggtgctgtggtcaacgccgccgctgcggtcccccgtcgcggcgctccgcctgcaggacaccggggacctgcagctgctggacgccgggaacgccacgctgtggcggtcgttcgataacgccaccgacacgctgctgcccgggcagcagctgctcgccggagcatacctgtcgtcggcgaagggcgctaccgatttctcccagggggactaccggttcggcgtgatcaccgccgacgtgctgttgacgtggcaggggtccacctactggcggctgtcgaacgacgcccgggggttcaaggataccaacgccgccgtggcgtccatgtcggtgaacgcgtcggggctgttcgcggtcgccgccgacggcgctatggtgttccgggtgggcctcgcgccggcggagttccgcatgctgaagctggggagcgacggccggctgcgcatcatcagctacgcgctcgtgaactcctcggcgccggtcggcggcgacttcatcgccccagccggcgactgcgacctcccgctgcagtgcccgtccctcggttactgttcaccggcgggcaacggctcaacctgcacgtgcccgccgctcttcgccgcatccgtgacagttgccggctcgtgcacgccgggggacggctcgacgctcgcgtcgccggccgcgtgtcagaacaacgacagtagcagcggcggcgcctccgtttcatacatcgccctcaagccgctgacctcctacttcgccacgaagttcgacgccccgacgaacaccggcgtcaacaagacggcgtgtcgcgcgctctgcaccgccagctgcgcttgcctcggcttcttccacgacagcgtctccctgagctgccgcttgatcggaggaaagcagctcggctcgctgtacaagggcgcatcagatacaaacctgggatacatcaagacgttcaactccgcaaccaaggccgggagcaaccaaatcggctcgtcgtcggcgaaccacaccgtgccgatcgtcctgccgtccgtcgcggcgttccttctcctcgccgtgctcggatggtatatatggtggaggaacaagatgagcaagaacggcaggaaaaagaagggcaagagctccaccatgaaagtgtacttgggccgtcagaagtcgccgtccagggacaccggctataacgcggacgctgacgacgacggcggcggcgacgatgacgacatcgtcataccgggcatgccggcgaggtttagctaccaggagattacaacgatgacctccaatttcgcgacgaaggtgggatccggcgggttcggcaccgtgtacaaaggggagcttccaggcggcgaggggctcaccgccgtgaaaaagctcgaggccgccggcgtgcaggccaagcgggagttctgcacggagatcaccatcatcggcaacatccgccacgtcaacctcgtccgcctccgcggcttctgcgccgagggttcccgccggctgctcgtctacgagtacatgaaccggggctcgctcgaccggtcactgttcggccgcacggggccggtgctggagtggggggagcgcatggaggtggcgatcggcgcggcgcgcgggctggcgtacctgcacaccgggtgcgagcagaagatcgtgcactgcgacgtcaagccggagaacatcctgctcgccaacggcggccaggtgaagatctcggacttcggcctcgccaagctgatgtcgcgggagcagtcggcgctgttcaccaccatgcgcggcacgcgcgggtacctcgcgcccgagtggatcagcaacgcggccatctccgaccgcgccgacgtctacagcttcggcatggtgctgctcgagctgatacacgggaggaagaaccgcggcgagcaggaggcggcggcgccggccaacaacgtcgccgtcgctgccggcagcggcgagcactcggacttgccgtccggatggagcagcgcgatgacgtcgacggcgagtggcacgagcggcggcggcgacgagtacttcccgatgctggcactggagctccatgagcagcggagatacctggacctcgtcgacgcgaggctggaggggcgcgtcgacgaggccgaagcggcacgcaccgtccgcgtcgcgctctgctgccttcacgaggaccctgcgctgcggccgagcatggccaccgtggtgcggatcctggaaggcagcgtgccgccgccggagccgcgggtcgaggcgctcggcttcctccggctctacggcaggagctatcccttgccggtgccgggttcgttgaccgccatggccggtggtggctcgcatttggacgagtcactgaaggacacgtcagcaccaagatagcactatgaagaccgagctgcatatcatccggcacatatgacgtggcactgtacaattgtccgcagtgccgacgtggcagtacacctgtccattatagaatccatggaaccgattaacctgacgtaatactccctggacgataatctgcaatgctgcatactttcgtcggttcctcccgtggttatatgcttggcagtatctgcagttcttcatctgataaagaagaagagaaaactgatccatgaggtgtggacaggttgaaaaacacaaaagaatggctgccatagattaaaagaactatgccaacttgtccatgtactagagcattagacaaagttagctttgaagctggtgacatggacagatgataaaatgattgctgattaattagt

SEQ ID NO: 26711 - DNA, 1153 bp, Oryza sativa
  ref <308>: DATABASE ACCESSION NUMBER: AK102153
  ref <309>: DATABASE ENTRY DATE: 2002-08-28
gggtaggtggtggatggccggcgcggggatcgaccgcgtgacggcgtgaggtgcggcggcggcggcggccatggcgctcgcgcagggcaccggcgacttctccgtggtggtgctgggctccgacttcgcggtcgacgccggcgccgtgctcctcaacccggccgaccgggaggagtggcacgactgcctccccgacctctccgcgcccgccgacggcgaggacttctccgacctcgaagagctccaggtcgtccgcgtccagggcaccgacagggccgggaggcgcatcgtccgcgtcgtcggcaggttcttccctgctcctgtcataggtggtgatcgtctgaagaagtatgttcttcacaagctgcgcaccgaattgccagaggggccattctgccttttgtacatgcacagcactgtgcagtcagatgataacaaccctggtatgtcaatcttgaggggggtctatgaagatcttccacctgaatacaaggagagactgcagatcttatacttcttgcatcctgggcttcgctctaggttggccatcgccacgcttggcaggctctttttaagtggaggtttgtattggaaaatcaagtatgttagtcggctggagtatctttggggggacatcagaaagggggaagttgaaattccagatttcgtgattgatcatgataagattcttgagcaccgaccactgacagactatggcatagaaccagatcctctgcatcttgctgatatgcctgctgtggggtactcgctcggaaggtatgaagacaaatggtctcctgaagatcgatggtattctcgcaattacatgtgagaatttgatagcttgatggtattctcgcaatttggtagccgaagcattcaagattcatgtatatataataaaactgtatggtaatgttgtgtgattgtcagtttgttgggaattcatatagggctgcttcggcatcgtagggtatatattgcatgcaaaaggcatacatttcaatttcccaatttaatctccgtcgaacactatgcccagtcgaacactatgcctaatgttgtttgacagtcgacatatagtgattgagaactgtaagcgtaattacatcttatgtcttttatgttttctgtgaagttcttgacattccag

SEQ ID NO: 26712 - DNA, 1344 bp, Oryza sativa
  ref <308>: DATABASE ACCESSION NUMBER: AK102154
  ref <309>: DATABASE ENTRY DATE: 2002-08-28
gcgtctacgtcgacggcagcttactttgagagccttggtaggatgagctccgcggccatgaagctcgccgtggtggccgcgctcatctcggccgccgccgtgggcgcccgcgcctgcctcgacgtcggcttctacgacacgacgtgcccgacggcggagacgctcatacagcaggtcgtcgccgccgccttccgcaacgactccggcgtcgcgccggccatgatccgcatgcatttccacgactgcttcgtcaggggctgcgacggctcggtgctgatcgacaccgtgccggggtcgacgacgagggcggagaaggacgccgcgccaaacaacccgagcctccggttcttcgacgtgatcgaccgcgccaagtcggccgtcgaggcggcgtgcccgggcgtcgtctcctgcgccgacgtcgtcgccttcatggcgcgggacggcgtcgcgctgtccggcggcctcggctaccaggtgcccgcggggcggcgcgacggccggacctccctcgaggacgacgcgctcaacttcctgccgccgccaacgtccaccgccgccgacctcgtcgccaacttcaccgccaagaacctcaccgccgaggacatggtcgtcctctccggcgcccacaccatcggcgtctcccactgcgactccttcaccaatcgcatctacaacttccccaacacaaccgatggaattgatccgtcgttgagcaaggcgtacgcgttcttgctgaagggcatctgtccgccgaacagcaaccagacgttcccgacgacgaccaccttcatggacatcctgacgccgaccaagttcgacaacaggtactacgtcgggctgacaaacaacctcggcctcttccagtcggacgcggcgctgctgacggacgccgcgctcaaggccacggtgaactccttcgtgcgcagcgaggcgacgttccggctcaagttcgccagggccatgatcaagatggggcagatcggcgtgctgtccgggacgcagggcgagatcaggctcaactgcagggtcgtcaaccctgtcaatgtcactgctactgcagctgatgatcaccaccttacttcctcttcctcctcttcttcagatgaagtggctgcaagctaattaattaactgattaccactgcttgttagtaggtgtgcatgcacagacagtgattgagatgtgtgtgaagttcagtgtgatgagatgattagatgcttcaattgtttgttgcagttacagtgattgagagacatcagatcttgtttacctgatgtaggtgttggtggttgatactgtcaccatcttgtgcttgtcagtctgaaaaataaattgttgcatccg

SEQ ID NO: 26713 - DNA, 1308 bp, Oryza sativa
  ref <308>: DATABASE ACCESSION NUMBER: AK102155
  ref <309>: DATABASE ENTRY DATE: 2002-08-28
gtctccgcatccatcagagaagggagaggtagagaagagagagcagagctaagctagctcagagtgagtagcgtgttgagcttgctgaagggagcggcaatgtcgaaggaggtgagcgaggagccggagcacgtgcggcccaaggactacaccgacccgccgccggcgccgctgttcgacgtcggcgagctccggctgtggtccttctaccgggcgctcattgcggagttcatcgccacgctcctgttcctatacatcaccgtcgccaccgtcattgggtacaaggtgcagtcgtccgccgaccagtgcggcggcgtcggcaccctcggcatcgcctgggccttcggtggcatgatcttcatcctcgtctactgcaccgccggcatctccggagggcacattaaccccgcggtgacgttcgggctgctgctggcgaggaaggtgtcggtgattcgcgcggtgatgtacatcgtggcgcagtgcctgggcggcatcgtgggcgtgggcatcgtgaagggcatcatgaagcaccagtacaacgccaacggcggcggcgccaacatggtggccagcggctactccaccggcaccgccctcggcgccgaaatcatcggcaccttcgtcctcgtctacaccgtcttctccgccaccgacccaaagcgcaatgcccgcgactcccacgtcccggtgctcgcgccgctgcccatcgggttcgccgtgttcatggtgcacctggccaccatccccatcaccggcacgggcatcaaccctgcccggagcatcggcgccgccgtcatctacaaccagaagaaggcatgggacgaccactggatcttctgggcggggccgttcatcggagcgctggcggcggcggcgtatcaccagtacatcctccgggcggcagccatcaaggcgctgggctccttccggagcaaccccagcaactgagcttagatggccatggctgctctgctgctgctggcctggttggacttggtcatatcgtttgcatgtgagggagtgtgtgtgagagagggtggggggtgccagtcagccaggtgcatgatttgttgtttccagcttaaattatcatcaccgttactgttgttaatcaaaccggtgggatttgttgtatgtatgtatgtactaccttgattaatttagtttcgcttgtttgtgtaaccggtgttagtaattattagagatacaaactgcttcggctttttaagttcagtcgaccacccttgtaaaaccgctgtaagaacttccaccaccaattgccatctgcttttgttgctgttggattgc

SEQ ID NO: 26714 - DNA, 2710 bp, Oryza sativa
  ref <308>: DATABASE ACCESSION NUMBER: AK102156
  ref <309>: DATABASE ENTRY DATE: 2002-08-28
gagtgtgcatggtccatccatacatacagccatagagagagagagtgtgtgtgtggcagattgcaaagccatttgcacggcatccttaattcattttcctgcgcctgtcaattgcagcaagatcacatgaactcaccaaacccctccataaattaatcacaaggcaccagccccaccctctctccatctccacgatgcatgttccactgctctctctctctctctctctctccctctctctctctctctcttcctgtcatggacggatggaccagggcctagctcgtactactacaaaagacggcatcagttttttggccacctctcctctccttgtttgcctcctttcttcttcttcttcttctccctcatttgagctgagaagttaagttggaaccaagaactatactagttatattatgtagaggaaacatcacaaaagaatatcagaaaataaaaagaaaccgttccatgccaccctgagattctcctacaagctagcccaaccaaggaaacagcaatttttaagctgtttctcttgatactcgatctacatcttttcccttagtttaacactctttttcagtgggtttactactcttgtgtggtggtggtagtggtagatcaagagccaagaagtccgggaaaaaaattctacttgtttcgtccatttggtttagtctgccaaagcagaagtcagtggcgagatcttgtttctactccattcgcatcattctgctgccaatttgccctcagagaagagggagattcggcagcggaagagagcggagtatctccggcgatggcggcggcgctggagtgctggtcgggccggccgagcaccgacgaggagatggtggagcaggtgctcatgaagccccacgtccgctcggacgattccctccccacctgcgccgacgcggccttcgccgccggcgagccgacgacggcgcaggcggcgccgaagaagtggcagcggctggggcgcaacttcgccggcgccatcgcggcgttcaagagctcgctgaacctggacaacggcagcctccctcgcgacccctcgccgcgcgccgtcggcgagaggccgccgctcctcgtccgcggcttccagcagctctactcccgcggcggcgccacccagcagctgccggagaagctcgtcgctgacctccgccgccacttcgacgctcttcccaacagctatgcacaggctggatttgacatgaaagatgtgctcttgcatgcccgtcttgtagagcaggcagctggtgaggatcagcctgcagtgagtattgaggaagttcctggaagcaatggcagaggaggtgccaatgaaggaactgtttttcagctcacttttgcctgcagtgcaccactttcatggcagtcaatgtcaggctcacttgatagtccttcattttgctgcaagaggatccagatcttcgagaagagaggattgacgcttggtgttgtaatgatactcgtgcagcctgggaatgaggtgttcttcaagaaccgggtcgacgcagcactgaaatcagcaataaagaagcagcggaagaacagcggcggtgttaagctcccatttgggctctgtggttgtcaagaagaaggttcaagaaactttgatgaggaatctatgtttgatccagatgatggtcaggttcttgacaatgagccaacttgcaagccacagctgcctaccccactaccacaatcatcagtttttgtttctatagacgagtggcaaaccattcgatctggtggcgaggagcttggccgctggatgctgagctctgaggaaatcgagtttattgattgggttggtccaaattcattcaagggtgtttttagaggaaggaaggtttgggtcaacaaaatgaggggctgtgacatgggaagtgcttatgatgttgaaatccgccaggacttgttgcagctgatgagctgtggccagaggaacatcctccaattccatgggatttgcttcaatgagaaccatgggctctgcataataagaaggatgatggaaggaggatcggttcatgatatcatcatgcagagaagcaagagattgtcactccgagacattcttaagatcgctattgatgttgctgagggtttggccttcatgaacagctacgcaattacctatcgtgatcttaacgctcggaggatcctgctcgacaggcaaggaaatgcgtgcctcggggatatgggcattgttaccccttgtaataatgctggtgaggtcaccgagtacgagacttctggctatcgatggctagctcctgagatcattgccggagatcccgagagcgtgtcggagacctggatgagcaacgtctacagctacgggatggtgctgtgggagatggtcacaggtgaggaggcatactccacatactccccggtgcaggcagcggtggggatcgccgcatgcgggctgaggccagagataccaagagactgccctcatttcctcaggtcactgatgaccaggtgctgggacaacaaccctctgaagcgcccccagttttcagagatcatctccatgctgcaaaggcagaatgtcagatagtttttctccttcttcttcttcttcttttcctatgctgcatatctgcttttgtctggctgtttgccccaatcatgcagggaactgcatatgagagaatataatatatgtgcaaaggcttgttatattgct

SEQ ID NO: 26715 - DNA, 1669 bp, Oryza sativa
  ref <308>: DATABASE ACCESSION NUMBER: AK102157
  ref <309>: DATABASE ENTRY DATE: 2002-08-28
gaattgtgaaggtggagttggacgcggcggcggaggtggagatggcggcggcggcggcggcgacggcggaggagtacgaggagatgctccgggtggtggaggcgatcgccacgcgcatccggtggcgcctccggccccactccaagcgccgcctcctcaacgatatactgttcctctgcagtgggttgcggcctgtggtactgatggattacggtggcacaatgcctgaactacaggacaatctctgctccctgctgcatcatgctcggcaggagtcaagcatgttgagtccactaaggctgatggttattaaagatatgctttacttgattcatgcaaagggtcttgctgagcatgcttcaccaagtgcaaggtcacagcacaagctcgcttttgtggacctagagaaaagctgtagcaaagtctttgccttctcagatcctgtctttctattttctctgtcctatgtcctattcttctttcctttgttgtattactgaatgctgtcttggtgcagctgctttcagaaaccgaagagaatggtgctctgcatgagtttttatccatccaagacctgttttcagccaacttccctgtagatgcagatgtagatctgcctattatacaacctgaagcaaaagggcagatgtcagaaattccagagggaaccactatggataattttggctttcggattgctgacggaacatcactggttattgatctgagcaccttccttgagagtgcccaaattgcattgccttctttgaatgggtaaattctagttctatatattattgaacccacaaccattcagtgttgaaagtaccttttttattggttcagttttctggttcttttaacatcaaaaggagatgtttgctatgttggtgaagttaagcagaagcacttaaatttgtctatattaatatttaatcatattgcaatgtttttaggtggcttttgggttatcctgtaacatatttgttttgcaatgaaagtgcggaaactgccacacaaaatctctccaagcactctctgcatatctataggatatatgctgtgaggtttggcattttagactgacccacttggagttttcttttgggatgagaattctttgaagcttacttggaatatctttactgcagatgtcgtcaatcagctgccaaacagtcagaacaggaactgatgagtttttcagttccttgtgacatgagcaccaaacgtgatgaagaaccatgggcgaaatcatttctggcacacatgaatgagaagatcaagcaatgcaatcatgtctgggcatcagttcggatggagatcgaggttttccatagccaatcaggactcattgttttgtagttcagatcagcaagcctttgactatatgatacctgcaaagttggcattcactgatcctacaagttgcatctataccacctgtaaaatggtccaagttggtgaagcttctttcagttcattcggcattcaggtggaatcaaggaggcaacgatgaatagagatatatatcatgataaattgatgatcgcatatatagatctgtgcctgcaacatagcagagagataatttgttctgcaatgttcaacgacgaacatatcctctgtagtctgtaccacagatgttgcgaatcacaactatgtttctact

SEQ ID NO: 26716 - DNA, 2763 bp, Oryza sativa
  ref <308>: DATABASE ACCESSION NUMBER: AK102158
  ref <309>: DATABASE ENTRY DATE: 2002-08-28
gagtctcgcccaccgccaccgccactgcactccggtcgccggagcagccgccatgtcgggccccaagctcgaccgcaccccgagcatccgcgaccgcgtcgaggacaccctccacgcccaccgcaacgagctcgtcgccctcctctccaagtacgtgagccaggggaaggggatcctgcagccgcaccacatcctcgacgcgctcgacgaggtccagagctccggcggccgcgccctcgtcgagggccccttcctcgacgtcctccgctccgcccaggaggcgatcgtgctgccgccgttcgtggcgatcgcggtgcggccgcggccaggggtgtgggagtacgtccgcgtgaacgtgcacgagctcagcgtcgagcagctcaccgtgtcggagtacctccgcttcaaggaggagctcgtcgacggccagtacaacgatccgtacatacttgagcttgattttgagccattcaatgcctcggttccacgcccaaatcggtcatcatcaattggaaatggcgtgcagtttctcaacaggcacttgtcttcgatcatgttccggaacaaggattgcctggagcccctacttgatttccttcgtgggcatcggcataagggtcatgtcatgatgctaaatgacaggatacagagtctgggaagacttcagtctgtgctgacaaaagctgaggagcacttgtcgaaactcccagctgacacaccatactcacagttcgcatataagtttcaagaatggggattggagaagggttggggcgacacagctggatatgtcttggagatgatacatctccttctggatgtgcttcaagcgcctgatccatctactcttgagacgttcttgggaaggatccccatgatctttaatgtcgtcgtagtgtctcctcatggatattttggccaagccaatgtgttgggcttaccagatactggagggcagattgtctatatactggaccaagtccgtgcattggagaatgagatggttcttaggttaaagaaacaaggccttgattttacccctaaaattcttattgttactcggctgataccagaagcaaaagggacatcatgcaatcagcgtcttgagagaataagtgggacacaacatacttacatattacgagtgccattcagaaatgaaaatgggatactcaggaaatggatatcaagatttgatgtatggccctacctggagaaatttgcagaggatgctgctggtgagattgctgcagaactacaaggtactccagacttcataattggaaactacagtgacggtaatcttgttgcatcattgctatcttacaagatgggaattacccagtgcaatattgctcatgctttggaaaagactaaatatccagactcagacatatactggacgaagtacgatgagaagtaccatttctcctgtcagttcacagctgatataatcgccatgaacaatgctgattttataatcaccagcacataccaggaaattgctggcagcaaaaacacagttggacagtatgagagccatactgcatttactcttcctggtctgtatcgtattgtccatgggattgatgtttttgacccaaagttcaacatagtctctccaggagcagacatgtctatatactttccgtacactgaaaaggccaagcggctcacttcgcttcatggttcacttgaaaacttgatttctgacccagagcaaaatgacgaacatattggacacgtggatgacagatcaaaacccattctcttttccatggcaagacttgaccgagttaagaacataacagggttggttgaagcttatgctaaaaacgctaggctgagggagctggtaaaccttgtcgtggttgctggctataacgatgtcaagaaatccaaggacagagaagaaatcgcagagattgagaagatgcatgaacttattaagacctataacttgtttgggcagttccgttggatctcggctcagacgaacagggctcgcaatggtgagctctatcgctacatagctgatactcatggtgccttcgtgcagccagctttctacgaagcattcggtctcactgttgtggaggccatgacatgtggactccctacttttgcaacagtccatggtggacctgccgagattatagagcacgggatctcagggttccacatagatccttatcatccggatcaagctgcaaatctgatagctgacttcttcgaacaatgtaaacaagaccccaaccattgggttgaagtttctaatagaggcctacaacgtatatatgagaaatatacatggaagatctactctgagaggttgatgacattggctggggtttatggcttctggaagtatgtctcgaagcttgagaggcgggagaccaggcgctatcttgagatgttctacatattgaagttccgtgaactggcgaagactgtacctcttgcagtagatgaggcacactgactgtaggtcctcgacgtgatgagatctgagggaaatcttcctgctgtcagtgggaatggtataggcaataatgtgcagcagatggccgcttggccgataataaaatggaatgtaacttgtgtgttcagcaagtgacgaacttgggagttgggactctgtaaaactagatttgtcaaacatcttgtctatgtacattaaaatagtttgatactcagtgcttcattgccattgtgttaatttgataatctgttaccttgtactattaagctaactgttttccc

SEQ ID NO: 26717 - DNA, 1188 bp, Oryza sativa
  ref <308>: DATABASE ACCESSION NUMBER: AK102159
  ref <309>: DATABASE ENTRY DATE: 2002-08-28
ggtgtgcgtctctctctgtctcactctctgtgtgagtgcgagacagtgagacactgcagcctttctcctctccccttcttcttcctcctcttctagctatggctttcttggtggagaggtgcggggagatggtggtgtcgatggagatggcgccgccgccgatgccgcaccaaccctaccaccaccaccaccacctcaatcccttctcgctgccgccgccgccgccggcgtaccaccaccaccatctaatccaagaagagcccgccacgacggcgcactgtactgtcgccggagacggcggcgaaggcggggacttcctggcggcgctgtcggaggacaaccggcagctgcggcggcgcaactcgctgctgctgtcggagctggcgcacatgaagaagctctacaacgacatcatctacttcctccagaaccacgtcgcgccggtcaccaccaccgccaccaccccctcgtcgacggccatggcggcggcgcaacaccaccttccagccgccgcctcctgcaggctgatggagctcgactcccccgatcactcgccgccgccgccgccgcccaagactccagcaaccgacggcggcgacacggtgaagctgttcggcgtgtcgctgcacggcaggaagaagcgggcgcaccgggacgacgacgacggcgtccatgaccagggaagcgaggtgtgagcgagctttgcagccgccatgcttgctcgatctcgtgtacatatagagaagagaggatgatgatgagctagctcgatcgatcagctcagctcatgctgctgcttgatttcttgaggaggatgacgacgacgacgaagattgatttgcgcaagggtgcaggtgttaattagtttgttaattagtctttgagatgagatgacaagagttgattagcgttaaggtaggagtagctagctaggaggtaattaggatcaatcaaatcaattagtagctagctgctactgctagtgcttaattgcacttaggtagctcttgttttgttcttgcttattttgatcttgccatgcatcatgcatgccatgcatcatgtgagagagtactgatcacctttcatgctggtgaagagtgatgatcagacgaggaactagcttaattagctagctaagtggatgttaaatggtactaatgaagtccaaggcatctaagtttttgc

SEQ ID NO: 26718 - DNA, 3521 bp, Oryza sativa
  ref <308>: DATABASE ACCESSION NUMBER: AK102160
  ref <309>: DATABASE ENTRY DATE: 2002-08-28
gctgggattttctcaaatctcaatctctctttccaaccccaactctgcccgactccagtgtcctccaaacccaacacgagccggaacgccaccgcctccctccctcctccaaaacctctcggcatcgttctcgtcgattccgagccctcgtcgcgcatttctcccccaaaccaaatcccgctgcacgttgcggcgttgcccgatgcgcgcttgatccattgagtccagacggcgatgtattcggagaagaagaaggcaagggcgagggatggggatggagatcgggatgctgccgagagacggcggaaggggaaggccccatgcctggagccgccgccgacaccgccacgcgcgatggcggcggcggcggcggcggaggccggtccttcacgcggcggctgcgttccgtcacggaatcccttgaaggatccgggggattgcgaggcggtggccatcagggacaccgacggcgaggactgcggccacttcagctgcgacatggacgagatcgctgacatcgagatgggcatggccgcccgcggcgacccgatgtgcgagcacgagacgtgcctggccaccgggagcaacctcatgatggtgtgccccgaatgcggctggtgcttctgcgtcggagggctagcccacagggccaagccgctggggcacatcagggagcatgcctaccggagggcgcattgggtcgcgctgcgctgcgaggatccgtgtgagggttactgcttcgagtgtgaggattcattggcaattgagagccagatggtggccgatgatggcgccggaggcggcgaggaagggtatggatgtgttgtcacagggatgccgaatcttgggaacacctgctacctgaacgcgctgctgcagtgcctccttgtgctcgggaagctgcgggcgaggatcttggggccgggcgctccgtcgggtgtccttggtgacttgctgcatgatctctttgttggtacaaatggtccgagctacgctcgacgcctgctggacccggcgatgctcttgcgttgtgtgcgctttcgttacccgcagttccgaggcattgctatgcaggactgtcatgaattgctttgctgtttgcgcgatggtttggatgaggatgaaaggaaatggagggctggtaagatgcaacaaggtgctcctagtgctgtggctcctacggttattgattccatatttgctggtcagctgtctgttaccttgtcttgcaaatgttgctcgtttaagtcagattcagaggaggtattccatgatctctcaatgccattaccaccaaaggggactccagccagaagtgttgcatcaccaccacggaatggaagatgcatatctcaacagaagactcatatggaactgtttccagcaatcaacaagactaacaccgaaaagattcatgcaatttctgaaggcggtgatgctcaggttcccgcttcagaatcggaacatatggttatggtgaaaacatcagagcctttggaagttggtaagtttatgtgttcctgtgcctaactaaataatggaaaacaacgttgaacgggccttcaagcacgcaaggtgaaacagaagatgaatttttcattaatgaatgattgaatggagcagaccatgatagtacaactattgtttgttattttgttgcttgacatgacaaggacatttttcagagaagagcccttctagtagctaaatagagaatatttctttggtatggttcatacatggactgcacaaatgtcagaaccttcaggatgacagcattatacaaacgggatgttccagcagtttttgctgagtccttgtgctcgtataataaatgttactcagctttgttggttaacttaagtacatggtccatgaagaaaataagcttcaaacaatcaaatgtagaggttcaagattctcaaacaatgtacaacggttcctggtttcatgaagttacttatgacgacaaaacctaaaacttatatgcttgattctgcagattctaatcacttggaacagatttcgcaaagcaagggtgatgtacatggtcctttgcaggctccaacaagggaagagaacacgttgatagcatcaggccatggtgtagagagaactgtcagtgctgttcttgatagcatcaagccagaagatagtatagaagccaagatggacactttgtcagcagaagttgctacagaagacaaggggaaagatcgaaatcgtgatgcagtttatgataaggcagatgatatcaactctcttgcttcaatcgaggaaatattggaattgcatttaaaagcagagatgatagaaaagaggtgtgaaaactgttccaatgctgatcagaaggcaagccctataagtggtaaacatggtgaacagccagtggcatgtaccaatgtgaatgggacagttgatggagaccaggatgaacaagatcagggaagggggaagcaagtaaatatgggtcatagtgcacatcaagtggaagaaaaccaatatgatcggccagataggaacaaaggtgcaattaaaacatgtctttttagcaagttgccacctgtgttagccctccatctcaagagaaatttatggcctcttaaacttaaagtgagtggacatgtgagctttaaggagacccttgatgtgaaattgttcatgcaccccagttctgaagacaaagataattccagctaccgtctagttggtgttgttgagcacctgggcctttgcatggatgcagggcattttgttgcttatgtgagaccaagttgcccgcagcagaccaatggctcttccttatggttttgtgcaagtgatgccgacatcagagaagtctctttagaagaagttctcaagtgcgaagcttaccttcttttctatgagaggattgaaggctaagatgtctggatcctacagagtagcaatcacagaggaagcatatgttatcagattaacaagcattctttggacgaccaatgattcaattttaatcagtgtacatatactgacgtaggttcgtgatcaagttgaatcttgttgcgttggcttagtcattgcaggactccaatttgaccgcaacatgtacataccagttgagagaattcggttgttcttgaccagctgatatcccttttttgtccatgagtgtattaataatttatttgaaaacaaacggcatagttggacattttgcattagagaatttgagcaaaatcattatgtaggcacatggacaggttttcttcttctttttgaagtaagcaaaatcattatgtaggcacatgcacaggttttttttcttctttttgaagtagaagcaccggtacagttttgtcgattgttactgttacctgtaattagtttacactaaagtactgtggaaaatatcattcgccatgttgagttttgcctcaatatttttttatggcaaagagacattgtatgcaagatgattgagatacaccttgagaattttgcattcgttgaaaaaaacaaactagagacttgagctggtg

SEQ ID NO: 26719 - DNA, 1124 bp, Oryza sativa
  ref <308>: DATABASE ACCESSION NUMBER: AK102161
  ref <309>: DATABASE ENTRY DATE: 2002-08-28
gatcaggggtccattcgcgtcgtgttgctccgtcggtcgtgtgtcccccaaaggctccaagctccgtcgttcctctcctcctccgccgccgccgccgccgaagccgacgagcagtagccggtaggcatgacgaggctcgcggcagccgcgctccggagggccaccgccgcatctgggatcccctcgtcctcctcgcgctcgtccgtgcttgctccgttcgcgcctcgcctcttctccaccgaggcgtccggagaaacccccgcggcgggcgccgccgcccaggggtcgcaggacgagcctttcttcaagccttctgacgaaggtgtggcatatggaaggttctacagtgttattcctggaggcagccgtctccctaagagcatgctcaaaactgatattatccaccaccttgataaatctgaactgtcactggacgatgtgaagattgattataacaggggatattatccagtgggcgcgttgttgaggttttcttcagtgccattatttaacacagcagtcaggcaaacacgagaaggtcgtcagtacaggcttgagatgatcagtcgtgaggagtttgatctgaagcagtcttatgatggaaaagctatactattgcaaggagtccctcgaaatgctgtaccagaggacatagaacgattcctgtgtggcaccaatgttgaacctccgccatttgaaagctttctcagacctggtgtcccagatcctatcagagtggtgctggttaaattccgctcaaggactgatgccgccaatgctttcattactaagaaccggggtttctgcctgaacaaccctgtgagcatgcgtgttcttcaatagcccgtccatttttatcgtgcttatggcaatcagctccaaaatgaaccctctcagcctttggatctgaactcctatctgcaaatgtggtagaaagtttgactttgtacgtttgcactctactgtcagtcgcttttatgttattttgtttgtgcttttagttgtgctacttcatttctctaatttcatgtgtaaactggaagttgctgttgcccccagtttacaacagaaacatcagaaggaattatccgtaataaatgttcaaaattgcacatttcttttcc

SEQ ID NO: 26720 - DNA, 1983 bp, Oryza sativa
  ref <308>: DATABASE ACCESSION NUMBER: AK102162
  ref <309>: DATABASE ENTRY DATE: 2002-08-28
gcttcctcgccctcggccacccggcgcctccttccctccctactctctctccacatggcggcggcggcggctctccggtgcaacccgcggccctctgcggcggttgctctccgcggtgccgccgcagccccgcaggtcgggaatgaggctgccttcgagctgctggtcggtgccaccgagccttgcctgcggggccggaggaggggtgcggggattcggtgccagcgaagtgcggctgccagcgcggtcgtcgtcgagaagaagagtcgcgcggtggagccggcgcgggagggggccaatgccggtcacacggagtcggagctcaccgtggtgatgaagttcggcgggtcgtcagtggcgtcggccgagcggatgcgggaggtggccgatctcatcctcagcttccccgaggagcggccggtgatcgtactctccgccatggggaagaccaccaacaagcttctgatggctggggagaaagcggtgggctgtggtgcaacaaatgtgtcggagcttgatgagctcacctttattaaggaattgcattttgggaccattgatcaacttggattggataggtcaattgtttccggcttgtcggatgagcttgagcaacttcttaagggaattgctatgatgagagagcttactcttaggacaagagactatcttgtttccttcggtgaatgcatgtcaacaaggatatttgcggcacttttgaataaacttggggtgaaagcacgtcagtatgatgcatttgaaataggctttataaccactgatgatttcacaaacgctgatattctggaagcaacttatcctgccattgcaaagaggctacatggggactgggttactggtcctgctattccaatagtcactggttttctcggaaagggatggaaaactggtgcaatcaccactttaggcaggggtggtagtgacctgacagctactaccattggcaaagccttgggattaagagaaatccaggtttggaaagatgttgatggtgttttaacttgtgatcctaatattcatccaaatgcgaaacctgtgccatacttgacatttgatgaggcagctgaacttgcctattttggtgcacaggttttgcatccacaatcgatgcgaccagctagagaaggtgatatacctgtcagggttaaaaactcttataaccgccgagcccctggtacactcattactaaagctagagatatgagtaagactgttttgactagtattgtacttaaatcaaatattacaatgcttgatatagtgagcacacggatgcttggacaatatggttttctagctaaggtcttttcaatttttgaagatttgggcatctctgttgattgtgtagctacaagtgaagtcagcatatctttgaccctggatccatcaaaactctggagtcgtgaattgatcaagcaggaacttgatcatgtcatcgaagaacttgaaaagatagcagttgttcacctactgcagcatagatcgataatttcgttaattggaaatgtgcagaggtcatctttgattcttgaaaaggctttcaacgttttacgtacaaatggagttaatgttcagatgatctcacaaggggcatccaaggtgaacatttccttggtggtccatgacagtgaggcaaagcagtgcgttcaagccctccactcagcattctttgagagtggtttcttgccagaagtcaatgatattctgcaggacgactctgtggcacattccaatggcacagtttacaggcattagtcagaagtttaatccttatgttgtactgtagttataccatttgcagcctcagaatctgatcgttctcaggctaaaaacccaatgttgtaggagggaaggagcaattccggctttttatagtattctagttggctctggtttactaccaaaatgggcatactaccattgttaccattctttgcagagcaagtaattgctagggagctg

SEQ ID NO: 26721 - DNA, 1467 bp, Oryza sativa
  ref <308>: DATABASE ACCESSION NUMBER: AK102163
  ref <309>: DATABASE ENTRY DATE: 2002-08-28
ggaagaccactttccccaccttgttctactagcctagccttcacaaaagcaaatccacgcaaaatctgctccatggctgcgggatgatggccgggaaaccactccagcttgcagatccagtgagtgaaggctgaaggctagtgaaggctcaagttcttttacaaatcctcaacgaatcaacatgttctctctccttctctctgcatgtgcatactgaaatgtttccatcgaaaggcttgttgtcagatctgaaattgcaagttcacaccatagatgtaggagagagcaacagtaatggcaagggcaaaggcaaaggcaaggcaggcaaaggggttgtgagggcaaaacctataaattggcccccagcactctgtaaatttcttattgattggtacattgaaaaaaagttgaagttgccaccaaaaggagtaattaagaagatacatcgcactgcttgcacatcagctatagatgcaaagtatggcagtacttacaccgctgatcaagttcagcgccactataggtgtcacaaagagaattgggggctggtagctcgccatctgaatgacagtggtaatggctgggatgaaacaaacagaatgctgactctatcgtaatctactttggatttactattgataaatggccgtggaattctttcaaagccaattcagttcttcgacaaattgcaagaattgtttagtggttcctcagccaatggaacatatatgcaagatccttctagtgctactgattttgatgatgagactgaagactttgattttcttaatgatatgtcaacctatgctgaaaccaaagttccacagggggaagactcagacaagttagagtcagatagtgatgattgcaaggaggtggcaacccttagtgcagctgcatcagttagccaagtttcatcttgtaatatgagtggttagaaggcaaacagaaggagtttcaaaaggtgtggaaagccaaagaccttgccccaatcacataacaacaagggtaacaagcttaagaccaaacacaaatacattgcatggtgatgatgatgttgatggactgatcaccaataccttggttggaataaaaaataaccttgacaaaccaatacaaactgcagcccccccagatccaaatgctcctctatggaacatgctcaaaatgtcctagaacctgatgataagatgagactgggactacacctttgcaagccagaattccaagctcatcgtggttttcttataagcatgggtcaagaaaaccttgagcgttgggtctacaagttctgatccggtgatgatccaggtttctagtgagttacaagtgcatattggttgcaaaagctattcgtggttgattagggtctgatttttgttgcacccttttggttatgcaattgctgtactatgtgtgtttaaacaattgctaaatattaatttgggtactatagtgtttcatgct

SEQ ID NO: 26722 - DNA, 2351 bp, Oryza sativa
  ref <308>: DATABASE ACCESSION NUMBER: AK102164
  ref <309>: DATABASE ENTRY DATE: 2002-08-28
ggcttcgcctggccgccatggctcacctaccgcttttgctcctctccttcctcctcctcatcggcgtccatgcctccgtttccgatggctcgcctctcccacacacttacaacacttccatttgctccaaatcatacaagtgcggcggcgtcaatatctcatatcctttctatctttccaacgcaaccggcgaaacctatgattacactcagttttcttgcggctacaccgatttgaatatcacttgcagctgggacgggagtaagcagaccccttttatccaactcaacggagacaactatactatcctggagatcatctacgacagtcgcaccatcgtgctcgtagacaccgatgcgctccgcggcggcagctgccccagagtgcgccacaacatcaccttctcccaggccgatgagtggcttcagtacaccggcccccgtgacaacctcaccttcttcttcggctgcaaccttgtaccactaccaccaatggatccagggctgactcgttttgtagacaagaaccaaatcaactgcaaagacttcagcaactggcctgacggtggagattcattcgtgttcacctccgtcgagcttgaggcaccaatggagtacgaattggccagtcgctgccgccaggtcatcgtcgtgccggtaaatgggagtattcttaattcaagtagccagagtgcgctcccaagtggtgaatacggtcaagtgcttaagaaggggttcgagctggcatggaaatcaaggaaagataaacaatgcaacctgtgcgaacaatcccggggacagtgtgcctacagccagaacaggacattcctaggttgcttgtgcgccgatgggaaggtgagcagcacggattgcacatcaagatcgaacttgaagacaaaaattatagcaggtgtggttggcgggggattatctgcggtgttcgctcttggattaatagccaccgtcttcttcgttcgcaagagaaagcacaagaaggtgaactcgtcttccaagctcctcaagtacagcggctccggcgggacacctcgctccatgggcggcgacatggagtccggcagtgtcaaggacctgcagactcacctcttcagctacgaggagctcgaggaggccaccgattccttcaacgagaacagagagctcggtgatggcggcttcggcaccgtctacaaagggatacttcgagacgggcgcgtggtggcggtgaagcggctgtacaacaacagctaccggcgggtggagcagttcgtgaacgaggcggcgatcctgtcgcggctgcggcacccgaacctggtgatgttctacgggtgcacgtcgagccagagcagggagctgctcctggtgtacgagttcgtggccaacggcacggtggccgaccacctgcacggccaccgcgcgcaggagcgcgcgctctcgtggccgctccgcctcaacatcgccgtcgagtcggccgccgcgctcacgtacctccacgccatcgagccacccatcgtgcaccgcgacgtcaagaccaccaacatcctcctcgacgccgacttccacgtcaaggtcgctgactttggcctctcccgcctcttccccctcgacgtcacgcacgtctccaccgctccccagggcaccccaggatacgtggatccggagtatcaccaatgctaccagcttaccgacaagagcgatgtgtacagcttcggcgttgtcctggtggagctcatctcgtcgaagccggcggtggacatcacccggcagcggaacgagatcaacctggccggcatggccatcaacaggatccagaagagccagctcgaggagctcgtggacctcgagctcggctacgagtccgacccggcgacgaagaagatgatgaccatggtcgccgagctggctttccggtgcctgcagcagaacggcgagatgaggccgccgatcaaggaggtgctcgaggggctcaagggggtacaggacctatgcgtgatggagaaagatggaggcaaagacaagaagggacctgacccgccattatctcccgacacggtgcatgctcagtgggatagcaggcagacgactcctaacactagccagtgaccagcgggttattagattagaccagtatatttgccaccgaggcttaatatgtgtgttactgctattacgctgaggcgtgtgcttgttgtatgagaggtgcgagaccttttttcccccactttccaggcttccctggtgatgtgtgcatatgtgtttgttgggctaccagaacagagggaatgtacataagatgtttagagtggtgatgaccgatgatacatatggatatgtacttagtggatgttacagttt

SEQ ID NO: 26723 - DNA, 2938 bp, Oryza sativa
  ref <308>: DATABASE ACCESSION NUMBER: AK102165
  ref <309>: DATABASE ENTRY DATE: 2002-08-28
gagtactcctactgctgctactctactccctcctctctccagctgctcgtctccttgggcaacggagagcgcaagcacactagcacagctgcacaggcacagctgcacagctcagtgtgtccttccttgcactgtcctctgcgccagccaccttgcatctcctccctctttccctctccggtccttcaaatcctgagctgagctgccccgggttgggttcttgcattgcttgaggtggtcgcatccgtgtgtgtgtgtcctcggcaccgcgtgttttccttggattcaggtgctacggccatttactactgctgcccccctggtcgtttcagcaggccggaggcattaacttccactggcattgatttgatccctgtcatggtgagcttgttggctactgcgtggggctgaccattcccggagtctctcggctatctttgatcctactcctggtttagttcctgaaatcttgcggtttttttcttcttcggtggctgccgttcttgatgttcctgcccaagtgactggtttatcttgctctccatcaattcggttttgggttgctgcggtggattctttgctccccttcgagatactgcttggatcattagttcattacacggttagcagaggaactcttggagttggggattcctttgttcttcttttcacagtttggaatatcaggagctggcttggaatcttccaagcaaggggaaaaagttctctgggatagggagaaacagaatcctgttcttccccctttcattccactagtatatactgctctgagaggagcaattggaggcatggtttggattttggtggtttgaggagggaagaagcatccctggagctgtatgaggaggcattgagacaatgagagatgagaattcaatcaagaccaagctatcctggtccaagacctttgttaggaagtggttcaacatcaaaacaaaagccaaggacttccattcagattatgcagttgaagaagtaggtgtccagtggagaaccagtttctcagagagagatgtatgcaaatccaagaaaagcagaacagagaggttgcctaggaagagtgtggatcgagattcccgggtaggaaatggatttgaccgtgcttatatcacaaatacacaagactacagggtctttgttgcaacatggaatgtgggtggaaggtcaccatcgagtcatttgaatttggaagactggcttcatacttctccggctgctgatatatatgtcattgggttacaggaaattgttcctttgaatgctggcaatgtcctattgaccgaagacaatggtccagcaaagaaatgggtcgcacttgttagaaaaacgctaaacaatatagaccaaggctctgttgtgtacaactaccacaccccttcgccggttccagatcctattgttgagctcaatgttgattttgaacgatcatcaagaagaccaaggaattcatctttcttccatcgacgttcattccagtccttcaaccgaagctcaagaattgacatgatggatccccactcattagtggatcgtcgtttcagtgtttgtgaccggattagctttgggagtaggccaagtgatgttgacaccagtatgagatatggtgggtcatctgatgatgagaatattgacgaggaatcacctagtggtatatacatctcaccaatgccatacggttatggtgctccactatgctatgatgataacaaaagacagttgataaacactaggtaggtttccatgagactctgaagatacagtcgttctgaaacttgctagctgttgtagctggcacttctatactattaacatttcactgaaattccttccatccttcatcactggaatgatacaaatatttgccctgaaaatagagttttctgtaatatagcagatattgcctagttgccagcaagcaaatggttggtgtttttctcatggtttgggtacgaagtgatataagggaacatgtgaagaacttgaaggtttcatgtgttggcagaggtttgatgggatatctcggaaataagggatcgatatcaatcagcatgtctctgcatcagacaagcttctgctttgtttgcactcacttgacctcagggcaaaaggacggtgatgaacttagaagaaatgcagatgttgtagaaattttgaggaagaccagattcccacatgtccatggtgtaggtgacgagaagtcaccggagacaattcttgaccatgatcgtataatatggcttggggatcttaattaccgaatagctctttcataccgttcggtgaaggctctagttgagatgcacaattggaaacagttactagagaaggaccagcttcgaatagagcaaaggtatggtcgggtattttcaggctggaaagaagggaggatttattttcctcccacatacaaatactcctataattctgacagatacgcaggcgacgatatgcgtccgaatgagaagcgaagaacacctgcatggtgcgaccggattctatggtatgggagaggcctgaatcaactatgttatgttcgcggcgagtctagattctcagatcacaggcctgtatacagcattttcactgcggaggttcagataccgagccaaacccaattttgcagctttgctcgttctacctctctaatgggggtggatgaactaccatacccaacttatccacgcagttacacagatatcaatttttattgattgtgtatctcgatggagccaagacattcttcagtcccagaatacaccagatgaacttcatttctcccaagattccagcaattggaatattgtcagccaacagatactcaaggagatgctttctaattgtaaaattaggaagatttgcgcagtcaagcaaagttttgaatctaacaatccgcgagtaccagtttacaacagcaacc

SEQ ID NO: 26724 - DNA, 3034 bp, Oryza sativa
  ref <308>: DATABASE ACCESSION NUMBER: AK102166
  ref <309>: DATABASE ENTRY DATE: 2002-08-28
ctctactactagtaggagtagtggtggtagtgtcgtcgggagtggcacggcactgcggggtttttgatttttttttctttttcgtcttcttaagttgaaatcgagctgatttgggggggttcttgctggagcgggggatgataggttgcggacttgcggtcaggaggaggtcaaaaggagggagaaggctttgattagtgggggatttcaggattggcgatcgtcttgagctcgctcggtgtgcagaacggctgggttcttttgtggacgggggagtttgctttcacctcgatctgtacaaatcgatggtgggtggtgggaggtgttagtacaggtactggaacattttaatcaagtcgagtcacctctgcatggttagtgttctgggtcaggcaaaatcgctacaagatgaaagaagatattatgtttgacaaccaaacaaagccatgcagatcaagggttgactccaaaagcaatataaatgtgctcaagccaaaatttggatcctcttggggttcccaaattgtcaaagggttcacagctgacaaaaagaccaagaagacagcagctgctgcaagcaagaagccacctcttgcaagtgtggaaaatgttaacaccagcaaccaacagattccatatcattctagggttaagagatctcttatgggagatttcccttgttcacctgctggtgctcaggttcacccccatgtctttgattgccatggcatcaggtccccagcatctcatgatctttttcttgagttggatcatctcagggaacaactacgtgagtcaaaggaaagggaactagcattacagtcagagttgcggcaatgcagagaaaatcctagagtttcggaacttgaaaaggatcttgattcaaggaagaatgaaattgacaggcttgtgcgacttaaaacttcactagaagttgagaaaacaagcctttctgaacagctatcagctctatcttgtatggtagagcagcatgaagaaaatgcaaggttggatgggcatggcaatcgggtttctagtatgaatgggggcaatgcatcttcttcagaaaacttggagattgaagttgttgaactgcgacgtttaaacaaagagcttcaatttcagaaacgaaacctcgcaattaaactctcttcagcagagtccaaattggctgtcattgaaaagaatgccgagagtgagatagttgcaaaggttcaagctgaggcttcattattgcggcacacaaatgcaaacttgagcaagcaggttgagggtctgcaaatgagtcggctaactgaagttgaggagcttgcctatcttcggtggatcaattcttgtctacgtcatgagctcagtaactcagatcaagcagctagagcaatgacagatgcagattataatgatgaaattgcttgtcatgttgatgattgtgatggtgatgcaagacttgatcagaacagttctgatcacaagaagttcagcattgctgagcgtatcaaacaatggtctcagaatcataagaattgtgaagcatctaaaaaggaggcccttcttgacagagcatggattgaagctgcagaatgcagaagcccgacacgcaggcactcactaggtggaccaaaaggatgtgctcaggagtttagcattgtgaagaggcgccaatctgatacctttatctgcctgcctgaagcaacagatgaggcaatctcctgtaataaggatgagacaatcagggagaagcgtgaacttcttgtggataagtatgattttggtcgatctgaaagctcaagatttcttcttggcaagtcagaagtatgcaagtctcaaagtatggatgttgaaaagcgtgccttgcgtattccaaaccctcctcctagaccttcagtttctgtgccacattctggtccatcaaatggatcagctgcgaatccaccaaagcctccgccaccgccaccgcctccaaagttctccacaagaaacgctggggtcatgaagagggcaccacaagttgcagagctttaccattcacttatgagaagggactcaaaaaaggatacttctgggagtggaatctgtgaaactgctaactcagcaaatgtgcggagtagcatgattggtgaaattgagaaccgttcttcgcatttgcaggctatcaaggctgatgttgagactcaaggtgaatttgtgaaatcattgatcaaggaggtgaccaatgcagcttacaaagatatagaagatgtggttgcatttgtgaaatggcttgatgatgagcttggtttcctggtggatgagagagcagtgctgaagcattttgattggccagaaaggaaggcagatactctacgagaggcagcttttggctaccaagacctgaaaaaattggaatctgaagtttcaaactataaagatgatcctcgccttccatgtgacattgcactgaagaaaatggttacaatatcagaaaagactgagcggagtgtctacaatcttctgaggacaagggatgctacgatgagacagtgtaaagagtttaatattcctactgactggatgctcgacaacaatcttattggcaagataaaattttcttctgtcaaattagcaaagatgtacatgaaaagagttgctatggaacttcaatacatgggacctctgaacaaagatccagctttggagtatatgctacttcaggctgtgagatttgccttcagaatgcatcagtttgctgggggattcgatccagagaccatggatgcatttgaagagctgaggaatcttgtgcatgtcagaaacagcacccagtaggaagttaaaaaaatgtggagaaggggataattctagcttactctctcagtaagcatagcagagagctttgttttggtttatgtgattgtgtgattgatgattagtgtgtgtatgactgtatctatgtgtttcagtgtgtgctaggctgaagaacaccagctggtgtttgcctatgatttttgtagctaccatgactgaaaaaagaggaaaaaagaaaaaaaatgcatgg

SEQ ID NO: 26725 - DNA, 2217 bp, Oryza sativa
  ref <308>: DATABASE ACCESSION NUMBER: AK102167
  ref <309>: DATABASE ENTRY DATE: 2002-08-28
ggcacgcaaactctcgggcgagatcagcgcaggccgtagagaggggagggaaatggcgagcgcagaggcgaaggacggggaggaggtcatgggggagggacgcgagggtgatccagtggacaagataaggaggttactccgtattgctatctacaacattggatatgttgaaggattttttccagatgcctacttcagtgacattgtagttcgagaagatgacatggtgataaagcagcttgtcccaatcgtagattctgaatcaagaaggctgatgaatttgatagatgaagctgaagcatgtttgtgtgatgcactgaagaagaagtatttgaaaacactggtcttttccatctgtgaaaaatacgaaggcccggtgcttcaggaattcattttctcgtttagctaccccagcacaggtcctgatgaagttgtgatgatgatgactcgcacaggaagcaaagtgattacaaagttcgaagcaagtgctgtcaaagtaactcctaatcaaatgaggagctctgcttgtaagatgattcggttgatagttcagcagacaaggacatacccggtacaagaggagcatgctattgaaatgaagctatcgttctacgaggatacaactcctgaagattatgagccaccttttcccaagtattgtgttaacagtgaggatgtagccatatggaacaacaacatcttgaagatggaagtagggaatataaacaacaagcacgttgtgttaacattgaaggttaagagtgcccagtcctactgcaagaacagtatagttgatgattgttctgactatgagatgtgcgaatgcgaaacatatggttacacttcagctcccaatgatgatactgaagaagactatcacacgggaatgctagcatcaccaattaaagcatggtacccacaagacactggaactcaaatgacgcgtaaaaggaaaactggatttgtgctggtatcttcttcaaaaaaagatcaagttccttttggattcaggtgcctctcaccatatttgtaatgataaagccatcatgcgcaatttgaaggacgtgaagaaggagtaccaagtttcacttgcttcatgtggtgggttagagctgaaagcggaaatgatgggaactgtggtcacaaaagatatgaaactcagccaagtgggctatatacctgaaatggaattcaatgtcgtatccattggacaattggcagtccaaggtttgataacaacaggcggggatggtcggttcagtgtcattgatgcaaaggaagcgagagtggttggtgaagggcatttacaaagaaaaacagagaaagttgatggcagagtataccatgaatatgtattcaaatcattgatccgggagattgaaggtgatgatgagaagttaattgaacccttgcgggcagatgatgatgaaatcgatgaggaagaggagaagaaatgctgggtaattgacacagggtgcgggagacacatgattccagatattagtatactaacccaagtcaagcgtgaggaggtcacattccaagcagcatgtggaatcgtgtcatcaacccataaaggattggtcaaggagggaaatctcatattgagggatgtgttgtgctgcccaaaagtcacaagaaaaatgatatcaggcccaatgttggatttaagcggccataggttcacttttaacgataagaaatgctgcatagtgcacaaggatgggttggagctgagaggggttggcaaactggatagggcgactagaacgtacttgttgaaacccggtgaagacagtagagcagcagcagcagcaaaagaggagccaaagatgttggcagcagcagcagaaggatatggtggaccaaaacaagaagccgacacgaagaatatgaggggcaaaggcaagaagactgcccaagcaactaagaggctgcgacttagttagacatgaaacctgagagtccaccccacacacgggagaatcggatacttcactagaattggtgttcatcttgaatgttcattgtcaacccaatcttgattgtcaaccgttttggcatattttcagtgcaactgcttacagtactttggtagggttgtactgtgtacctgatgagtggactacttatctgatttcagtcattgattgagtacatttaagtgtactgactactgacaagcttcatttatcacactgattgttccaattgttt

SEQ ID NO: 26726 - DNA, 1637 bp, Oryza sativa
  ref <308>: DATABASE ACCESSION NUMBER: AK102168
  ref <309>: DATABASE ENTRY DATE: 2002-08-28
ggctgttctatccgcgccttgcccgccgtcgcgtgtggctctcgcctcgacgaccatggcgatgttcgcgcggcgcctcctcgtcttccacctccgcccgcccgcgcatcccctcgcagccgccattgccgctccccaccgccgccgcaagcacgacgccgtcgcgtgcagagccgctgcggggaaggggacgagcaaggccagggcgagggacaaggacggcagtaagcggcagcagaggcgggcgctggaggagcacctcaagcggcgcacgcgctccggcgccgccttcgacgccggcctctaccggcggcactcccacgcggagcacgtccccgtcatgctcggcgaggtcctcgccgcgttccgccgccctctcccgctccgctccttcgtcgactgcaccctcggcgcggccggccactcgctcgccatgatggaggcacacccggagatggaactgtacattgggatggatgtcgatccctctgcgctggagattggccggagccgtatcgaggccttccttgccaatagggaaactaatggagatgacgaagatgcctcgcagggaacactgcgtgcatacactcacgccaagaatttcaagtacatcaagcatgttcttggcagcgtggatgagaacattgctgttggaacgtctggagttgatggaatcctcattgaccttggcatgtcatccatgcaggtgaacagatcagacaggggatttagcgttcttcaggatgggccacttgacatgcgcatggatcctaaggcaactttgaaagcagaagatatcttgaattcttggcctgatcttgaagttgggcgtatcctgcgtgattatggtgaggaaagtaattggcagtcccttcagaagcggattgttaaagcccgggctatggggggtttgcactcgacaggggagcttgtcaaacttatccaaagaacgtgtaccagttcagggggaaggcaaggttggattaagactgcaacaagggtgtttcaggccctaagaatcgcagttaatgatgaactccgaactctagaagatgcacttcatgcatgctttgattgcctagcaacagatggtcgccttgcagtaatctcattccacagtttggaggatagaatagtgaagtagacctttctggaacttattcatgaagatgaaatagatgatgatgaagacgacttggtgagtgctgacattgatagtgaagatgaaccctggtttaagcagagagtgcaaggaaagaatggaaccattctaacgaaaagaccaatatctcgttcacaagaggaggaagaactgaatcagaggtgcagaagtgccaagctcagagttattcagaaggcgtgaacctggattaatcatatgatgactaaattctgagctctgaggagcagtgaggacatccatgcgtgaactcatataacatgtgaatgatcgcgcttgcagttgcaacaataataactggaaaaactagctcgagaggatgaaatggccatcctgtttctgcagttaacttagagagtagagcttaggtaagtccaaaaattaatctcactatttgcaccaccattttgtaccccattcatgtacactaaactctctaacaatagtttttact

SEQ ID NO: 26727 - DNA, 3892 bp, Oryza sativa
  ref <308>: DATABASE ACCESSION NUMBER: AK102169
  ref <309>: DATABASE ENTRY DATE: 2002-08-28
gccttcctattgtcactctccaggccggcgatggcgccgccgcggaaggcaacgagcgggggaggccgtcggcggcggccggagctgcttggcggcgcaggagggagctgagaccggcctgaacgagctcgctcgcccgcgcggccgggttcgcagcacagatcctcagcaacgaacggagcagcctctcgcgccagcccgcggttacggagaccttgggattcgctatattcttctaagcttttatatattgtagtagcagagcagcaagcttttcttattgattcgctgtattcttgcagctaacggtgatctttactattaaatatattgctctaatgtgcatgtgatccggaatcggcatgattctgaatatctcattattaatcatcttgaattgctttgctgttcttgttttgagggcagtattactttgctgttagtcctgtattaatgcattgatcgtcttggatttttgtagcttacggtggtctttactagtagtaaaacttgctcaaatctggcaaatgctgggcacaactctcatcattaatcatctattcatcttggatttttaatccattcatccatggctatggaaatccctgatgacttttagaccggctcaccggcctccttttgggtctctgcatatatagtggatacagatgcttatagcactacgcactacaagtctgaagcagcgatatatccggattcctgaattcctgatgcaggtatataaaactctgctaattaacctgggttaattacaaggtgcagcacttcatctcatatagtaatctttataaagcagtagtactggagaatattttttccttgctacattatacatgttctatctttgtcttgcttgttactacgaacgaggggaaatcatgagattccctgccaactttgagtgaaaaggctatgctgatctcatatagtatagtgccagtgcctatatatgaactgtctttccatgggattctcttttactacacatatatggctattgactatacaccttcaattggttcatccttcactatctctttgaaagattcttcatgattgttcacgttgactgcatctgtcacttgtgctggtttctgtgtatatatacatctaccagtagtttcagggcttttctctgatctgcatcaccatcagctcgtagaacttctgttctgtgtgcaaaggtaagactgccttcttctatatcttgcgtcctacctgagaggaaagggctacaattactgtttctttatatcaatttcatttacatgcttgcaaacattgtttttgttggatatcagtacatgaacaacgacatatataatccctggctttgatttgtttagtagtaccatttattggttgattttgattgctttgctccttttctgacttgctgcagaaatatataatggtatgtaatttgcatttttttagttaagaaaatctatgttcttctttttatcattttctgttggaggtagaccaggaagaatgccacctctgagaaatatggatgaggagtgacatgtactattactagaactggcataagtgctctttaggaagaaaaaaactaccttttgctagcgtgtttaggatctggtttgttcagcttggtgcacatgagagtacttgttgattacttgcatcttcagctgacgcaacatatgctacaaatttcagttcacatgtatggctggacaaggttcccaaaagaagaaatcttgtgattggtccaaaagatatgtggaccatttgaatggaaagatgaagtgcttccacctgcaaatgagtgctaattttgggcatagcatgaccataccaaacaagttcttggaccattttggtgggacgttgtcaagaaccattgaactagtatcccccaagggtattgtgtatattgtcaaagtcaccgagcacatgaataagacaatcctacagtgcggatgggaggcatttgtagatgcccatcacatagaagagaatgactccttattgttccgtcacattgagaattcccgctttgaggttctgatccttgattctgatggttgtgagaaagtctttacctgtgctggcataaaaaagacttctagtgttcaagaaagaaatgcagctccagttgatatttcaaggagcactcatgatgaaaccacacaatcatcagggagtaaaaaatttgttagatgccaaagggctagtgacagtcagcgtggaaaaactgcaaaattggcagaaacatcttcgtctggggaatcaggagaggagggcactgacagcagtacttctgaagatgagtcatcctatgagctagatgatcctcagatgcctccaggacgtaattatgtcttatcgcgttggactagtctatctgaagcacaggaagaaaaagtagatatgcttgtccaggacattcaacctgaaattcctgtatttgtggctatcatgaagcatagcaatgttaactcacgtcgtgcttgtcttgtaagtacttccttttagtcaagtagatagttcaaatcctgcatgtactaacttttggggtttatgaatgcaccctttattccatgcaacttacacagtataattgttcttttctagatataatgatagtaatacgacagagtgagttactttgaaattaatagaaatggtaaggttaccttgctatcatttgagagcctagattagaaatgcttgtaatcaatagaaaacgatgaggatgcatcagataaggttattcaagttccatttggagataactccatttttcaataaacagcatgaattgtgcatggtgtatggttagttgtacaatatgcagcctttttctttcagtagagaaggctgttaaatttgctctggtctatagacctttgcacaatgcaaaatttattttctcttttctctattttacatcacaaaaatacatttacagcatcatattctgtctggatcaggtaattcctaagcgctatgcatctgcacacttcccacttgaaagtcaaaccatcacacttcagcggcaaggcaagaacaagaagtggtatcccatgttttacattaggaaagatggatctggatacatgctttatgggtgttggaaaaactttgttcgtgacaaccatgtgaaggagggagacatgtgcatctttcacctaacaaagtttactgggggggaattcggagcaacagtccatctactccgtgaaacaaaatctggttccttaggttcattccatactagtcataaaaggtttgacttaagggatggcagaacgtggccgaaagtgactggtgttagaagagtaagttctaggccttacctgacagcagacagagtttctctgactgaagaacaggtcaggaaagtggaagaagttgttcactccattcaatctgaaggtcccatgtatgtgtcaataatgaacaagagcaatgttggtaccgatgggctctacatcattatctttggcaggcaattcgcgacaaggtacctcccggaaggggagcaaactttgacgcttctgatgacggggaagagcaatgcatggcaggtcaagatgcgccctcggagcggcgatgcgcagatgatcaccacaggctggcgccattttgtccatgacaaccatctgcaaattgaagacatctgcctcttccagctgatgaatgatgagagtaagcttaccatgacagtccatatcattcgtcgcaacgagaagagctagtttccctctggtggcacttccatgagaagcgttggcttttattctagtactttatttatgtaagcttttgctggagtagtggatttgaattctgaaaattgtggttatgcaatactaattattaagagttagctactttt

SEQ ID NO: 26728 - DNA, 2117 bp, Oryza sativa
  ref <308>: DATABASE ACCESSION NUMBER: AK102170
  ref <309>: DATABASE ENTRY DATE: 2002-08-28
ggatattacccttctaggcttcaacctccacgagaacgcccgcgcgggggaggagaggagagcgacgagactgaggtgacgcgcgccgcgtcgtcgtctcgtcgcagtaaaaaaaaaaaacagcaggggaggagcccgcacatgctttaagccccacactcctcacaccaccaccgccccccagatctccccaccacctccgctcctcgcttcccaattgccggcggccggacggacgccgacgcgcgcattccgaggggaggcaggcggcgcgcgagatcggcggggggttgcgcgctgcggctggctgtactgtacctacctgcctaccggtgtggtggtgtggtgttggtgccgtgtccggggatgatggcggcgggcggcggcgccgggagcgcaagatccgtcgcgtggggcgcctccgcgctgctcgtggcggcgctgctcctctccgcgccgagcgccacagaagcttatgattcgctggatccaaatgggaacatcacaataaaatgggacgttatgcaatggactcctgatggttacgttgctgtagtcacgatgttcaattatcaacaatttcggcacatccaggcacctgggtggcagctggggtggacatgggcgaagaaggaggtcatttggtcgatggttggagcacagaccactgagcagggtgattgctcaaagttcaagggcaacccaccccactgctgcaagaaagatcccacgattgttgatctgcttccaggcaccccatacaacatgcaaattgccaattgctgcaaagcaggagttataaatacatttaaccaggacccattaaatgctgcttcatccttccagatcagtgtaggtcttgctgggactacaaataagacagttaagctgcctaagaactttactcttaaggccccaggtcctgggtacacatgtgggcgtgctatgattgttaggcctactaagtttttcaccaatgatgggcgcagggcaacccaagctctaatgacatggaatgtgacctgcacatactcacaatttcttgctcagaagactccaacctgttgtgtatctctctcgtcattttacaatgacacaattgtgaactgcccaacatgctcttgtggctgccaaaacaatgggactagtcctgggagctgtgtaaatgagaattcaccctatttacaatctgccatcgatggccctggcaaatggactggccaacctcttgtccaatgcacttcccacatgtgcccaataagaatccactggcatgtgaagctcaactacaaggaatactggagagtaaaagtcacgatcacaaacttcaactaccgcatgaattacacacaatggaacttggtcattcagcatcctaacttcaacaatatcacccagctgtttagcttcaactacaaaccacttactccatatggaggcagaataaatgatactgcaatgttctggggagtaaagttctacaacgatttgctcatgcaagctggcccacttggaaatgcgcagtcagaactacttctgcggaaggattctatggctttcacctttgacaagggatgggccttcccccaccgtgtgtacttcaatggtgacaattgtgtcatgccacctccagatgcatatccatggttgcctaatgcaagccctctaacaaaacaaccattgacgctcccgctcttggcattttggattgtgttggctactttcctggcttatgcatgatgggtgaaacaaaaaaaaagtgagattcaagttgtcaggttccacggtgtacaatacaacatatcagttgttcattcacttacctggttacatagaaaagatgttgtcacgctgaggaaagctgatacatgtgtgttttgtaagttaaaggggcaaaatgtatttcttgtttggtatatactgggcacagcactttggtgaacttagatactgcaaattaggtaattacagttgcaccttttgtattttatagcaacccagaaatttaattgaactatatgacttcctttcttgtagtacatgtataggttccataataacgttttgtaagattttgtgaacagaaaggatgctgttgagtgagatcatttaattcc

SEQ ID NO: 26729 - DNA, 1066 bp, Oryza sativa
  ref <308>: DATABASE ACCESSION NUMBER: AK102171
  ref <309>: DATABASE ENTRY DATE: 2002-08-28
gttggttgccaaccagatccaccatgccaccacctgctattgcatttagcttcttcgatagtgcatttccgtattgagacggattcacacctcctcgcctggatcccatagtttctctgcctccttctcgcgcagatccgccatcgtcggcgacgggaggggcggatccggcgaccccttcccctcctgcacggatcccgtgggcggcttcactcctcctcgcttggatcctgtcgtctctcctccccactgtcgcgcggatccttcgtgggtggtgatgggaggtgcggatccggcgatctcttcccctctcacacgattctcgtcgtctctccgcccccctctcgcacggatctgccgccagcgacgacgggagggcggacccggcggcctcccctagggtgacgacggcaattggtttcaagaggtgccgatgtccatgatgagaccgtatgcgtctcatggtctccatcaccaaagccgccgatagcgccaagaagatgtacattgctcttgagctcccccgatccccactcgttccatcaccatcactcaacggactccccgctagctgtccggccggccggagaggagggttcaagcttgcagacgaaggtggaccgaggagagcgcagccgagtggtggcactgaagatagtgggcgtttcttcatgatttcaggggaggagcggattgttgagtggattcgaggcagagatggtggttaggatggagtggtgatgtcatcggaggttgtctcgaatgctgcagtcgaggtgtctgaaccgaaatctattttccaacttcgggagtggaggagaaactgggttcatgttttcaccgccgctggtcggaaattgggttcagtttaatgataacgtggaagtggcttgacccccgaggaagagcctcgtgatttgtatttttgtattttcttgtgtgtttctattatttctatatgtatgtcttgcctgtgattgtattcgtgtatgtgtatttttcccctgcgagagaaatctgtaaaatcgtgttagtgtgagcgctaaaaaatagcggtagaaataac

SEQ ID NO: 26730 - DNA, 1286 bp, Oryza sativa
  ref <308>: DATABASE ACCESSION NUMBER: AK102172
  ref <309>: DATABASE ENTRY DATE: 2002-08-28
gacggttgatcgatcagtacgagtacgacgagagctaagtaaacttagctatatcgatcgaccatggcgtccaggactagtgctactgccggcatgctgctgctcgccgccgcggctgcgctggtgtgcagctcggcggcggcgaggatgccgccgttggcgaaggggttgtcgttgggctactacgacgcgagttgcccgcaggcggaggccgtcgtgttcgagttcctgcaggacgccatcgccaaggacgtcggcctcgccgcggcgctgatccggctccacttccacgactgcttcgtccagggctgcgacgcctccatcctgctcgacagcacacccaccgagaagagcgagaagttggcgccgccgaacaagaccctccgcaagtcggcgttcgacgccatcgacgatctccgcgacctgctcgacagggaatgcggcgacaccgtcgtgtcctgctccgacatcgtcaccctcgccgcccgcgactccgtcctcctcgccggtggcccgtggtacgatgttcccctcggccgccacgacggctccagtttcgcgtctgaggacgccgtcctgagcgcgctcccgtcgccggactccaacgtcaccacgctcctcgaagcgctgggcaagctcaagctcgacgcccacgacctcgtcgccctctccggcgcgcacaccgtcggcatcgcgcactgcacttccttcgacaagcgcctcttccctcaagtcgaccccaccatggacaagtggttcgccggccacctcaaggtcacctgcccggtgctgaacaccaacgacaccaccgtcaacgacatccggacgcccaacaccttcgacaacaagtactacgtcgacctgcaaaaccgccagggcctcttcacctccgaccagggcctcttcttcaacgcaaccaccaagccgatcgtcaccaagttcgccgtcgaccagtcggccttcttcgaccagtacgtctactccgtcgtcaagatgggcatgatcgaggtgctcaccggctcgcaggggcagatccgcaagcgctgttcggtgtccaacgccgccgccgccggcgaccgtgcttggtccgtcgtggagaccgtcgctgaggccgccgagagcttggtgctgtagggtgctaacaaggatggctagtttaattaagcttatttccttgataaatattttgttgcttccaaatgtcatgagtatgtacacttgcgtgtattttgtagcttattttttatttgcaaataaagttgaatatatgaaaactatttaaatcc

SEQ ID NO: 26731 - DNA, 2525 bp, Oryza sativa
  ref <308>: DATABASE ACCESSION NUMBER: AK102173
  ref <309>: DATABASE ENTRY DATE: 2002-08-28
gctattattattttctttctcatcacgcggctgcgtccgtatcgcgacttttatcctctcctccccaactaactcggcgttcgccatctcgtgtcgacttcctcctcaaaaccctaattccatccaccgctcgatccaatctaccctctctctcgattctcaattctcaattctccctgcaaaattcccaatcctccgtgcagaattagaattatgcgggattgatcccctcccacgggatctccaatatcatatccatccagaaattgaaattcccctcgccgccgatgagccaatcgccgccggactcctcctccgcggcggcggtgcccctggcgccggggtttcgcttccaccccaccgacgaggagctcgtctcctactacctccgccgccgcatcctcggccgccgcctccggatcgacgccatcgccgaggtcgacctctaccgcctcgagccgtgggacctcccctccctctcccgcatccggagccgcgacgcgcagtggtacttcttcgcccgcctcgaccgcaaggtcaccggcgccggggccggcggccgcggcggccccgggaacaggaccaaccgcgccacgccgcgcggctactggaagaccaccgggaaggaccgcgatgtccaccaccgcggcaagctcgtcgggatgaagaagacgctcgtcttccactccggtagggcgcccaagggccagaggaccaactgggtcatgcacgagtaccgcctcctcgacgccgacggcacccaggatctgcatgtggtgtgtagaatcttccagaaaaatggatctgggccacaaaatggtgcacagtacggtgcgccatacttggaggaagattgggaagaggaggatgatgcaattgagaacatgcctgccagtggcgctttcgctgaaatggctgcagtcacagatactgcagatgagtcgactgaggaagatgggaatttctcccttaaaactaatgatgagcctttacaaacccaagaataccagccagagataactcctgtgaaagctcaaggttcaaatgaggagaccaatggcggtggttacagttgtgatgttttttctctggatgagattttgcaggaacctgaaaatgtctgcaaaaatgaagagcagaatgccattgatgacaagttcactatcgcagagttatctggatacccaaggcaagatgatggctatgtaggcgagaatggtcctgtgaattggattgacccttcaaatggtgataatacaaactggcctttgagagcatatagtactcagaaccatgtcaatggaacacttagcgctgatggtttctttgacacggtgaatggtaccaactcatattcaggtccttcagataaccagaacctgtatttgcaagatgatggcttgacttcttctcatcaagtgggcgataacatgccattttatgacgcatcatctaatcacaaatgggtagatggaaaggatgattatttgaatttgaatgacctcctctacccgccagcagaaaatcaacccctgtttgatgctggggatgacctgatggcttacttcgatgccacggaggatgatttcaaatttgatattatgggcacagaagattctaattctcaacttccagacatgtcgaactttgtccaaaaggatgataacaacaataagtttacattagatgggatctctaataccgctttgtatggtgcttcttcatctggatcccatggcaatatgtatccagacactgcagtaccagatatgccgatggatgacactgttgacaaaagtttcggaaagcgccttgccagcatgctgggttcaattccagctccacccgcaatggcttcagagttcccgccgagcacaggaaaatctgttgtcccacttagtgctgtcaacccgagtagctctatccgtgtcactgcaggcattatccaactcggtggtatcacttttactggtagcaccgagcacctgcagaagaatggagatttcaatttgctcctctctttcactgtcgagggcgacgtctcaaccaaatccattggttttgaaccggatacgcagatgagcaccacgccaatggtgttgcgcagcggcatgtatcttttcttcgtatcggcgatgattctcatgttgagctacaaagttgggctgtgtatctacagcaggtaagttatagtagtttttgttgccccaggctgtttattaaattgaaggagtcatacagagtccactcgacgtagagggaactgcctgcgatttggacagtttggttctttacattgttatagttggtataccgttctgacagttgaaagatacatagcaataaactctggaattggagaaactagagttacacgaatttggtgctgaaacttttgttggtggcatgtactgtataatttactctatttatttatttcacccaattctgggaggctgtaagcgttccccgatcgatgtaagctgatctgaaacctgaatacgcgctcttcatttttcataccc

SEQ ID NO: 26732 - DNA, 1318 bp, Oryza sativa
  ref <308>: DATABASE ACCESSION NUMBER: AK102174
  ref <309>: DATABASE ENTRY DATE: 2002-08-28
gggtggagcaggagctataaaaagaagcaggaagccactcgctctcctcacagccacagctcgccatcgtcgtcgtcgtcgtcgtcgtctccggctccggcaagagagctagtagtgagtagtagaaagaagaagaggcaaattaatagtaatggaggggaaggaggaggatgtgaggctgggggcgaacaggtacacggagaggcagccgatcgggacggcggcgcagggggcggaggagaaggactaccgggagccgccggcggcgccggtgttcgaggtggaggagctgacgtcgtggtcgttctaccgggcggggatcgcggagttcgtggcgacgttcctgttcctgtacatcagcatcctgacggtgatgggggtgaacaagtcggcgtccaagtgcgccaccgtggggatccagggcatcgcgtggtcgttcggcggcatgatcttcgcgctcgtctactgcaccgccggcatctccggcgggcacatcaacccggcggtgacgttcgggctgttcctggcgcggaagctgtcgctgacgcgggcggtgttctacatggcgatgcagtgcctgggcgccatctgcggcgccggcgtggtgaaggggttccagcgggggttgtacatgggctccggcggcggcgccaacgccgtgaacccggggtacaccaagggggacgggctcggggcggagatcgtgggcaccttcgtcctcgtctacaccgtcttctccgccaccgacgccaagcgcaacgccagggactcccacgtccccatcctggcgccgctccccatcggcttcgccgtcttcctcgtccacctcgccaccatccccatcaccggcaccggcatcaaccccgcccgcagcctcggcgccgccatcgtctataaccgcgcccacgcatggcacgaccactggattttctgggttggtccgttcatcggagcggcactggcggccatctaccacgtggtggtgatcagagcaatccccttcaagagccgggactaattaattaccatgcaccatcatcttaattaagcgataattactctgaaataatcaaccgagttgatgctgcaagatgatggaggatcaagtctctacagtactacgtgtgttattaccgtctggtgatcgatgaagctagccgctgcataattataagcgcgtttatatatatctgatgttgctgtaattatatctatgtgtacgtagtatgtttggtgtgagaaatggtacttgtgtgtgcggaggcatgcatgttcttggttgcacgccttcagctatatatagctttgcatcaattcc

SEQ ID NO: 26733 - DNA, 2662 bp, Oryza sativa
  ref <308>: DATABASE ACCESSION NUMBER: AK102175
  ref <309>: DATABASE ENTRY DATE: 2002-08-28
gaatcccaccacgcaccggagcgagaagaagaagaacccaatcatttccctccctccctcccaccgtcgtctcgtcgcgaacccgcgagaatcccaacctcctcctccgctttccctcctttctccttcccacccgcgctaccgagcagagcactgcttggctcggctggctcttgcggttcgaggtcagtcgcctggcgccgcgcgcggcgggcgagggggtcggttgatggtgccatgtggcccctggggttcttctccgagaggctgttcaaggtcgcgggggaaggggacggcggcgagggggcggacgactcgccgccggcccctgacggccgtgtccctctagcccgccgctcgtactacgtcgatgttccgcatgtccagcaggccttcacgtgggactgcggcctcgcttgcgtgctcatggtgctcaggacactcgggatggattgctgcgacggcattgccgatctcgagaagctctgccgcaccacgaggttcctctcttggactagattattacttcaaatttgagtttacaactaaacacggggggcgcaattctccttagttaatgaaaaaaattgataccccgaatcatttgtttattcatggataattattcttcttttctttatgagattgcgtggataacgaacagtgattactctgtcagttcatgaatgcttgttactactttgaccacttgattgttcccacattttgcactgcataatcacttttatccggtgtagttaaaatgctctttgcaaataattccatcttaggtgaaaattaatttggaagagaataaaaaattgtgcatttcaattgtaatatgacaattatttatgaggacataaagtagcttagacgtgagaaatattcgtggatatattatattgcaatacaatcattccctagatgagctggacataatatttaattctctttaattttggcctattaaaaattttaatagcacgtctggtgtattaacaatctgacatttctgggttgtgcagcatatggacagttgacttggcatatctgttaaacaggttttcagtttgtttttccttcttcactgtgactctaggagcaaatccgcaatattctgctgaaaccttttatagggagcaattgcaagaagacattgatcgagtggatgagctctttggcagagcccttgaagctggaattagtattcaaatccatcagtgcgtatgatatagcttttctactgttatctgggcactgcattgctatcgcactagtggacaaaacaaaattgaagtaagggatttttttggtcatagcaagtgagatgaagtatactttgttctgtatttctgtcaatacttttactcctttaagacagtcttacatttgtcttcggcattcagacatcgcctcataagcaagttgtccaatggtaaatgcaatgggtggacaatgttacttgctgtacttgtctcattttaatatctcaaattcttttgatttaacgatcataaggtgattattagtttaatattttgcaaccgtgccaacattatgtagtaacaaactgataatgttgatgaagcagttgagtaatatacagttggcactaccctttctgttcccaaagttacttggtaattgagagaatatctcggagaagattacagttcggaacaaaatggttcatggatgtatccatggatttttatatgcataatttttctacaaacaataaccattgttccttgatttcatttttgaagtggctgcatatcatttgaaatgggcaataatagtgtgtcagtaacttgatttttggaatgcagttcctcatggagcaatgatctacaagatatgcaacagttcagtgaggattcagattacatggggcattatgttgtaatatgtgggtatgatgctgatgcttgcgaatttgagataagggaccctgccagttcgagacagcgtgaaagggtgtcaatgaagagcttagatcaggcccgcaagtcctttggaactgatgaggatattattttggtaggaataatactaggtgcctgtttcaatctgctattgttcatatttaaatcttgcatatacttgtcactcttgagtttacattaacttctagtcttaccattgagcatattgcacgtttcgctatttatggatgcagttcacataacatgttaatgcaatcccagcccacttactgagtactcgtttgagcatagttcacaagccaataatttaagcattgatttgcatggtgttttgcaggtttctttaactggaaaaattggaatgaagctctcacgtaaactcctggtgggctccttgtgaaaacctcaactccctggttccatgtgtatatacgttgtacatgccactgtagttatgattgtcatctgttaagtcatgtatgtagttcaagatcattcttacagctataggaactgtgagctagtgaagtacccagttaggtttgttagctcatggctcatcacactgaagctgcaaaggacgcagcaggcagcagcaacaatgctgcgcaggaactactcttgtaagcaagagcagcttctgtagcgagcaaaagtcataccgttatagccggacagagatgtatcatatgtacatatatccttgcatc

SEQ ID NO: 26734 - DNA, 2708 bp, Oryza sativa
  ref <308>: DATABASE ACCESSION NUMBER: AK102176
  ref <309>: DATABASE ENTRY DATE: 2002-08-28
ttgtccttcggctacatgatttgatggtagcttcaacattagccgattgcatggtgtcttctttgtgtttaccgttcttaatcccatcagttttcaagtttttgatcaggtgcatgttttcttccgttctccaatgctgagtttattttctcgatccccaaattggaacatagctattaggtgagttgatgattgtactcatttttttctgcctttttgtaaaatagcatgcatgtgttcttctgattgccccatttttggacatataacttgataatatcgctatgttttatcttttgtaatgtcacttacatgatcgatctgaccctaattgacgaggtaaattttgattagacatttctacctttgtattcaattctgttctgattcctgaagagaattttacgtttccaagaaacgattgctgacgataacttagttttcctctccatgagagtgatacggaaaatttcaaggctgcactccttttctgcttatcaaataattttctatcatgcagaaaaaaattccacaggtgagaattcgatccagtttgcagcatagcgcaatgaataatatgtgattttaccccttttcagaccttatatatgtcagctactataaatcaacttcatgatttcataaggagaaaagacacgtcgataaccaaagggcgcggctgcgcatacaaaggcggagagaaggaacgatggtggctcaaaaagaaagagcgtcggtggcagtgtattgctgatccgtgggccaccagccaatcataaagaaaaatgttgagataaaagtattgctgatgcgtgggccaccaatcaatcgtaaagaaaaaaaatgttgagataaaagtattgctgatacgtgggccaccagccaataataaagaaaaaaaatgttagagataaaaggcggagagtatcttccccttccttttttttggcgtaaatgaaagaaaagagaaaatctcccgtcgtctccttccttgcgccaagaaagacgagccgcggctcaacaccggaggggaggggcgccgatctccatcgccaaggagagcagagcaggggaggggatcctggttagcgcttttggcgtgtgattgatttctaaacgaattttgggccgtgaggggaagttcaatcatggcagggtctcttgccgcctcagcattcttcccaggtccaggctcatctcctgcagcatcagctagaagctccaagaatgctgctgttaccggcgaattgccggagaatttgagtgtctgtggcattgtcgcaaagcctaacccacctcctgcagccatgcaagtaaaggcacaggctcaaacccttcccaaggttaatggtacgaaggttaacctcaagacggtgaagcctgacatggaggaaacggtgcctcacagtgctccaaagacgttctataaccaactgccggattggagcatgcttcttgcggctattacaaccatcttcctcgccgcagagaagcagtggacactgcttgattggaagccgaagaaacctgacatgcttgttgacacatttggctttggtaggatcatccaggacggtatggtgtttaggcagaacttcatgattcggtcctacgagattggcgctgatcgtacagcttctatagagacattgatgaatcatttacaggaaacggctcttaaccatgtaaggactgctggtcttcttggagatggttttggggctacaccggagatgagcaaacggaacttgatatgggttgtcagcaaaatccagcttcttgttgagcaataccccgcatggggagatatggttcaagttgacacatgggtcgctgctgctggcaaaaatggcatgcgtcgagactggcatgttcgtgactacaactctggccgaacaatcttgagagctacaagtgtttgggtgatgatgcacaagaaaactagaagactttcaaaaatgccagatgaagttagagctgaaataggcccatatttcaatgaccgttcagctataacagaggagcagagtgaaaagttagcctagacaggaaataaagttggtgatgatgctacagagcaattcataagaaaggggctcactcctagatggggtgacctcgatgtcaatcagcatgtgaacaatgttaaatatattgggtggatccttgagagtgctccaatttcagtactggagaagcatgagcttgcaagcatgaccctggattacaggaaggagtgtggccgagacagcgtgctgcaatcacttaccaccgtgtcaggggaatgcaccagcattggcgccgacaagcaggcttctgccatccagtgcgaccatcttgtgaaggctgacattgtgaaggcacacacagagtggcgaccaaagcgatcgcatgcagcagctgagaacgcgtaaacaaacaaaccgacgaaaatctgtggtagggagaatatcaaacttcccttgcctctgttgccctgaagctgatcttgaagtgtgagttgtattctgtaaaaaattagtagtttccatagtgtgaggttggaggggaggtgttggtgcttgcctactgtacctgctacatctattatttcttgattctttgttcgctttttttttcttttttgtttttaacccctgtggagataagacaggttttgaagtgtggaagaggttgtttcaatcgtctaattgattcaactattcagc

SEQ ID NO: 26735 - DNA, 2402 bp, Oryza sativa
  ref <308>: DATABASE ACCESSION NUMBER: AK102177
  ref <309>: DATABASE ENTRY DATE: 2002-08-28
gaagcgcagagctccagagagagagaagggatccatcgacgcgcgagcgctttgcttagattccttcgtcgccggcgaatccgtccccttcgcgccgcccgcaatggtataccccctccggcctcatctcatctcatctcatctaccagctagtcatcttgtacatagtgggactgtttgcccgcctgctggttcttgatgcgtatgcgcacagtagtttctatcttagattcgtaatctgttcgtcacacgtttgttgtagatcttagtgtgtgttcgttggtgagatattcacaataccacaagtgttcttgcttttttttcaaaaaaaaagaaaaattattgctgcctgggtactttccttgcatccgtttagtgctactattcggctagagtgttggcagtttttccctagcaacaaagatctgttccaaatgcgcgaagtttagtatcgattcggtgtcatagtgatgaatgaacatgtggagttgtaagcaggtgccttcaattttgccatggatggtacaggccgtacagctagagttcttgattattatttttgttgggtagagtatatagttggattatatccagccttagctgagcctaacctttagctggtccttcaaagattttgtatatggggggcggccgtagttggcgactacctggcttgtggctcccattgcttcttcaggaaacccttagtggcttgtttggcatcttgaggaaaggggattgggagtttacacgagggaattgatggtgagattaagatggaaatttgatttttcatcccagtctcttgtttggtagaggtggtggaaattgacagggagtttagttggagattaggtcattagtgaaaacggatggctgagatttgtttaggcgaagtaaaggaggaattccctcccaattacctgcccctacccaggaattgaaaaggagggagttccttcctcaattccccatccccatcccaccaaaattcccatgtctcccaatcaaacaaaacagttaatagcctcatccctctaaactcccaatcccttctaaaaactccccccaaccaaacgggccgtaggtgtcagggcacctaacattcttgaaaagcttattggttttatttgaaggagttatgtttgttttgtcacacagcattgctctagtaatcaggtatggaaagtccacaagcaagaatcgggatcttgcctactagtcgtatgtgaatcgcatgtctctattgattgttgctcatacgacatgcctaaaaaggcttgcttaattaactgatgacgagatgtgtgaaagggaatatgcatgaccagtcatcatgttgttattaactatttatgcgattttcaccctgatgtttggtcctcagtcacgttatcaaccttttgttctccataagcattattatcattgtctgatgtggacctgtgaagtgttcattacttatcaggctgtgatatatggacatctcgccagccgagcttgcgatcaacatagtagatcctgtcacggaattcagtttgttagacagcctttatcctgccaggcatttgcagtgaattgtgttttaattcagattgaatatttcagccaaccaattacagccaatcttactataaatagtcatggacaaatcatttactgctttctgcatcctcccctgtttttaattagttgctctcacatcatgtacttccacaaatgtatcaactgcaatattaatatatgtaacgagcaatgttgaatttatttagcttgactgtctgccttgttgttacctgtaggcgaatgcagcatctgggatggctgtggacgatgagtgcaagctcaagttcctggagctgaaggcaaagaggacctaccgcttcatcatttacaagatagacgagaagaagaagatggttgtcgtggagaaggttggcgagcccgtactgaactacgacgattttgccgctagcctccctgccaacgaatgcagatacgccatattcgactacgatttcgtgaccgaggagaactgccagaagagcaagatattcttcattgcatggtctcctgatacatcgcgcgtgagaagcaagatgatctacgcgagctccaaggacaggttcaagagggagctcgacggcattcaggtggagctccaggcgaccgatccaactgaggttggcctcgacgtgatcagaggccgtgcaaactgagcattgttttgatgctgctacctataaaagtatgagcttcagatgagaatttagagagctcccctgaggcaatgggttatgactttgttatcatcttagtactactcctatctaagggacggtgtaaggctgtaatctatgtgcggtgcaatgataaggctatcctttctgcgtttgatcatg

SEQ ID NO: 26736 - DNA, 3051 bp, Oryza sativa
  ref <308>: DATABASE ACCESSION NUMBER: AK102178
  ref <309>: DATABASE ENTRY DATE: 2002-08-28
gaagaacagatgccatcctgagcttctagctcgcgagtgatctcttcttctagctcagtaaccacagctacaacctacagcttacagtgtccgcaaaattgtaacattgtgtccttccatcggcaacaatggcggcctcggtggagtacaagctggctccgcacccgtgggcgagcaatgctccgtcgagcaacctcgacttgttcccgtccggcggcggcaagcgccgttcgggctccgagaccgactccgacgacgaggacagcataccaccggactggaggtcgctgtaccacccgcggctggaggtggcggagccggccgtcaaggacccccgcgacgaggccacctccgacgcgtgggtgcgtcgccacccggcgctcgtccggctcaccggcaagcacccgttcaactccgagccgccgctgccgcgcctcatgtcgcacggcttcatcacgccggcgccgctccactacgtgcgcaaccacggcgccgtgcccaaggcggactggtcgacgtgggccgtggaggtgaccgggctcgtcaagcgccccgcgaggctcaacatggagcagctcgtgaccgggttcgaggccgtggagctccccgtcacgctggtgtgcgcgggcaaccggcgcaaggagcagaacatggtgcgccagaccgtgggcttcaactggggccccggcgccatctccacctccgtgtggcgcggcgtgcggctgcgcgacgtgctgcggtggtgcggtgtcatgggcgcctccgccggcgcggccaacgtgtgcttcgagggcgccgaggacctcccaggcggcggcgggtgcaagtacggcaccagcctgcgccgcgaggtggccatggaccccgcccacgacgtcatcctcgcctacatgcagaacggcgagccgctcacgcccgaccacggcttccccgtccgggtcatcgtcccgggcttcatcggcggccgcatggtgaaatggctcaagcgcatcatcgtcgcgtccagcgagtcggagagctactaccattaccgcgacaaccgcgtcctcccgtctcacgtcgacgccgagctcgccaatgccgaagcttggtggtacaagccggagtacatgataaacgagctgaacataaactcggtgatcaccacgccgggacacgatgaggtgctccccatcaatgcgctgacgacgcagcggccgtatacgatgaagggatacgcctactccggcggtggccggaaagttacaagggtagaggtgaccctggacggcggcgagacgtggcaggtgtgcaaccttgaccacccggagaggccgaccaagtacggaaagtactggtgctggtgcttctggtccgtcgatgtcgaggtgctcgagctgctcgccgccaaggagatcgccgtccgcgcctgggacgagtccctcaacacccagccggagaagctcatttggaatctcatgggcatgatgaacaactgctggttcagggtgaagacgaagacgtgcaggccgcacaagggggagatcgggctggtgttcgagcacccgacgcagccgggcaaccaggccggcgggtggatggcgaggcagaagcacctcgagacgtcggagagcgcggtgagcacgctgaagcgcagcacgtccacgccgttcctcaacacggccaccacgcagtacaccatgtccgaggtgcgccgccacacgacgccggagtccgcctggatcatcgtgcacggccatgtctacgactgcacggggttcctcaaggaccaccccggcggcgccgacagcatcatgatcaacgccggcaccgactgcaccgaggaattcgacgccatccactccgacaaggcccgtggcctcctcgagatgtaccgcatcggcgagctcatcgtcaccggcagcgactactcgccgcagagcagcagtgctgacctcacgtccatcgttgagagccctacggcagcggcggcgcccgccgtgccggtgtcgaccgtcgcgctgtccaacccgcgggagaaggtgaaatgccggctcatggacaagaagagcctgtcctacaacgtgcgcctgttccggttcgcgctgccgtcgccggaccagaagctcgggctaccggtcggcaagcacgtgtacgtgtgcgcgtcgatcggcggcaagctctgcatgcgcgcgtacacgccgacgagctccgtcgacgaggtcggctacatcgagctcctgatcaagatatacttcaagggcgaggaccccaagttccccgacggcgggctcatgtcgcagtacctggactacctgccgctcggcgccaccatcgacatcaagggcccgatcgggcacatcgagtacgccggccgcggcgccttcacggtgaacggcgagcgccggttcgcgcggcggctcgccatggtggccggcgggacggggatcacgccggtgtaccaggtgatccaggccgtgctctgggaccagcccgacgacggaacggagatgcacgtggtgtacgcgaaccggacggaggacgacatgctcctccgggaggagatcgaccggtgggcggcggcgcacccggcgcggctcaaggtgtggtacgtggtgagcaaggtggcgcggccggaggacgggtgggagtacggcgtggggagggtggacgagcggacgctcagggagcacctgccgccgggcgacggcgagacgctcgcgctcgtgtgcgggccgccggcgatggtcgagtgcacggtgcggccgggcctggagaagatgggctatgacctcgacaagtcctgcctcgtcttctgaaacgtgacgtgtgtagtgtacgacactgcaaaaactgtacatatacgtagcatagttgcataaattttaattcaaagtttggagctctctcgagttccggtacatcggagtagcgcgcggcggtcgcattcgatggccatggaaaaagtgtagagtgtagattgatggatggttgtgcacatggttcatttgagaatcaagatgtatatttcattggtcatactagagcaaataaaaccgagatattactacg

SEQ ID NO: 26737 - DNA, 2458 bp, Oryza sativa
  ref <308>: DATABASE ACCESSION NUMBER: AK102179
  ref <309>: DATABASE ENTRY DATE: 2002-08-28
gatgtccgttccatcctagtccttggcaagtcttctcaagcaggaggaggacttgccatggtgttgatttggggcgggaagaagcatcgggctcgccgtctgctcctctgatcggcctcctcagttgacacagcaagatttggtccggggggaaggggagcagccgccatgtttgggtcccgagtccaggatgaggtggagatgcagaggaggactaccaacaggatctttcctgatgagagacaggaccagtttaagctaccgtttcaagctgcacgggctgacagatttggggtaaacaggatagatgcaaagactactgagaagattaaagtgataagtgaaggcaacataccatggcaccgccgcattctagaccctgggagtagcatggtgataatgtggaacagggtgttcctagggtcctgtttgtttgctcttttcattgatcctttcttctactacctgccgctagttcatgtactagatgaaagtaccaaccgttcatgcattgccaaggaccggcgattgagcataactatcactgttcttaggacatttgcggacttgttttacatgctgaacatcatggtcaagttccatactgcatatgtagatccaaagtccagagtacttgggaagggagagcttgtcttggacttaaagaagattcaacggagatatctcagaacagatttctttattgacctacttgcaacgatccctcttcctcaggttaccgtgtggattattatgccttcaataaaaaactcagattacaacatccggaacaccacatttgctctggttattatgattcagtatatattcagaatgtatctcattgtaccattaagcaatcaaattatcaaagcagctggagtagttgccaagtcagcctggctaggagcagcatacaatcttctgtactacatgcttgcaagtcatattactggagcaatatactatcttctctccattgaacggcaaattacatgttggaatcagcagtgcctaaatgagtcttgtagttttaacttcataagctgtgacaatactggttctagcagttatcttacttggggaaagaacacaagtatatttgacaattgtgatcccaatcgtaattcaagtgctaaccccccaccatttaattatggaatgttttcaaccgcactgagtaaaggtgctgtttctgctccatttcttgagaagtacttcttttgtctgtggtggggcttgctgcagcttagttctagtggaaatcctcttcagacaagtgcatacatcgcagagaacacatttgccatagcaattggtgctcttagtctcgtactctttgctcagctgattggcaatatgcagacatacttgcagtccatcagtaaaaggcttgaagagtggaggctccggcaaagagatatggaggagtggatgagacatcatcagctccctgatgaacttcaagatcgtgtccggcgattcgttcaggttaaatggcttgcaacacgaggagtagaagaggaatccatcttacaagctttgcctgctgatatacgccgggatgtacagcgccatctttgtttggaccttgttcgacgtgtcccatttttctcggagatggattaccaacttctagacgccatctgcgagcgtctggtgtctttcctgtgccctgagcgcacatacatttctcgtgagggtgatcctgtgaatgagatgctcttcgtcatacgcggtaagctagagagctccacaaccaacggaggccgcagcaacttcttcaactccatcatcctgcgccctggtgatttcgctggcgaggagctgctcacatgggctttacttccaaagaccaatgtccatttcccgctttcgacgaggacagtgcagagccttacagaggttgaggcctttgccctgagagccgaggacctcaagttcgtcgcgaaccagttcagaagactacacagcaagaagctccagcacacgttccggttctactcccaccattggaggacatgggctgcctgcttcatccaggctgcttggcggcagcaccagaggagaaagctggcagagagcctgagccggtgggaatcatactcatggtggccagaagaacatccaccagctgacaagcctaaacaggagggcacttcaagcagtaccaagactattgctgagagtgccattgctcaaatgcacaagttcgcctccgcttccagaaggttccgtgccgacgataccgccatccggaggctgcagaagcctgatgagcctgacttctctgcagatcatttcgattgaggctgatgtttcctgcttttaaaaaactgttgtaaaaccactactgtgcactgcattgtattcaatagccatatagtaatccatgtgtatctcaaagatgaaaccaaactggtcctttgtgtaattcaaatatacgcattttaggagc

SEQ ID NO: 26738 - DNA, 1876 bp, Oryza sativa
  ref <308>: DATABASE ACCESSION NUMBER: AK102180
  ref <309>: DATABASE ENTRY DATE: 2002-08-28
gtgagcaagacatactttttcatatcttccagacaaggtgcattagcaacatagaatatggaagggactggtgagatgagagaggttggacgagaaactctccatggaggtgtggtgcagagtgttagtgagactgatgagtacaaagaaaagactattgacagtgaaaaagatgggcagtttcgggtgcagccaagatggaggaaattcttggctcatgttgggcctggagctctggtggccattggcttcctagatcctagcaacttggaaactgacatgcaagctggagctgacttcaagtatgagcttctgtgggtcatcttagttgggatggtctttgcacttctgatccaaacattagctgccaaccttggagtgaaaacaggaaggcaccttgctgaactgtgcagggaagagtacccgcactatgtcaacattttcttatggatcattgcggagttggcggtgatttctgatgacattcctgaagtgttgggcacagcttttgcgttcaacatattgcttaagattccagtgtgggctggagttattctcacagtgttcagcaccctcttgcttcttggagtacagagatttggggctcggaagctggagttcatcatagcagcattcatgttcactatggcagcttgcttcttcggagagctaagctatttgaggccgtctgcaggagaggtggtcaagggcatgtttgtcccttctctccaagggaaaggcgctgctgccaatgcgatcgcactctttggcgctatcatcacaccatacaacttgttcttgcactctgctctggtcctgtcaaggaagaccccacgatcagacaaaagcatcagagctgcttgcagatacttccttattgagtgtagtcttgcattcatcgtggctttcctcataaatgtttcagtcgttgttgttgctggatccatttgcaatgcgaataatctttctccagctgatgccaacacgtgtggtgacctaactctgcaatccacacctcttttactcaggaatgttttggggagatcaagctcggtggtgtatgctgttgcgctgctagcttctgggcaaagcaccactatcagttgcacgttcgctgggcaggtcatcatgcaggggtttctggacatgaagatgaagaattgggtaaggaacctcatcacccgagtcatcgccatagctcctagcctcatcgtctccattgtcagtggtccctcaggcgccggcaagctaatcatcctgtcatcaatgatcctgtcatttgagctgccgttcgctctcatccctctactcaagttctgcaacagcagcaagaaagttggacccctcaaggaatccatctatacggtggtgatcgcgtggatcctgagcttcgcgctcatcgtcgtcaacacctacttcctagtgtggacatacgtggactggctcgtccacaacaacctccccgagtatgccaatggcctcatctccgtggtggtgttcgcgctcatggccgcctacctggtcgccgtcgtctacctgacgttcaggaaggacacggtggcgacgtacgtgccggtgccggagcgggcgcaggcgcaggtggaggccggcgggacgccggtggtggacgcctccgccgccgacgaggaccagccggctccgtacaggaaggaccttgccgatgcttccatgtagccttgataaattattgcttgctgagtagtgcattagttattcctcgtcgtcagtgtataactagatgtgttctctggatgatataatgtgattcgtcattgattttttgttcttcttcttgttgttgtttctaagcagcttagctgtaaattaagtttgagaaaaaaaagtgtgcactact

SEQ ID NO: 26739 - DNA, 1102 bp, Oryza sativa
  ref <308>: DATABASE ACCESSION NUMBER: AK102181
  ref <309>: DATABASE ENTRY DATE: 2002-08-28
gggctctcttcctcactcacgcggccacgcctttgcgtttcttcgccgccggctaaaccctttcccgtgtcgtcccgtaccccattcccacgcgccgtcggctcaatcattctcgcccgccaccctatacatctggaaaactttaagggcatctccttttgagctatcaagaatggcgtcccaaaagcccgaaaagaaaggtccccctgatgctgctgaagaattttttcatcaccgcatgctacagccggatgcaatttcaagggaccgcagcaagctgccgggaccattgaattggcaagaacataaaaatacaagtcaatgtcaccagacacgtgtttgcacccgtctagcaatgcactactacaacttggaaaatccagccaataaagcaaccaagggagtagccaaggatagccacatgtttatcttgaggcttgctgacaaacaatgtttctggcacgtgtactttagagccactgttgctggctgttcaacacccttttttgctgaattaaggggggaagaaaaaccaaatgaggtcacaatgtgcaagattgtcgataaatacaatggttccgttgatatctgtgcccattgctggggtggaatcaggcatccaaaggacggtggatttgttggctacgtaggagcattgcctgaggggctgaccattaatcacgctaacatgctgatgcttgaggtccggaaagaagagagagacttgaaagacgagaattgctgacgactggaggagaggtgacgctgctgtatgtgggggaagaatctatcaagtatcaagtgtcaactgaatgcatggcttggaatgctccacgacgattggaagattagctagctagcgtcttctttatgttgttgactacttgttcattctggaatgctgttacggttgttcttttgttgttgttgtcacacctgcatctgcaattactcccctatgaggcagtcgttattccattgtttattagtaggccgatcggtcagtcacatatgatcggtcagtcccgctactctcaaaacttattaaaagaagtgttgcaatgtgtcgttggagcagttttgtggtacggttgggttgcgt

SEQ ID NO: 26740 - DNA, 1678 bp, Oryza sativa
  ref <308>: DATABASE ACCESSION NUMBER: AK102182
  ref <309>: DATABASE ENTRY DATE: 2002-08-28
gattgcctgtgcgccgcgctgcgctgcgtacgtgacagcagaagcgacgcgcgcgcgcgcgagcgacaccagatgttgccgtccaggccgagatccgggtcctggggaggcgggacgcggagttcttcggtgtccacgccgaggtctcgccacgagcgcagcaaatccgtcgccaccatcttctcgccgtcgtctcccgagagttacggcggcgtcgtgatggagatggaggagaagaagacgtcgtgcacgctgcaagaagtcgatgggttgcggcagagcgacggtggcgtggacaaggaagtggtgggcggcggcgcggcgtgctccgacgaccgggtgcggctgctggagcgggaggtggcgacggcgaaggcgacggagatgaatatgctggagtcgctgatacagcagacgaaggagatggagcaggcgaagatcgctctcgaggaggctaagctcgaggtcgccacgctgcggcagcagcagggacgcgcccctgccgccgagccagccgccgccgcccagtggagcgtcatggacctcatgttcggcggcgtcgacgaggagatcaacgggctgagggccaagctccgggcggccgtgcaggcggagggaagagcaggaaggcggccgacgacctcaccgccgcgctctccgccgtcaccatggaggccaagcaggtgaaggcgtggctgtccgacgcgcaggccgagctggaggacgccaacgccgaggtcgaccggctcagggagtcgctgcacgccgccgaggcggagctgtggtcgacgaccgagcagctcgacggcctcacgtcggactggaaggaggccgccgtttcgtggcgcgccagggagaaggtgcttctcgcgcgcgtccgggcggccgaggacgaggcccacgcggccgggcaagagaacgtcgagctcgccgagctgcaccgggtggtcgacgacgagaacggcagcctgcgtcgcgctctggagcgcgccgtcgaggaggtcaacgcggcgaacgagtcgctcgagctcgccaccggcgagaactccaagctgcaggacgccgtcgcggagaaggagagcgccatggaggcactacgtcaggagaacgagagcctcaaggccagcgaggccgaggcgcgcgggcgcgccaaggagctcgacggccagctcgcggcagcacggaaggccgccgatcacggtcatggcgccggcgagctcgcggcggcggccgaccccttgtcgtcgctgcacaagtggaggggcgacatgcatggcaagctcagcgccacattcctggactccaacagggtgatggcgggcaggaaggaccggatgttcgcgtcgctcagcaacatcgccgagctcaagtcggcggcggccgcggcggccatggacgacttcgactacgagttcgaccacttcgacggcgggcagtacggcgacctggaccacgccatgaagcagaagaagaggaggtcgatcctaaggaagttcggggatttcttccggaggagaagcttgtacaagcgcaacctagcgccggtgattcactactagtagatttttactacttaggttgatctagattagatgctttaatgttttcgcgtgatgctttgtatggtacgtgtttgattgaaatgattagcaaaaaaaaaaacgcccaataaatgaag

SEQ ID NO: 26741 - DNA, 3140 bp, Oryza sativa
  ref <308>: DATABASE ACCESSION NUMBER: AK102183
  ref <309>: DATABASE ENTRY DATE: 2002-08-28
ggaagaccagagagaagacgagaggcgatcgcagtggagtggagtgaagtactagcagtattaaaaccagcagcaagcgagagagaggccaccaaccacttcctcctccaagaaaccacccccaccacgagcacgagcacgagcaaccatggcggtggcagagggagctgcgactgcgagctacgggccatgactgcggcgagttcttgctgggttgttgttgtacaagcagcgacgaggaggaggggagcagaggaggaggaggcggagggatggcagcggcggcggtggggggaaggggggagaggctgtcgtcctcctccccgacggcggcggcgccgcaggtggacgccgggaagtacgtccggtacacgcccgagcaggtggaggcgctggagcgggtgtacaccgagtgccccaagcccagctcactccgccgccagcagctcatccgggagtgccccatcctcagcaacatcgagcccaagcagatcaaggtctggtttcagaatcgcagatgccgggagaagcagcgcaaggaggcctcccggctgcaaactgtgaaccggaagctgaatgcgatgaacaagctgttgatggaggaaaatgaccggctgcagaagcaggtgtcccgtctcgtctacgagaacggctacatgcggactcaactgcacaatccttctgcagccaccacagatacaagctgtgagtctgtggtgacaagtggtcagcaccatcaacagcaaaacccagcagttctgcatccgcaaagggatgcgaacaacccagcaggtcttctcgctattgctgaggagaccttggcagagttcatgtcgaaggcgacaggaactgctgtcgaatgggtgcaaatggttgggatgaagcctggtccggattccattggaatcatcactgtttcgcacaattgcagtggcgtagcagcacgagcttgcggcctggtgagccttgagcccacaaaggttgcagagatcctcaaggatcgcccctcttggtaccgtgattgccgatgcgtagatatcatccatgttatccctacgggtaacggcggaaccattgagctaatctacatgcagacacatgcaccgacaactttggcggcaccacgcgacttttggactctccgctacacaagtggacttgaagatgggagtcttgtgatctgtgaaaggtcattgactcagtccactggtggcccatctgggcctaacactctgaattttatcagagccgaggtacttcccagtggttatctgattcgaccatgtgagggaggtggctccatgatttacattgttgatcatgttgatttggatgcttggagtgtgcctgaggttcttcgaccgctctatgaatctccaaagatccttgcacagaagatgaccattgcagcattgcgacacattaggcaaattgcgcatgagtcaagcggtgaaatcccctacggtgctggtcgccagcccgctgttttcaggaccttcagtcaaaggctcagcagaggtttcaatgatgctgttagtggatttccagatgatgggtggtctttgttgagcagtgatggtagtgaggacattacaatttcagtaaactcgtctccaaacaagcttgttggatcccatgtcagcccgaaccctctgttttctactgttggaggtggcatcttgtgcgcaaaggcatcaatgctacttcagaatgtacctcctgctctacttgtgcgatttctgagggagcatcgttctgaatgggctgatcctggtgttgatgcttattctgctgcttctttgcgagccagcccatatgcagttccaggcttaaggaccagcgggtttatgggcagtcaggttatactacccctcgctcataccttagagcatgaagagttcttggaggttattaggctcgaaggacatggtttcagccatgatgaggtgcttctatcacgggatatgtaccttctacagctttgcagcggggttgatgagaatgctactagtgcatctgcacagcttgtctttgctcctattgacgaatcttttgctgatgatgcaccacttttaccctcaggattccgtgtgataccactagatacaaaaatggatgggccatctgcaacacgcacgctcgaccttgcatccgcccttgaggttggaccaggtggagcttcgcgtgcttcagttgaagcatctggcacatgtaacagatcagtcctgaccattgctttccaattctcatacgagaaccaccttcgtgagagcgtggcggcaatggctaggagttatgtcagagctgtgatggcatccgtgcagagggtggctgtggcaatagctccttctcgacttggaccccagatcggaatgaagcaccctccagcctctcctgaggcgcttacacttgctagctggattggtaggagctatagggctcacaccggagcagatatccgttggtctgataccgaagatgccgattctcccctggcgctcctgtggaagcacagcgacgcaatactgtgctgttctctgaagcctgctcctatgttcaccttcgccaacaatgccggcctcgacatccttgagacgacgctggtcaacctccaggacatctcgctcgagatgatcctggatgacgagggccggaaggcgctgtgctcggagttccccaagatcatgcagcagggtttcacctatctccctggaggcgtctgcaagtcgagcatggggcggcaggcatcgtatgagcaggcggtggcgtggaaggttcttagcgacgacgacgcgccgcactgcctcgccttcatgctcgtcaactggaccttcatgtgatccaccatccatggtttccagcttccagctagtgcttttgcttttgtgccattgtggcaaactgaacaaagacctgaataccaccaccgtattgtattaaacatatgcgtccatacatgcatggtgcttgctttatcctagctagtgctagcacctgtgtgtatggtctctccatgtttgaagcttaaaattttagaaccctggtttttttttttttctgctgctgtgtggatgaacaagtttcaggacctatgtatctctatctatctatgctaatgctatgaattgtgtgatgtgtgt

SEQ ID NO: 26742 - DNA, 895 bp, Oryza sativa
  ref <308>: DATABASE ACCESSION NUMBER: AK102184
  ref <309>: DATABASE ENTRY DATE: 2002-08-28
ggccgattctagcgatggcgtcgcggggcggcggcgcgcggcgcacgcggccgaacgtgctggtgacggggacgccgggcacggggaagacgacgacgtgctcactcctcgccgacgcggtggacctccgccacatcaacatcggggacctcgtccgcgagaagagcctccatgacggctgggacgaggagctcgagtgccacatcatcaacgaggacctggtttgcgatgagcttgaggacgtgatggaagaaggtggtatactagtagattaccatggatgtgatttctttccagaacgttggtttgaccttgtagttgtgctccaaacagataactcaattctgcatgatcgcttgactagcagaggttatatgggtgccaagctcacaaacaacatagaatgtgaaattttccagatgctcctggaggaggcaagggagagctacaaagaggagatagtgatgcccttgcgaagtgacaatgtggaggatatcagtaggaatgtgggcacactgacagaatggataaacaactggagaccatcccggagctgagctgtttcctctcttcctctctggtaatgcttatgcctggtgaaaaaatgtttttttttctatggtgaattttgaatattgagttagatcgtgcagacattgtaagcctttttacgtatgcatgcccaaccttggatctcagcacgcaataccttgtgctaaacgggttatgtgatgggggcatgctgaatgtaaattagtagtttcatagggaatgtctggctccagtttgtttctctatttcaaactgaaatgttatgtgacatcattacatgtttgaacctgctaatgggatgtacttaaagtgattggcaaaagtgctgatttattttgctgct

SEQ ID NO: 26743 - DNA, 1923 bp, Oryza sativa
  ref <308>: DATABASE ACCESSION NUMBER: AK102185
  ref <309>: DATABASE ENTRY DATE: 2002-08-28
gactcaccacgctctccactacacgactcgtcgccgtcttgctctgctgcctctcgcgcccgcgcagcagtgagcagcagcaagagcagcaaaatggctctacccgggcgcctccgcgccctcatcctcgccgtcgcattgccgctgctcttcctgtccgcttcagaggcgggcacggtggggatcaactatgggagggtggcgaacgacctgcccaacccggcggcggtggtgcagctgatgaagcagcagggcatcgcgcaggtgaagctgtacgacaccgagccgaccgtgctgcggacgctggccaacaccggcatcaaggtggtggtcgcgctgcccaacgagcagctgctcgccgcggcgtcgcgcccgtcgtacgcgctcgcctgggtgcgccgcaacgtcgcagcgtactacccggccacgcagatccagggcatcgccgtcgggaacgaggtgttcgcctcggccaagaacctcacggcgcagctcgtcccggcgatgaccaacgtgcacgccgcgctggcgaggctcagccttgacaagcccgtcaaggtgtcgtcccccatcgcgctcaccgcgctcgccggctcgtacccgccgtcggccggcgtgttccgggaggacctcgcccaggcggtcatgaagcccatgctcgacttcctcgcgcagaccggctcgtacctcatggtgaacgcgtacccgttcttcgcgtactctggcaatgccgacgtcatctgcctcgactacgcgctgttccgccccaacgccggcgtgctcgactccgggagcggcctcaagtactacagcctcctcgacgcccagctcgacgccgtgttcaccgcggtgagcaaggcttgggaactacaatgccgtgcgcgtcgtggtgtcggagaccgggtggccgtccaagggtgacgccaaggagaccggcgccgcggcggccaacgccgcggcctacaacggcaacctggtgcgccgcgtcctctccggcaacgccggaacgccgcgccgccccgacgccgacatggacgtgtacctcttcgctctcttcaacgagaaccagaagcccggaccgacctccgagcgcaactacggcgtgttctacccgaaccagcagaaggtctacgacgtcgagttcgtcctcggcggcaactccgctggcggcggcggcagcagcggcaaggacaacggcgggctcggctggcaggacaacggcggggtaaacgccggcaatgcgccggccggcgcaggcggcggcgtgaaggcgacgtcgaccggtgaggcgtggtgcgtggcgaacgccatggccggggaggagcggctgcagaaggcgctggactacgcgtgcgggccgggcggcgcggactgcaaggccatccagcccggcgcggcgtgcttcgagccgaacaccatggtcgcccacgcctcctacgccttcaacgactactaccagcgaaagggccgcaccattggcacctgcgacttcgccggcgccgcctacgtcgtcaaccaagcgccaaagatgggcaagtgtgagctcccgtcgacggtctgaaccgaagcaacagtagcgaaagactgaagaagagcagcggcagcagccatctcgggatgcgaggatttatgaaagaaaatcgaacgccggacagaggaaggagggaaaagaggcagagatgttggaatctttgcttttcttttccagttttcctccctttctttacctgtggtgctgtgcccgctgcttgactcctgctgcatgtttgctgcggcgtagaaacagattactgtagtagctgtacctctttctttttgcagctttggctaatggtgggggatatctttgtttagtccatgtaactacgctggagtatggagtattactatatgattaacctaaatcactactattatagactg

SEQ ID NO: 26744 - DNA, 914 bp, Oryza sativa
  ref <308>: DATABASE ACCESSION NUMBER: AK102186
  ref <309>: DATABASE ENTRY DATE: 2002-08-28
gcttccttcttcttccacgccccgcatcgccgccgccgccggagagggagagagagagagagagagagagagagagagagcgagagatgaagacgatcttggcttcggagacgatggagatcccgtcgggggtgacggtgcacgtggcggcgaaggtggtgacggtggagggtccccgtgggaagctgacgcgcaacttcaagcacctgaacctggacttccagctgctggaggtggagggggtgaggaagctgcaggtggacgcgtggttcggcacccgccgcaccatggccgccatccgcaccgccatctcccacgtccagaacctcatcaccggcgtcaccaagggctaccgctacaagatgcgcttcgtctatgcccatttccccatcaacgcctccatcaccaactccaacaccgccatcgagatcaggaacttcctcggcgagaagaaggtgaggaaagtggacatgcttgagggtgtgacaattttgcgttctgagaaggtcaaggatgagctggtccttgatggcaatgatatcgagcttgtctcccgttctgcggcactgatcaaccagaaatgccacgtcaagaacaaggatatcaggaagttcctggatggcatctatgtcagtgacaagggcaccatcactgaggaccagtgagctgcgtttccttactagctgtagcaaaacctgtcctagagagagtgcacaaggaacttttactgctctgtttttgagtcaaattacaaggtcattcggcaatgaaattttgtactactgggttaggatgttattatgtaattggagcatgtgctcctatggtatccgtattgtttgtgagaatgtttctgtgcttatttctcttgatggatcttttttacaccgttgaaagaacctgcaacttgggtt

SEQ ID NO: 26745 - DNA, 3307 bp, Oryza sativa
  ref <308>: DATABASE ACCESSION NUMBER: AK102187
  ref <309>: DATABASE ENTRY DATE: 2002-08-28
ggttctcgtctcgcccaaatccaccgcccccacgtctctcgtgcctcctcccccatcccatccccacgcagatttcaaacccgcgtcgcctcggccctggtcgccgccgccgccgccgccgtcgcagcagcagcagcagcgggagcccccgatccgtcgagatccggcgcggggagagggagagggagaggaagggcggggacgcgggagacgatggaggccgtcgaggagctcgcgcagctgtcggaggcgatgcgccaggcggcgtcgctgctggccgacgacgacccctccgacgactccgccccacgccgcccctccaccttcctcaacgccgtcgcgctcggcaacgtcggggcgggcaagtcggccgtgctgaacagcctcatcggccaccccgtgctgccgacgggggagaacggggcgacgagggcgccaattgtggtggacctgcagagggacccgggcctcagcagcaagtccatcgtgctgcaaatcgacagcaagtcgcagcaggtgtccgcaagttcgctgcggcattcgctgcaggacaggctcagcaagggggcgtccagcggatccagtaggggccgtgtagaggggatcaatctcaagctgcggacgagtacagctcccccactaaagctggttgatttacctgggatagaccagcgagctgttgacgattcaatgattaatgaatatgctgggcacaatgatgcaatactgctagttgtgatacctgcaatgcaagcagctgatgttgcgtcatctcgagctcttaggctggccaaggatattgatgcagatggcaccagaactgtaggtgtgataagtaaagttgatcaagcagaaggagatgcaaaaactatagcttgtgttcaggcccttctgtcgaataagggcccaaaaaaccttccagatatcgagtgggttgctctgataggacaatcagttgcaattgcgtcagctcaagcagcaggttctgaaaactcactagaaacagcatggaatgctgaagctgaaaccctcagatccatcttaactggagctccaaaaagtaaactaggtagaatagctctggttgacaccattgctaagcagatacgtaaacggatgaaagtgcgacttcctaacctattgagtggtcttcagggtaagtcccagatggttcaagatgaactggcacggctgggagaatctatggtacaaagtgctgaagggactcgggctgttgctttggaactctgccgggaattcgaggataagtttcttgctcatattacatctggcgaggggtctggttggaaagttgttgcaagttttgaagggaaattcccagagagaattaaacagctgccactggacaggcactttgacctcagcaatgttaaaaggattgtcttggaagccgatggttatcaaccgtacctgatatctccagagaaagggttgaggtccttgataaagatagtattggatatggcaaaggagccatcacgactctgtgttgaagaggtacatcgtgtattgttagacattgtcaatgcttcagcaaatgccacaccaggacttggaagatatcctccattcaagcgcgaggtcattgcaatagcatcaaatgcactagacagcttcaaaaatgatgcaaaaaagatggttgttgcacttgttgatatggagcgcgcctttgttcctcctcagcatttcatccgtctagtgcaaagaagaatggaaaggcaacgccgtgaggatgaattaaaaaatcgatcctccaagaaaccacaggatgctgaccaacccatgggaaaaagggcctccagtccccagacaggatctgagaaagacacaaaagacaaatcagcgaaagacaaagacaaagacaaatcaggccagcaagacaaagacgcaaaagaggggtcctctgtgcaggttgctggttcttctggtgaaattactgcaggttaccttttgaagaaaagtgcaaaaacaaatggatggagtaggaggtggtttgtcctcaatgagaaaagcggaaagcttggctacacgaagaaacaagaggagagacattttcgtggtgtcatcactcttgaggagtgtaaccttgaagaagtagaggaggaagaacctcctaaaagtttgaaggattcaaaaaaggcaaatgggccagagaaaggcccaagtctcgtctttaagataactaacagggttgcctacaaaacagttctaaaagctcatagtgctgttgtattgaaagctgagagcacggccgacaaagttgagtgggtaaataagatacgggctgtaattcaaagcaaagggggatcattcaagggtccaaatactgatggtggttccatgagacaaagcaattccgatggtgctctggatactatggcacggagacctgctgatcctgaagaagaacttagatggatgtcccatgaagttcgtggttatgttgaggctgttttgaatagtctggcagcaaatgtcccaaaggctattgtgttgtgccaagtggagaaggcaaaggaagatatgctaaaccagctatatagttcaataagtgggcaaagcaatgcaaaaattgaagagcttctgcaagaggaccataatgctaaacgtagaagggaaaaataccaaaaacaatcatctctcttgtcaaagcttacccgtcaacttagtgtccatgacaacagggctgcttcttatgccaatgatatctctgaagctgagagcccccggacacccaaccgcccaggtgaggattggaggtctgccttcgattccgcatccaacggacccagctcaggcagcgaatcaaggtcaagaagcgctgatggacgcagagggcgctatgaaaacggcgacgtgacctccggtgccaactccggcagccgacgtactccaaaccggttacctccagcacctcctaaatactaatcacgctgattagtatatatccatgaacgagcgccgtgatgtattcttgctaggcaccacgccctgtttctgattgatattggtggctggggtgagcggatttgggggatttggactatagagagagaagcgtcttgttagtggagagattgcatgaacaatttgtaagcagggtaccctgagttgtttatagaaatataaataggtaatccatccattatctctattgtttcgtcatctttttttgactcattcatgtctgattaatccccctgcttataggattttgtgggacgatcagtctagctttgtactatatcatactgtatacttatatatcattgtacgcgtacacttc

SEQ ID NO: 26746 - DNA, 2580 bp, Oryza sativa
  ref <308>: DATABASE ACCESSION NUMBER: AK102188
  ref <309>: DATABASE ENTRY DATE: 2002-08-28
ggggggtggtttactgatcaggactatgtctacctgttggctcgtttgcgcggcgccgcgttgaagcgatctgttgatctcgcgcggtggatcaccgaggccgccttccctctcatcgcgacgacgatgggaggggaccgagggaagaagccggtggataccccggcggacatgcttcttcccagccgcaaaaggtggctcggggacggaggttcggatcgcgctcacggcggctgcctgttttacgaaactactccttcgtccttcacgcatggttcttcttcctcttcccccaatcgcccgctgcacgataggatggaggtggatacaaaggaatcagagataccaagacagaggacagaaaatgaccgaaagattagtgcccggatcaaaagaagtcatcaagctcgcaggaggcaacggtacgaggaccaggaagaccgcgtccacgggaacgttcatttcgcctccatatgccctccaccggtgtcttggctggaattgaagcacaatatggaggttaagctagacttaaatcttgatgacatagagaaatctattgtcattccaagatgccaagagatggacacctctggtaacccagacaaggtggacaaatacctcgtcgccgccaagaaccttacacgaatactgaacttggagcaccctgtcctaaccgaaactggacatctccgtgaccgtgcaagatcactccacggcaccaccatctcttccattatcacggagttttgctacctcaaagtctggagggttagtccactaaggcgtctgggctacttgccaggacccatctgggagtcctccgtcagatctacctttaatgagtcaatctcagcaacggtgtcgtcgagctcctctagttccttcacctgcagtggtagcaccaacggtagcagtgataataatcaagcatctcttgaagatggaccagacaaaagattggcatgcactggttttattaacatccaatccgtttctgtcttagatgacattgcaagcatcatcactgagggcggatatcagcaactcctccgaggagctttcgatcgacactactccgaacttgcaagatattttgaaattcttgacatagaaaatattttggggagtcatatgaaggactcggtggaaatcttagtgaacgcatgggtacgggcgatgagaatcactctcaatgttcttactgagatgcgacggcagttacacaaacaaaacttcggcgcattcaattcattcaagcatgactactttatggtgattgcaacgcaatccataaaaaaattggttgcttgtggtagttcaatgtgcagttggcagcaaaactcacaagacgatccctccacgcaaagctgtgctgcccgtgaatcaacaaaacatactacacagatgatactgaatttagtcatgatgtacagagcactgaattacgccatgccagaactcttggcattgttctcggggcgaactgagcagatcgttcttgcagagtttcgtggtctaatcgatcgatcatcatctacggtgctccagttgttcatggagctaaacaacttgataaaatctcaacgactggtcatggttgatattggtgttcatcatattactcggcatatcacagaatatatgcgggtgctatttgaaaagaagagcacaatctatcaaatgttggatagtaagccaaatgcatttggtgaactagttatgggattggtctcgtctttggagtctatgttggagatgaactctagaagtttggtacttcaagggcagaaacaggtattccttctgaacaatcttcatttcatgattgagcaagtaaagagatgtatagattcgggactcattcttggagaaagttgtcttgttcaacgcgaggaccagcttgatcaattaatcacagcttatatagaagcttcttgggatccagttatttcatcgttcgaaaagcgaactcaagtcgcgataattttgtggccacatcaattgtttgacaagtttaattcttctttcgagaggatctacagtgtacaaaagacttggaaggtgactaatcctaatgtccgcctgaagttgcgtgaggcaatcatccagaaacttatcccagtttatcaaatgcagatgggaaaccaatcagagaagaaacaaatgtcagcgaggtacagtgtggagcagctggagtcacaacttctagaaatgtttgagggctgaagcctgaaggcataaagatcacataatacagtaatacacatttgtccgatatcgtggatgaagcagatttcagtgatcaacaatatcgacgagtttgcttgcgcaatctaaaattcagctttccttttcactgcttggctcagcaatcagatgttcgttgctacctgtgttatctggtccaccgttgtctgtgatgtcaatatggcttcttacttaggctggatcctttagttctatttaattttgaatttcaagttgtatggaggtacagaacaaatataagtgtctttaattatggagtcaatttaattgtttatagtttgaaataaaggggttgttcattttgatgcc

SEQ ID NO: 26747 - DNA, 1698 bp, Oryza sativa
  ref <308>: DATABASE ACCESSION NUMBER: AK102189
  ref <309>: DATABASE ENTRY DATE: 2002-08-28
ggtgggatcttgtattcttgcgtcgtcttgggactcttgtggtggtcaagaacgaggacgagagaggtcggagagcgaggcggcggctgtgccgttgcgcgtgcggtgcgggtgaggtagctagcgagcgagaggggagatggaggcggtggcggttgcgggcggtggcgcggggctgacaaggtggcaggcggcggcgctgtcggcggtggcggggtgggtgtgggcggcctcctccttcgacctcacgcggcggtcgcgcgcgctggtgcagccgtgggtcacccgccgcgtgctcgccgagacgccgtccatcgtcagattccagaaggtgcatcacaagttgctggacagtttcttctctgtgctgtcatgcgttgtctctgtccctttctacaccggattcctccctctcctcttctggagcggacactccaagctggctaggcagatgacgctgctcatggcattctgcgattaccttggcaattctgtgaaggacgcggtgtcagcccctcggccaagctctcctccggtgagaagagtgacagctactgaagacgagaaggaaaatgccatggaatatggattgccttcatcgcacgctcttaataccgtttgtttgatgggatatctgctgcattatgtcctaacatatggatcacacgacaatgttatggttgtcacgggcttatctctagctttcttgcttgttatgttagttggcattggacggatatatttgggcatgcacagcttgattgatgttattgctggcatctgttttggcgttgtaatcctggcattctggttggctgtccataatcatgtcgatgcttttgttgtctccggtcaaaatgttacaaccttctgggcgagcctttctctgttgctgtgcttcgcatatccaaaaccagaattcccaactcctagctttgaataccacacagcattcaatggggtggcttttggaattgtctatggaatccaacaaacctacttccatttccacaatcctgatgtccccctcattttcagcccacaattaccgcttattgtatttgtcgggagggttctcgtggggatcccaaccatcctagttgtgaaattctgcagtaaagctctctcgaaatggcttctaccggtgatgtgcaacaccctgggcattcctattgtatcaacctgctatgttccagcgctgaaggcttccgaaaagtgcaaggtcaagtccgacgcgaagcagggcggttatctccagaaggtgttctccctctttccacagaaggcgtacgatgtggacaccggcataaggttcgttcagtacgccagccttgcatggtcagtggtcgacctggtgccggccatattcactcatttaagtttgtagtgaacactgcaagatgcattctacttggagacttgcaaaatcccaaatgggctattcctactcatgagagagagataatcttatgggactgtaaatccgatgatctccactttatttttatttttgcgtggtgtgtgtagaggtgttttgtccatagtagcaaccaggaagtattaacatgctgtgaaattttgtttcatgatgaagacagcgaccaccacgaactctgaaacttaactgcaaagaaatgccattccttttcttgcattgtattgatgcaggttctttgtatccatttcactttcatgccc

SEQ ID NO: 26748 - DNA, 902 bp, Oryza sativa
  ref <308>: DATABASE ACCESSION NUMBER: AK102190
  ref <309>: DATABASE ENTRY DATE: 2002-08-28
ggatttctccctcgcgccgccgcctcctcctcaccctccccgccccaggcgcaccctacgcttggagctcgtccgatccgctcggcgcccgccatgatcatcccgaagaagaaccgcaatgagatctgcaagtacctcttccaagagggagtgctgtatgccaagaaggactacaacctggcgaagcacccgcagatcgatgtgccgaacctgcaggtgatcaagctcatgcagagcttcaagtccaaggagtacgtcagggagaccttctcctggcagtactactactggtacctcaccaacgatggcattgagcacctgcgcaactaccttaacctgccatctgagattgtgcctgccacactcgagaagtctgccaggccacctggccgcccatttggttctggcccacctggcgaccgcccaaggggcccgcctcgctttgaaggggacaggccaaggtttggtgacagagatgggtaccgtggtggtcctcgtggtgctcctggtgactttggtggtgagaagggtggagctcctgctgagttccagccatcctttaggagctctggtggcagacctggctttggccgtggtggtggcggaggctttggcgctggcccgacctcttcctcgatggagtgaacttcccgtagtttggatatgatgttttccttcgcatgaggcgtttaattttgaaggacagttaaattatgtagcagtgatgtttgcaggatcgaccgctgttggcatatgctaaaaatatgctatcttgataccttccagtataatagtttttgcgaacgcttaagttcaatgttaatgcttttgacatattggcggaaattatcttttgcttctgaaaaaaagaattatgtgcatgtttgattgctggctgcgcg

SEQ ID NO: 26749 - DNA, 1339 bp, Oryza sativa
  ref <308>: DATABASE ACCESSION NUMBER: AK102191
  ref <309>: DATABASE ENTRY DATE: 2002-08-28
gactccgctcctcgtcctcctcctcctgcaagcttcctccctcctcgcggccatggcggcgccgttcgtctactgccgccccaccgacgacggcaccagtgagagcgctctcctgagggcggccttcgacgggaacctcggacgcctcaaaggtattttaaagagccttgggatcgagaaaggaaagacccagtatgcagtcttagctcttaacaagcatgggattgggatgctgcacgccgtggcatgccagggccatctgaatgtttgcaagttcttggtggaggaattggggggtgacgtgaatattgctggaaaagaagatataacaccgtttatggccgctgctgagtctggtgatgttcctacggtgcagtattttcttgatcatggtggtgatgtaacaaaagcagatgttagaggatgcacagttctccaccatgctgctggcacaggatgctgtaaggtaacagagttcttgctttcaaaagggatacctgttgacatagactgtggccttggaacaccactctttcatgctgctaacaatggcaaggataagacactgaagattttgttggatcacaaggcagattggctatttgtgacagacatttgaagagtattgacatattatcttcaacaacgggagacgacgacaggattctcgagaacccggccgacgtcctcgtaatcgtttgccggaaccaagcaacccatcgtcatcgtcatcatcctctagatgttgatctagagcttaaataatgaaagattttaataaagctccatgtcaactttgtattagagtaactggctagtagatcagtctaggttcttagtcagagctagatacaccaaaagtaatttggctagtagatgagaggataacaaaagtgtccatcttggactatagatagcaaaagtaggctgtcttgattggagaagttatcaggtagaacgcttctttttgccctttgtctgaatgaagccatagtcagtgctttcttcttcatcattttcctaaaaaagaaaaacagaatccttatcaaagtatattactaaggaaccagcaattctttctcatgcaatacttagcacaatgcaggcagtaggtttggcaagtatgagacccctagtgtcagccatatatgtgaatagtacatgtaaatagagaatagttgttgaccacagggtatacacttgcttgaatatttcattccattatctaaaaaaatacacttgattgaaatggtgccaagcttgtgcacagtacagttagtaggttaattgtatgattgaagaatgaaaaacaaatgaatttaaatatgatcagttgttt

SEQ ID NO: 26750 - DNA, 3309 bp, Oryza sativa
  ref <308>: DATABASE ACCESSION NUMBER: AK102192
  ref <309>: DATABASE ENTRY DATE: 2002-08-28
gacggggttgagagagagagagagagagagagagagagagagagagaatggccattataatagagccataggccaaaagctcaactgcactgagagcagcatcagcagcagttcactgtcactcttcccaagaacgggtgccaaggaatcctagaatccaagaaaggcagcagctgctgcagcaagaacagcacagggggagaggtggtggtggtggtggtggggaagaagaccacacacattcggctgggtggtggtcttcttcttctgctgctgctgccgctgttgccgcttgttggagtgaggagagtgggtgagtgatggggagggggtgcctggctgcgctgctcggcggcgcggtggcggtggccgtgctggtcgccgtcgtccactgcgcggtgacgtacgacaagaaggcggtgctcgtcgacggccagaggaggattctcttctccggatccatacattacccgaggagcacacccgaaatgtgggacgggctaattgagaaggctaaagatggaggcttggatgtgatccagacctatgtcttttggaatgggcatgaaccaactcctgggaattacaattttgaagggaggtacgatctggtcaggttcatcaagactgtccagaaggctggcatgtttgttcatctccgcatcggtccctacatttgtggagagtggaattttggtggatttccagtttggttgaagtatgtaccaggcatcagcttcaggacggacaatgaacctttcaagaatgcaatgcaggggttcacagagaaaattgtgggcatgatgaagagtgaaaacctctttgcttcacaaggcggtcctattatcctctctcagattgagaacgagtatgggccagaaggtaaagagtttggggctgccggcaaggcatatatcaactgggcggcaaagatggccgtgggattggacaccggtgtgccgtgggtgatgtgcaaggaggatgacgcacctgacccagtgatcaatgcatgcaatggtttctattgtgacacattttctcctaacaagccttacaagcctacgatgtggactgaagcttggagtggatggtttactgaattcggaggaaccatccgtcaacgaccagttgaagatctcgcatttggtgttgctcgcttcgtacagaagggtggttcttttatcaactactacatgtatcatggaggaacgaattttggtcgcacggctggaggtccctttatcaccacgagctatgattatgatgctccacttgatgaatatggacttgcaagggaaccaaagtttgggcaccttaaagaactccatagagctgttaagttatgtgagcagcctttggtttctgccgatccaactgtgactacccttggaagtatgcaagaggcccatgtgttccgatcttcctctggctgtgcagctttccttgcaaactacaattctaactcgtatgccaaagttatcttcaacaatgaaaattacagccttccaccttggtcaatcagcatccttcctgattgcaaaaatgttgtttttaacactgcaacagttggtgttcagacaaatcaaatgcaaatgtgggcagacggggcttcttcaatgatgtgggagaagtatgatgaggaggttgattcattggcagctgctccattgctcacgtcaactggtctacttgagcagcttaatgtcacaagagacaccagtgattacctctggtacattacgagtgtggaggtagacccatctgagaagtttctacaaggtggcacgcctctgtcactcactgtgcagtctgctggccatgcgctgcatgtcttcatcaatgggcaactccaaggttctgcctatggaaccagggaagatcggaaaatctcatatagtggcaatgctaaccttcgtgctggtacaaacaaagttgcactgttgagtgttgcttgtggactgccgaatgtcggagtgcattatgagacgtggaacactggtgttgttggtcctgttgtgattcacgggttggacgaaggttcaagagatctgacttggcagacttggtcctatcaggttggcctgaaaggtgaacagatgaatctaaactccttagaaggctcaggctcagttgaatggatgcaaggatcattggtagcacaaaaccaacaaccgttggcatggtatagggcatactttgatactcccagtggtgacgagccactggctctggatatgggcagcatgggtaagggtcaaatatggataaatgggcaaagcattggacggtactggacagcatatgcggaaggtgactgcaaaggttgccattacactgggtcatacagggcacccaagtgtcaggcaggttgtggtcagcctacacagcgctggtatcatgtgccaagatcctggttgcaaccaactagaaatctgctagtggtttttgaggaacttggcggtgattcttcaaagattgcccttgcgaagcggacagtctcaggtgtctgtgctgatgtatctgaatatcatccaaatatcaagaactggcagatcgagagctatggggaaccagagttccacacggcaaaggtgcatttaaaatgtgcacctgggcagaccatttctgcaatcaaatttgctagctttgggacacctcttggaacttgcggaacattccagcaaggggagtgccattcaattaactcaaactctgttcttgaaaagaaatgcattggactacaaagatgtgtcgtcgcaatctctcccagcaactttggtggagatccctgcccggaggtgatgaaaagggtggcggttgaggcggtatgctctaccgctgcatagggcaatttctttgccgagacgaatttagagatggcaccaaacaggtgggcttgtgcttgatcaaagcacacagaaagcgatgcagagtagagttcaactgtaaagtatcgacgccacatagctgtggctggaggattagagatcgattctagcattcactcagtcgaatttcagattagaggattctaactctactgcatctccatgaattgttcagagtgaccgactgctaattgaagttggtcctgggatggagtgcagggagagtaaaggcaaaagattggtgcattcttttgctcgcgttagtgtgcgtgttgtgttgtttcatctttcttgaaaggaagaaagatgccgatgaattgtgcatgtatcccatatgaggaatcgttgattgtgcggtgagcatgatatgctgcagaacaattgctcgtgtcatattctgaagttcagaaaagaggttgtc

SEQ ID NO: 26751 - DNA, 2538 bp, Oryza sativa
  ref <308>: DATABASE ACCESSION NUMBER: AK102193
  ref <309>: DATABASE ENTRY DATE: 2002-08-28
gggtggccgccgctggcgaatcagatccgccacctcgccctggcgctccggcggccggcgaggtgggctgcgctgcgccgccgcttctggccagattcgcctgaggagtgtattgctgctatcgtccaacaaacaatatataaaaggatgctatgagatcattatgtaataaatccatgtcaaaatgggaataaaggatcattattcatattaaacattgcgctgcctgaaacggatttaagaactggaagtgaaacacaaggcaaagacccaaggaacttcaggtcgtgactcctgatggcaaagagactaagagagtcgatatttcatgacttgttgaagaaaaatatgaaccagatgtacagataccaagtacaccagagccaatgtctttttagagaggattgggtgaatgcagatgcacttttcaagttattcatcgaaggaagatgtagcacaccactcctaaacacgcagatctggaacatgctgcattttccggtgcatttctctatggatccaatctgctttgaagtcttgatgcagattgaggagccagagtttcttcagggagaaaagattttcaatgcccacagggactctctccagccctggcagtgaatcgttgtataaaccttcaatgactggaagtgcatcatctgcgatcttcagccggttgacatttggcatgagcttcaagacaattgtcttcaacttgggaaaggatcctgcagtaatgatcaacctgtttgcactaatcatgctgttaagtctcaggtatgtgaggtttggaacatgtagcccgagcactcgaagtggatcctctccaagttgacaccaacttagagctaggtacctgagatttttcccatgttcctgaaatatcggcaattccaatgtcccagtggcccactgccctctgacaattagcctatggaacttcttggatattggattgagattttggaatcagagtacctccttctcatcacatgcagagagaagcaggcttgaaagaagtggcatcttggacagagcagtaaaaatctttgcacaattagtagcactgatattatcaatccacaagttttgcagtttcgtcagcttctctagctgttctgctaattccttgctggcttgaacagtttcaagagtctggagttcttccaaacctgataaccctttaggagcttccactccaatgaagtatcggaactctgtccgtttctcatcagcatatctgtcagctataagatgccgcaacttcttgaccttaacaattcctcgtggtaatttcactattttggtttgcttgatatctaaagtttgcagattagagagattctcaatgcattctgggagcttacatacgttggtgcgtcttaagccaatgtaccgcagattaaacagattacctatggatgtcggcacttcactgatttcagagtcttgcagctcgagaacactaaggtagtttgatcgagaaaaaattgagttcagcatgctggtggaggatgaaacagcttgaagggacaatagagttcggaggtgcggaaatgacacccttggtgcgctatcatctttccatccacatgttgagaagcgacgaacttctgtatccagctgcgtcattgtgccattatcacttgctgagccaaacatctcctctttagcaacatcaagagccaggttgcgcacaatgtcatgcatcttacaggtactcaccctgctgtgctcatcattctcaacaacttccaacatattacggtgaatgagttccatgagatttccttcagctacatcctctggtttgttaccatcttttctcactacaaagccttgtgcaacccataatcgcacaaggctctcccttgacatggagtaatcctcagggaacatgctgcaatacaagaagcagtttcttaggtctcctggcatatcgtggtagctcagatttaggatcgcccggacatgatcattttttatcatctcatttctaagttggctatatgtttgattccaggcatattctgtttgtttccttgaggacaacaggcttcccatagatacaatcgctagcggtagaccttgacacctcttaactatagaagtagccacctccataaggtctttggggcagcctgttctaccatggaaagcccttctacagaagagattgaatgagtcagtgttgcctaaaggttggagatcaaggcgatattttgaggatgcaagagctgccacttcttccttccttgtcgtgatgacaatccgactttcctggagattctggaatgcattgcgcatcatagtctggtgattgctctcggtatgcaaccttcataagtagagtgcatagcaattcttccacatcgtaggtctttgatacaacaatccaagcatgagcagggaagtttcccttttcccggtcgtacacattttttaccaatgtagtttttcccagtccacccatgccggacactgttatcactgtaccatgcggctcattggaatacagccatccagtcaattttctcc

SEQ ID NO: 26752 - DNA, 1745 bp, Oryza sativa
  ref <308>: DATABASE ACCESSION NUMBER: AK102194
  ref <309>: DATABASE ENTRY DATE: 2002-08-28
caagccgagacaacgcagagaaaggcgtcttcgtactcgcctctctccgcgcctccgcgcttttcctcctcctctcccctctctcccttctccgccgccgtcgcagcatcaacccaatccgccgccatgagggagtgcatctcgatccacatcggccaggccggtatccaggtcgggaacgcgtgctgggagctctactgcctcgagcatggcatccaggctgatggtcagatgcccagtgacaggactgttggtggaggtgatgatgctttcaacaccttcttcagtgagactggtgctgggaagcatgttccccgtgctgtatttgttgatcttgagcctactgtgattgatgaggtgaggactggttgctaccgccagctcttccaccctgagcagctcatcaatggcaaggaggatgcagctaacaactttgcccgtggtcactacaccattggcaaggagattgttgatctgtgccttgaccgcatcaggaagcttgctgacaactgcactggtctccaaggtttccttgtgttcaacgctgttggaggtggaacgggctctggtcttggttcccttctcctggagcgcctttctgtggactatggcaagaagtccaagcttgggttcactgtgtacccatcccctcaggtctccacctctgtggttgagccatacaacagtgtcctctctacccactccctccttgagcacactgatgttgctgttctgcttgataatgaggccatctatgacatctgccgccgctcccttgacattgagcgcccaacctacaccaacctcaacaggcttgtgtctcaggttatctcatccctgaccgcctccctgaggtttgatggtgctctgaacgtggatgtcaatgagttccagaccaaccttgtgccctacccaaggatccacttcatgctttcgtcctacgctccagtgatctctgcggagaaggcctaccatgagcaactctctgttgccgagatcaccaacagtgccttcgagccatcctccatgatggccaagtgcgaccctcgccacggcaagtacatggcctgctgcctcatgtaccgcggcgatgtcgtgcccaaggacgtgaacgccgccgtcgccaccatcaagaccaagcgcaccatccagttcgtggactggtgcccgacggggttcaagtgcggcatcaactaccagccgcccagcgtcgtccccagcggcgacctcgccaaggtgcagagggccgtgtgcatgatctccaactccaccagcgtcgtggaggtgttctcccgcatcgaccacaagttcgacctcatgtactccaagcgcgccttcgtccactggtacgtgggtgagggcatggaggagggtgagttctctgaggcccgtgaggatctcgccgcgttggagaaggactacgaggaggttggcgctgagtccgacgagaatgaggatggcgatgatggtgacgagtactagaggagtcgtcgtcgtctgggggcttgatgttctgtgtgtcaaggcctgattgataactgctgctatcccatgatctgccagtgtggagttatcctgttgccgtgtgcgtgtgtcttcgagacatttgcttgtggtgatctgatgtttggggcttaatgggcttacaaccctcgttgttgtaacctgtgtgccctgttttatgtgagaccgcttcgtcacttataatatgcgcgtttgttcaattttatgtttgtttcttgtgt

SEQ ID NO: 26753 - DNA, 3314 bp, Oryza sativa
  ref <308>: DATABASE ACCESSION NUMBER: AK102195
  ref <309>: DATABASE ENTRY DATE: 2002-08-28
gacgttcagccccaatccccaaaggcccgaggagctgaaaattccggaaccttcgtctcgccgccggcgccgcccatcccaaattttcccccacccgaaagcccaaaccctaataccgccgccgccgacggccaccgcaatggcggcgccggcggacccgcggcgggtacgcaacacgtgcatcctggcgcacgtcgaccacggcaagacgacgctggccgaccacctcgtcgcctcctgcggggacggcctcgtccacccgaggctcgcggggcgcctccgcttcatggactacctcgacgaggagcagcgccgcgccatcaccatgaagtccgccgccgtcgtgctccaccacgggggccaccgcgtcaacctcatcgactccccgggccacatcgacttctgctccgaggtctcctccgccgcgaggctctccgactcggcgctcatcctcgtcgacgccgtcgagggcgtccacatccagactcacgccgccctccgccaggccttcctcgagcgcctccgcccctgcctcgtcctcaacaagctcgaccgcctcatctccgagctccacctcacccccgccgaggcctacacccgcctccaccgcatcatctccgacgtcaactccatccactccgccctgcgatcccactcctacttctccctcctctcctccctcgaggaccaaccttcctccgcctcctcttcctcgccggacgagctccccgaggacgttgacgaagacgaggaggacgctttccagccgcaaaagggaaatgttgtctttgcctgtgcccttgatggctggggcttccgcattcaccagtttgctgagttctatgccgccaagctccccaacatcaacgccaatgccttgctgaaagggctttggggtccacgatacttccacaagaagaagaagatgattgtggggaagaaagggatggagggcggcgacgcgcagtcgatgtttgtggagtttgtcctcaagcccctttggcaggcgtatcagggagtgctgagcgagaacggtgagttggtgaagaaggtcattacaaacttcagtttgcaagttcagcaaagagagctgcagaacaaggacccgaaggtggttctgcaggctgtgatgagccgctggctgccgctcgctgatgcggtgatgacgatggtggtggaatgcacgcctgaccctgttgcagctcaaggggtcagggttgcaaggctcatgccaaagagggaggttgctccagaggatgctgctggttcccctgatattgttgtggatgcagagagggtcaggagctgtgtggaggcctgcgatgcgagagcagatgcaccagtggtggtgtatgtgtcgaagatgtttgccgtgccatataaaacgttgccattcaggggtgtggatggggagctgttgaaccaccaaggggccaatgagtctgaggagtgttttatggcatttgcaagggtcttttgtggggtccttcgtgcagggcagaaggtatttgtgttgtcaccactgtatgatccaatgaaaggggaggcgatgcagaagcatgtacaggaagtggagctgcaatacttgtatgagatgcttgggcagggcctgaggccagtttctagtgtgtgtgctgggaatgtggttgcaatccagggacttggtcatcatatattgaagagcgccacattgtcatccaccaaaaattgctggcctttctcaagtatgatgttccaggtgtctccgatgcttaaggttgcaattgagccctccaacccagcagatttaggagcccttgttaaagggcttaaacttcttaaccgggcagatccatttgttgagtacactgtctcacagagaggtgagcatgttcttgctgcagctggggagatacatttggagaggtgtaaaaaggatttggaggaaagatttgcaaaggtcaaattggtggtctcagaccccctggtgtcctttaaagagacaattgaaggcgaaggccttgccttgatagagagcctgaaggctccacgggaattcgttgagaaaactactccaaatgggagatgcactgtgagagttcaggttttgagacttcccaatgcgctcattaaggttcttgaagaaagtgaacaattgcttggtcaaataattgaggggaaaacagcaaagaggaacggcgtgttggatccacatctttctcaggatgatggtgattctgctgcaacacttaggcaacgcctgatcaatgctatagacagtgagttggaagcattttctgagcaagtggataaagaaaaacttgagaggtatagaaatacatggcttggatacctccaaagaatctggtcactcggtccttggcaggttggtccaaacctccttctcttgcctgatgtgaaatcaagtgacagtgtgataaccagtcaagatggaaggcaaggcattcttgtgcgtggtagatctcatgtctctgagagattaggatttgtgtgtggatctgatgctgaagctaacaatgatcttgatgacagtgaaccatcagcagatactcctgaatcattacatctagaatctgtggctctgaggaactgcatagtatcaggttttcaattagcaacaaatgcagggccactatgtgatgagcccatgtggggtctagtatttgttgttgaaccttacatattctgtgaccactctgatgctgcaaatcactctgaacagtacaacatcttcagtggtcaagtaattaccgctgttaaggaagcatgtcgagaagctgttgttcagaacaaaccaaggctagttgaagctatgtacttctgtgaattgaccacaccaaccgaacaactgggtgcgacatatgcagttcttagtaggaagcgagcaagggttctgaaggaggagatgcaagagggaacttctttatttactgtgcacgcatacttaccagttgctgagagcgttggattttctaatgagcttaggagtgtaacagctggtgcagccagtgctctgcttgttcttagccactgggaagctattcctgaggaccctttctttatcccaaaaacgcatgaggagattgaagaatttggagatggttccagcattgggccaaacttagctaagaagcttatgaattctgtcaggcgaaggaaggggcttcatgttgaagaaaaagtggttgaacatggcacaaagcagaggacgctggcgaagaaggtgtagttattttgtatgtttcaaattttgtcctgatagacccaaatactataatcaaatacagaattcgatgtgaccacatggttttgtt

SEQ ID NO: 26754 - DNA, 959 bp, Oryza sativa
  ref <308>: DATABASE ACCESSION NUMBER: AK102196
  ref <309>: DATABASE ENTRY DATE: 2002-08-28
gaccgaacaccaagagaacccactaacgcaacacacatacacacaaacatcgacacatcgtgtccatcggaggcacaggagagatggccggcgccggacgcgacgagctgaagctgctcggcatgtgggccagcccgtatgtcagcagagccaagctcgcgctccaactcaagggcgtgagctacgagtacatcgaggaggatctcggcaacaagagcgacctcttcctccgctccaacccggtgcacaagacggtgccggtgctcatccacaacggcaaccccatctgcgagtcgagcatcatcgtgcagtacatcgacgagtccttcccctcctccgccgcctccctcctccccgccgacccctacgaccgcgccgtcgctcgctcctgggccgcctacatcgacgacaagctagcggcgccgtggagaatggtgtacagggtgaagacggaggaggagagggacgagctcatgaagcagacgctcgcggcggtggacgtgctggagggaggactgaaggagtgctccaaggggaagggatgcttcttcggcggcgacagcgtcggctacgtcgacgtcgtgctgggtggcctcgtgtcgtgggtgcacgccagcgacaagctctccggcgccaagctcttcgacgccgccaaggcgccgctgctggcggcgtggctggggcgcttcggcgagctggatgccgccaaggccgtcctgcaggacgtcgacaaggtggtcgagtacgccaagaagttccagccaagggattccggcacggctgcagatcgacaagcagtaaactaggccggcattgcgacgtccaagagaagtactgagatctgctgcagattattgaattattcaatgccacttttgttgactatgttagctgattcctatcaagaacctgatccacgttctctcaaaagtaaaagatgcggagtgttgtgcctgccc

SEQ ID NO: 26755 - DNA, 1690 bp, Oryza sativa
  ref <308>: DATABASE ACCESSION NUMBER: AK102197
  ref <309>: DATABASE ENTRY DATE: 2002-08-28
gtggatctccttcgctttaaattttgtggtagatttttgtctccttcgctctccacgctaccgcctcgccgtgccggagcccgggcgttccccgccgccgagaacctccgcctccgcctccatctcctccgccgccgccgcagatggatcgggaagaagtgacggagttcctcggccaggtgcccctcctgcagtgcctccccagctcctccatccgcaggatcgccgacgccgtcctggtgaagcgctacgaacctggtggttacgttgctcgtgaaggtgaccctgtagatggcctttacatcatattggatgggcaggctgaggtttcagctcctgcaaacacagaagaagaaaaccgccctgactatgtgttaaataagtatgactactttggttatggaaccaatagttctgtgcatcaagtaaatgttattgcagtatcaaagctgacctgcttcgtattgccaaatcaatatggacacttgttgcaaccaaagaccatttggagtgcagaagagacacctgagaaccattctttgctagaacaaattttgcacttagagccattggaggtcgatatcttccgtgggtttactttgccaggagctccgacttttaggcaagtttttggaggacagttgataggacaggcactagcagcagcatccaagaccgttgactgcctaaaagcggtgcacagtttgcacgcaattttccttatcgcaggagacaagaatttgccaataatatatcaggttcatcgggcgcgcgatggaacaagctttgccaccagaaaagtggaggcaaagcaaaagggccttgtcattttcaccttgattgcttcattccagaaagacgaattagggtttgagcatcaagctgcaatcatgcctgatgttcctcctccagaagagctcctgaatctggaagagatacgggaaagaagacttactgatcctcgcttcccaatgcaatataggaactcagctgccaagaaaaagttcgtaccttggcccatagaaatgaggttttgtgaagattcagcatctcaacataaaccaagcttaaattattggtttagagccagaggaaaactttctgatgatccagcactgcataggtgtgttgtagcatatgcttcggatctactatattctggtgtcagcctaaatcctcatagggagaagggtctgaagacatactcactcagtcttgatcactcgatttggttccacaagcctgtgaaagctgatgattggcttttatatgtgatcgacagcccatctgcacacggtgggcggggttttgttacagggcgaatgttcaaccgacaaggagagctcgtcatgtcgttgacccaagaggcgctgattaggagggcgaagacgccaggacaaccgtcacaaaccccaaggccaaagctttgagaggtgcagaagagcagtattatcgtttcatttttggcactttcacagttattttccttttcaatggaagtctataacacgtagacgtgaagccgaagtatagcatactgcatatatgtagcaagaaaaaacgatggtaaaactggttctgtaattcacgaacagcttactgacataccacgtatgtattggatcgggaaaaataagcgaagaacttggtatcgctttttttttatctcaataaagccttcaattattcc

SEQ ID NO: 26756 - DNA, 898 bp, Oryza sativa
  ref <308>: DATABASE ACCESSION NUMBER: AK102198
  ref <309>: DATABASE ENTRY DATE: 2002-08-28
gagtactattcatcttcaacctctggctgccgaactgagaccgaattggcttggtttttcccctccaaatccgaccttttctcttgtgttttcctaaaattaactgagggcaaattatatcctccttatcctctttatttcccctaaagtttcggagatcaactttgcccggataaaccgaatcgaattcgttttcgagtttatctctccaaactaaccctcggatttttcggttaaaatcctctcgttttgagttcgatctctctcacccatgcctatataaagcatcccctagtcgtcctcttccgtttgccccaagtcccgatctctaccgttgcccgtagcgccgccaccgcgtagccctagccaccgccgttgttgtcgtcacttcagccgcgccgcgccgctgctgtggtcgtcgccgccaccttctgtcgccaccgtcgggttcgtgagaaggaggagcaccccgtccgcccctttgcagccgccgaagaccgccggagcgccgtcgccgacgtagacccgagccgagccgccgtcggacctcgtcgccggccgtcgtttgtcgtcgttcgtcgtagttctttgcaccgtttccgacgttccggaagagagcgtttacgttgaggaaggttcagaagtgtttgaggaagctcaagttgaagaaaaaggatccagaaggagaagacgtttggcttataccccagttgagctgcctgtgggagtggagctgaagccatcgctagaccgttaattccgctgctgttttcttttcttttgtaagtatgtagcgttattattatgatggatttgtatattaaattgtcagtttgtgtacctcggctgatttctcgacgagggttttatgtacaaataagttcggaaattactagtg

SEQ ID NO: 26757 - DNA, 2216 bp, Oryza sativa
  ref <308>: DATABASE ACCESSION NUMBER: AK102199
  ref <309>: DATABASE ENTRY DATE: 2002-08-28
gccacactaacatccactattatcggatcgcaagaatccacagcccggccatggccgccgccgcgccgcagctggaggaactcgtcgacctcgagcccttctctccgtcgctcttcctcgacctgcccccgacgccgcacagcgacgaccccaacgatgacgatctcatcctccccttcatctctcgcatgctcatggaggacgacatcgacgacaagttcttctaccagtttcccgaccaccctgctctcctccacgcccagcagccctacgcccaaatcctcgacgccccatccgacgacaccaccaccaactcctccgacgactccgcctccgccaccaccaacaacacaaccaactccgccgccgccgccaacgcctcctggccctacgaccccatcgagctctctcagctgctccaatccccgccccaccccgtctccgacaaccacgacgccgacgtcggcgacaccaggagcgcgccggaagacgacaaagacctgaaacttctgttctccgccgccgacaacatggagatgctcaacatggcgttcctcaagggcagggaggaggccaacaagttggtgcccaccaacaacaccctcttcgccggcttcgacggcgcctcgctgctcaagacggagccggcggtggatgagcccacgttaatgttcggacgaagcggcggcagcggcaggggccggaagaacaggcacggcgaggaggacgacctggaggcggagaccggcaggagcagcaagctgatggtgccaccgcaagaggccaccgcggccgccagcgagatgttcgacgaaataatgttcaactggtacgaggtgatcatgaaagggatggaggagctgcgcgtcgccatggacagcgaggccgagaagaaggcccggaacggcggcggggccggccggagggcggcgcgcgcaaaggcggcggtggtcgacctacacaccatgctcatccactgcgcgcaggcggtggcgacgagcgaccggcggagcgccaccgagctgctgaagcagatcaagcagaactcgtcggcgagaggggacgcgacgcagaggctggcgtgctgcttcgccgaggggctggaggcgcggctcgccggcacggggagccaggtgtacaagtcgctcgttgcgaagtgcacgtcgacggtggacttcctcaaggcgtacaagctgttcgcggcggcctgctgcatcaagaaggtgagcttcatcttctccaacaagaccatcctggacgccgtggcggggaagcgcaagctgcacatcgtggactacggcctcagctacggattccagtggccaggtctgttcaagtgtctgtcggagagggaaggcgggccgccggaggtgaggattacgggcatcgacttcccgcagccggggttccggccagccgaccagatcgaggagacaggccggcggctgagcaactgcgcgcgccaattcggcgtgccattcaggttccaagccattgctgcaaagtgggagacggtccgccgcgaggacctccacctcgaccgagaagaagaagaagaagaagaagaagaggtgctcgtggtgaactgcctccacttcttgaacgccctgcaggacgagagcgtggttgtggacagcccgagccccagagacatggtgctcaacaacatccgcgacatgaggcctcacgtgttcgtccagtgcgtcgtcaatggcgcgtacggcgcgcccttcttcctgacgcgcttcagggagacgctcttcttctactcgtcgcagttcgacatgctggacgccaccatcccgcgcgacaacgacgagcggctgctcatcgagcgggacatattggggcgctgggccctcaacgtcatcgcctgcgagggcgcagacagggtggatcgcccggagacgtacaagcagtggctggtgcgcaaccaccgggccggcctcacgcagctgccattgcagcctcaggtggttgagcttgtgagagacaaggtcaaaaaactctatcacaaagacttcgtcatcgacgtcgatcacaattggctgctgcagggatggaaggggcggatactgtacgccatgtccacatgggtagctgatcgtgatcacaaatccctcttttagttcaagatttaattatctgcttcaattacttacaaattgagaactagatatatactcctacatgatataatatcttcatttgcaatg

SEQ ID NO: 26758 - DNA, 1005 bp, Oryza sativa
  ref <308>: DATABASE ACCESSION NUMBER: AK102200
  ref <309>: DATABASE ENTRY DATE: 2002-08-28
gatctctccctccctcaaggccatcgtcgagcacattacacaggagtggccacggtcgtctactacgctttctacttagctcacatggttgaagtaacgacactgatgaacttgctcatgcactctcttgagagcaaaaatctacattaagagaaccaacctgccgttagatatgatggagtcgaggtacgtcaaggtggattcgcgcttcttcctcgtcgacgacaactcctcctcctcctcctcctcctgcgccgccgccggcggcggtggcggcgacggcgattaccactacctcgacgcctgcttcctctgcaagcgggacatcaccttcaaccgccacatcttcatgtacaaggggaacgcggcgttctgcagcgacgactgcaggcaggaccagatggacatggactccgcgctcgccgccgtcaagcgccgccaccgcacgctgcaacgcagcagggacatgtcgtcctcctcctcgccggcgccggctgcggcacagtgcgccgccaacgaggcgggcctcttcgcggtgatcccccgccgccccaccgtcgctgacctcaccacccacgctgctcccgccgtgtctggcactgtgtgatcgatcgacgagcggtggtttgtctctgaatgtttttgccatcttccaagatggttcatcgttgtgctcagctgctattagcccatgtcaagaatcaagatgcatgaggtgaagacgatgaggccatgcgaacactagtctatctatatatagtatagtagtaatctcctggttatggagagagaaaggtgttgaaattaagagaaatcaatcgagatcatgatgatattagattccaaatcgagacatgtaacataagtgttcatgctttctccatcatgctggagcctgtactaagttgaaggatcgatcatgcatgtagaattaactagtactggtactggtttggtttgagcttgatttcagctaattaattaagccttctgcaaaaatttacg

SEQ ID NO: 26759 - DNA, 1562 bp, Oryza sativa
  ref <308>: DATABASE ACCESSION NUMBER: AK102201
  ref <309>: DATABASE ENTRY DATE: 2002-08-28
gaccgcaactccggccgcccgccgccgccgccgccgctcgcgtgcagcaagcgttgtgctagctagcgccgccccacccctccggtgccgactagttgctgtggctggcggcgcgcgccgcctgacttcctctccttctccggtgcctcacctcaggctctgttgagaacaggaggggtgagggggaagatgccgaagaaggggacgaaatcgaggaagggcacggacgatgagcccaagcaggaggagaagaacaagcttccggagcaccttgaggtccagcggacgcgtgtggtctgcaagggcgacgcccccgtaaatactgaaggttttcaatacgctggtgcttttgctgctatgggaatcgataacagtgtctcagcggataagttttgcaaaaactttaaagtcgtggtaaatcgacttacggaagatgatatggagtttgatatgattggtattgatgcatcaatggctaatgcttttcggagaatccttatagcagaggttcctacaatggcaattgagaaagttttaatggctgacaatacctcagttatagcagatgaagttctttcacatagacttggccttattccacttgatgcagatcctaggctttttgaatatatctcagaaaatgatgtcccaactgaaagaaacactattgtgtacaaactccatgtttcatgtaaaaagggttccccacggcttacagtgaagtctggtgatttagagtggctgccagaaggtagccaactacctttggcatctcctgctcaatctggggacaaacaaaagacgtacacttccttcagccaaagccagaaggatatcttagaaaagcctcttggtgtgaaatttaaagacataactattgcgaggcttgggccaggccaggctattgaacttgaggtacatgctgttaagggaataggaaaagtgcatgccaagtggtccccagttgctacagcttggtatagaatgctccctgaggttgttcttcgtgaagaaatcaaagatgctgatgcagagatgctagtggcaaagtgcccagtcaatgtttttgacatcgaagacctgggaaacggggaaaagagagcggttgttgctaggccaagagcatgcaccctttgtaggcaatgcgttatgggacctactggggaagttatgggacctactgtggaacaagtagaactacggcgtgtcagagaccacttcatctttacgattgagtctactggagctctaccgccggagatgctgttcacagaggctgtgaggatcctcgaggagaagtgcgagagagtgatatctggactgtcatgagctctctagtggtcactgtagtttttcacggttatattctgttgggagggtgtttgtgctaagatttatctcctgacgaagagctgagttggtaatgtttcttataatcttgtctacatcaggctgctgtaacagaaacaaattaaagctcggcattggttttttgttgttccagtttaccatgcaccctagttgcagtttacagtacttgttattcaggcactacgatttgc

SEQ ID NO: 26760 - DNA, 804 bp, Oryza sativa
  ref <308>: DATABASE ACCESSION NUMBER: AK102202
  ref <309>: DATABASE ENTRY DATE: 2002-08-28
gaacacctctcttctcctgcgccgccgccgcctcctcctcctcccgcatctccctcctcgcctctcgctgccggccgcgcttcgccaagatgaacaaggagaggcttatgaagatggccggcgccgtccgcaccggcgggaaaggcaccgtgcgcaggaagaagaaggccgtccacaagacggggaccactgacgacaagaggctgcagagcacgctcaagagagtaggtgtcaacaccatccccgcgatcgaggaggtcaacatcttcaaggatgatctcgtcatccagttcgtcaatcccaaagtgcaagcttccatcgccgcaaacacatgggtggtcagtggctccccacagaccaagaagcttcaagatgttcttcctgggatcattaaccaattgggtcctgacaacatggagcacctaaagaggattgctgaagagatgcagaagcaggtagctgctgcaggtgccactgcccaggcaaaggaagagaacgatgatgatgttccagagcttgttccgggagagaatttcgaagaggtagctcaggagacaaaagcctgatcatagataccacaagtagtgaaatgttacttgaccgctgttctgaggtcatggttttctatgacggccctgttttgcttctcctcgtaggccaatctttgtatttgcaattggaaacttttagtttctccgagtttttacctaagttatgaatgctgaggtgccatggggtcctttttacctggttttgatgttcacatttctggttggttcagaatatactagcatcagggtttgc

SEQ ID NO: 26761 - DNA, 1180 bp, Oryza sativa
  ref <308>: DATABASE ACCESSION NUMBER: AK102203
  ref <309>: DATABASE ENTRY DATE: 2002-08-28
gagcattgcttctgatcagaagaagatcccggaagagaccaaatcagaagctaaacctatctaccacaaggccaagttacgttagaccgttttgatcagtgaattagctttcaagcagttctactgctcccagccgctcgatcgatcgatcgatcaaacaaggtagctagctggctcaggatcaaatctggtttgtctacatatataggtagtgatcgatcagtcggtcggtcatggaggctcttagcgggcgagtgggggtgaagtgtgggcggtggaacccgacggcggagcaggtgaaggtcctgacggagctgttccgagcggggttgcggacgccgagcacggagcagatccagcgcatctccactcacctcagcgcattcggcaaggtggagagcaagaacgtcttctactggttccagaaccacaaggcccgcgagcgccaccaccacaagaagcgccgccgcggcgcctcctcccccgacagcggcagcaacgatgacgatggccgcgccgcagcccacgagggcgacgccgacctcgtcctgcagcctcctgagagcaagcgggaggccagaagctacggccatcatcaccggctcatgacatgctacgtgagggatgtggtggagacggaagcgatgtgggagcggccgacgagggaggtggaaacgctggagctgttcccactcaagtcgtatgacctcgaggtggacaaggtccggtatgtgaggggcggcggtggcgagcagtgcagggagatctcgttcttcgacgtcgctgccggccgggatccgccgctggagctcaggctttgcagcttcggcctctagatcgacccgtgcattgatgtgccgcacatatggcatgagatgcagcttgccgcgactgtacctggcctcttgtcgctgtgcctagtcctagttctagctgccccacatcaaaaggagtacgtacgagatgtcatgagatacggcatgtgttgtgggaaagtccgttgttgcatgcagtatctgggaggatcaggaaagagcacgcaaacgagatttccccattgcccttttccttggtctttccatcatgagatgtacttctacttttcttcttttctgctacatggatactaacatggtcactgctgatacttctatatgatatatccattaattaatattcc

SEQ ID NO: 26762 - DNA, 1918 bp, Oryza sativa
  ref <308>: DATABASE ACCESSION NUMBER: AK102204
  ref <309>: DATABASE ENTRY DATE: 2002-08-28
gacgggtcttttgcctccgccactctccctcccatccctactcctcgtcgttgcgcctcccacgcacctccatggccggcggcgtaagcgacggcggcgcggcccacggcgcgtcggggaggctggagagcatcctgtcggactcgtcgatgccgctcgcccgccgcgcgtgggcggcgacgaccatcgagctcggcctcctgacgcggattgcggcgccggcggtggtgatgtacatgatcaactacctcatgtccatgtccacgcagatcttctccggccacctcggcaacctcgagctcgccgccgcctccctcggcaataacggcatccagatgttcgcctacggcctcatgctcggaatgggtagcgccgtggagacgctgtgcgggcaggcgttcggtgcacacaagtacgacatgctgggagtctacctgcagcgctccgccgtgctcctgaccatcaccggcgtcccgctcgcggtcatctacggcttctccgagccgatcctcgtcttcatggggcagtcgccggagatcgcccgcgccgcggccatcttcgtctacggcctgatcccgcagatcttcgcgtacgccatcaacttccccatccagaagtacatgcaggcgcagagcatcgtgctgcccagcgcctacatctccgccgccacgctcgcgctgcacgtgctgctgagctgggtcgtcgtctacaaggtcggcctcggcctgctcggcgcctcgctggtgctcagcatcagctggtgggtcatcgtcgcggcgcagttcgcctacatcgtcaccagcccgacgtgccggcacacctggacgggcttcacctggcaggcgttcgccggcctctgggacttcctcaagctctcggcggcgtccgccgtgatgctctgcctcgagtcgtggtacttccaggtgctcgtgctcatcgccggcctactcccgaaccctgaacttgcattggatgccctatctgtgtgcatgacgatttcaggctgggtgttcatgatctcagtaggattcaatgccgcagcaagtgtgagagtgagcaatgagcttggtgcgggcaacccgaaggctgcatatttttcagtgtgggtcgtgactatctcctgtgcgataatctctgccatccttgcggttgtgatcctctgcctccgcaactacattagctacttgttcacggagggagaagttgtgtcaaatgcggtggcagatctctgcccgctcctcgccatcacgctcattctcaatggaatccaaccagttctgtccggagtggctgttggatgtggatggcaacaatttgtagcttacgtcaacattggctgctactatatcgtcggtgttccccttggtgttcttcttgggttcgtcttcaagcttggtgtaaagggcatctggggtgggatgcttggaggaacatgcatgcagacggccattcttgtctgggtcaccttgagaactgattggaacaatgaggtcgaggaagcacagaaaaggttgaacaagtgggaggacaagaaaaaggagccacttcttacagggattagggacaacaactaagttgatgaatcaagatttcttgtcagttcaactatcccccacgtcgccagcatttgctttgatattttctaccagcatggcgcatgcagagggaaactgcaggatcaggcatatatccgagttgggagaccagtgaaagatgtgcttcattgagctcaaatctggtttacaataacattaggtcatgtggtttacttccttttgggacatctggagatgtggaacgatgcctactgaaacctcagaaattttgcagtagaactagaatgggagtggtaaagtgaactgtttttagaaatggattaaaaactgggcctctacatccaaattggatgtacaaagcc

SEQ ID NO: 26763 - DNA, 3287 bp, Oryza sativa
  ref <308>: DATABASE ACCESSION NUMBER: AK102205
  ref <309>: DATABASE ENTRY DATE: 2002-08-28
gagagacctaaaaatcatgtcttccctcaccatcctcctccagagggcgtgcctccgcttcgctctgctcccagtcccgcctctgcgtgctcctcttcgtcctcctcgccgccctctcggcctgcctcgccggagcgccatgtcctcctccgcggcgtcaaggctgtcccacatcgtcgccgccgccggtggtgcggccggggagtccagcgagccgccggcggcggcggctgcagcgtccggtcttgcccaagaggacgatgacctttcatcagcgatgatgggctaccgccttcctccaaaagaaatacaagacatcgttgatgcaccaccgctacccgtgctatcattctcgccaagcaaggacaagattttattcctgaagcgccgagcactgccaccattgtcggatctcgcaaagcctgaagagaaacttgctggtgtgagaattgatggctattctaatactagaagcagaatgtctttctacactggaataggtatccataagctgatggatgatgggactttgggtccagagaaagtggtccatggatatcctgaaggcgcaaggattaattttgtcacctggtcacaagacggacgccatttatcattcagcgttagagttgatgaggaggacaacacaagcggcaagctacgtttgtggattgcagatgtggaatctggagaggcaagaccactttttaaatctcctgagatatacttaaatgctatttttgacagctttgtatgggttaacaattctactttgcttgtctgcactatccctctgtcacgtggagctccaccgcagaagccctcagttccatctggtccgaaaattcagtccaatgagacatcaaatgtggtccaagtgagaactttccaggatcttttgaaagatgaatatgatgccgatctgtttgattattatgcgacctcgcagcttgtattggcctcttttgatggaacagtaaagccaattggccctcctgctgtatatacatctattgacccatcaccagatgacaaatacttaatgatttcttctattcaccgtccatattcctatattgtaccttgtggaaggtttccgaagaaagttgaattatggactgtagatggagaattcattagggaactttgtgatttgccccttgctgaggacattccaatagcaacaagcagtgtccgcaagggaaagcgttcaatctactggaggccagataaacctgcgatgctgtactgggtggagacacaggatggtggagatgcaaaagtagaggtgtcacctcgtgacatagtttacatggaaaatgctgagcctataaatggtgaacaaccagagattctgcataaacttgacctccgatatgcagggacctcttggtgtgatgaatctcttgcattagtgtatgaatcttggtacaaaacacggaaaacaagaacatgggttatctccccagataaaaaagatgtcgtccacgcatcttattcgatagatcttctgaagatgtatattctgatcctggctcaccaatgctacgaagaactgccatggggacatatgttattgcaaaagttaagaagcaagatgaaaatacctacatcttgctgaatgggatgggtgccacaccagaaggaaatgttccgttccttgatttgtttgatataaatactggaagtaaagagaggatatggcaaagtgacaaggaaaagtactatgaaactgttgttgcacttatgtcggacaaaactgatggggaactgccacttgagaagttaaagatacttacatcaaaagaatcaaaaacagaaaacacacagtattacctgcaaatttggccagaaaagaagcaagttcagatcacagattttccccatccatatcctcagcttgcttcattgtataaggagatgataagataccaacggaaggatggggttcaactaacagctacattgtacctgcccccaggctatgatccttcacaggatggacctttgccatgtttagtttggtcctaccctggtgagtttaaaagcaaggatgctgctggacaagtgcgtggctcacctaatgagtttccagggattggtgctacatccccactgctttggttggctagagggtttgctattttatcaggtccaaccatcccgattattggagaaggcgatgaagaggccaatgacaggtacgtggagcagctagtaactagtgctgaggctgcagctgaggaagttgttaggagaggggtggctcaccctgataaaattgctgttggtggtcattcatatggtgcattcatgactgcaaaccttttagctcatgctcctcaccttttctgctgtgggattgctcgttctggagcttacaacaggacactgacaccatttgggtttcagaatgaggacagaactctatgggaggcgactaacacctatgtcgagatgagccctttcatgtcggccaacaagatcaagaaaccaattttgcttattcatggagagcaggacaacaactctggaacacttacgatgcagtcagaccgattcttcaatgccttgaaaggccatggcgcactatctcgtttggtgatactcccttttgaaagccatgggtattctgcgagggagagcatcatgcatgttctgtgggagactgatagatggctgcagaagtactgcttaagcggtagtagtaaaaccgattcagattcagtagctgacaccgaaaacaagacagtgtccgctagtggtggtggagcaccatgtgaaggtcctgaggccgaggggttctcatcaatgcaaagatcgcttctgtgatgaagtggtttcggttggctgtttgtgagctcatcattggacagtttgtacaagcctgaaaggatcataaatgcagttttgtgcttgaaccagaactggttcttcttgctgcaagtggcaaggagtcactacattatggagtattcgattggatttttgctgaaggttgccattccagtgatggaaaggccttattgatgatggatattgcaccctgattgattttactcaattgttttctgttggtatagaaaccagttaaatctaaaaatattctcacctaataatggctctgtagtctgtccaagtatatataaactagtgcctactaggactatagacgatggatccacttgtcttgaacttgttagtcagctttatgcttgcatcagtatgcagtgtgctattgtttgacagcaacataattaataatggatcataccatattgacaagc

SEQ ID NO: 26764 - DNA, 2176 bp, Oryza sativa
  ref <308>: DATABASE ACCESSION NUMBER: AK102206
  ref <309>: DATABASE ENTRY DATE: 2002-08-28
gagggtttagccgcctccgcttcgatcgcttcctccgttgccgccgatcccgccggcgaacggcatgtggccgtcgctccggcgagcagcagccgccgccggcggcgccaggttcaagaatgtttctcatttgcttcctacatgttctggattaatggataataacctgaatggtggttctttgaggggtctgggagaaattggctgccaggtgtcttgtcaagaactcccatttggttattcaggaactggtttcccctcgattcgaagactttcctcagagcctgcagaaaggccattcagaaacaaaaatgatagtgagatattgggggacgatgcgtctgatcaactaccagatgacaacttggaatgtgatgacgaacttgatcaacataatgttatgattgatgcgagtgagacgaaggctaagaatctaaggtcccagtttcctgcaatagatcgtagtggtgacacaaaactgcaaaataaaacctacaggtcttatcttttccaaattgtgttggatgctccctcaaattctctcaggcatgtgctcgataagtggattgaagatggtaaccagcttgaaagaaacgacgctatgctggttttgtttcacctcaagaaacaacatatgtatcggaaggctttgcaggaatgaggtactctatgaaactctaattgtgaacagtgtgttggcgggcgatatccagaaagcagaagaagtcttcaaggaaataaaagacctatgtttgcgtttaactgtcaccctctgcaaccaaatgatactgctatacaagaggattgctcctggaaaggtagctagcgtactcatgctgatggaaaaggaaaatgtcaagccttctgcctttacatacagactgctgattgacttgaaagggcggtcaaatgacctggcaggcattgaggtggtcttaaatgagatgaaggcttatggcattgagccatctacttcaactcaaacaatggttgctaggttctacatccatggtgggctcacagagaaagcggaagcagttgtgaaggagatggaagcgcagctctcgaattcaaaggacggacggcatgtcatcaaatctcttcttcacctctatgctgccctcaacaagccaaatgatgtggccagaatatgggaaatgtgcacagaacctatgctggaggatttcttgtctgcaatcaaggcatggggtgaactcgggcttattgaaaaagcagaggagacctttgaggcgatggcgaacgcaccagaaaagctatcttccaagtactacaatgcgatgctgaatgtgtacgcgcagaataaacttctttctaagggcaaacagtttgtggaaaggatgtgccgtgatgggtgcccgaacggtcctctaacctgggatgcactcatcaatctctatgtgaattcaggtgaggtggagaaagccgactcattcctcctgaatgtggcagaagaaaatcctgacagaaagccgcttttcacctcgtacttcttcttgatgaagggatatgcgaaaaggggtgatatccataacactgagaagatatttgataggctgaagaatgtcgggtacgcaccaaggccactacattatgctgttcttcttgaagcgtatgtcaatgccaaagttccagcccatgggttcttggagaggatgagaggtgacaatgtgcgcccaacaaagaaaatcgttacatctcttgacaccttacagaaaggatggattgcaggcttagactgaattttctctcttttgttcttgggatggatcacacgatgcatttcttgagtagttttacagaacagagactacttggagcccggtaaactgcacagcagaagaatcaattttgcttttgatgtcttccagatttgattttgtgctcttggtagagatgatgttctgatattacattattatggtcattgttttaggatgccactattaggctattattctgagttgggcacttcacctaatgatggttttttttaaaaaaaaaaacacctgatgctctaaataatgaagggagaggaacgaggatgctttgtttaggacatttgcttccttgccatcaaattataggcttagattttgacaatggaacaaattacttctagattcaaaattggaattatgtaaaactgctgacaagt

SEQ ID NO: 26765 - DNA, 1120 bp, Oryza sativa
  ref <308>: DATABASE ACCESSION NUMBER: AK102207
  ref <309>: DATABASE ENTRY DATE: 2002-08-28
gatcgtgcttggtggttgcgttggtcttcgtcttctctcctcctcctcatcttcatcttcttctccccaatcggcggcgccgccgcggaggaatcgcggattgcgtcatcttctcctcctcctccgcctccgcctccgcttccaatccccgtcgtcgtcgggtcaccggagccaaaccctagaggctagaggaagagggaagccatgttcgggaaggggcatgatctcgaggccggcggctcgtcggagccgctgtacccggggatggtggagagccccgacctgaggtgggcgctcatccacaagatctacgtcatcctctccgtgcagctcgcgatgacggcggccgtggcggccttcgtcgtcaaggtccgcggcgtctcggagttcttcgtctcctccaacgccggattcgccctctacatcttcctcctcttcctgcccctcatcgtgttgtgccctctgcgctactaccaccagaagcatccggtgaacttgctgttgctcggcctcttcacggttgccatcagcttcgccgtcggcatgacatgtgcctacaccagcggaaaagtcatttttgaggcggcagctctcacagcagtggtggtgatcagcttgacagcatacactttctgggctgcaaagagaggccatgacttcaatttcctcggccccttcctgttttctgctgtgatggtgctgattttattttcactgatccagatattcttcccattgggcaagatctctgaaatgatatatggcggactggcatcgctcgtcttctctggatacatcatctacgacacggacaatatcatcaagcgctacacttacgatgagtatgtctgggctgctgtctcgctctacctcgacgtgatcaacctcttcttagctctgctgcgagtgttgagggcagctgataactagttcatcaaggctagtctctaccctgcacataacgaatgtccgtggattcctgtaccctgattaagcatcacgcttttgttgattctgctgtaaattcttgcttagtggatcctggagactttttatggaaccgcataattgaatttgttagctatatttcaacaaataaatgcaattgttgccttgcttc

SEQ ID NO: 26766 - DNA, 3529 bp, Oryza sativa
  ref <308>: DATABASE ACCESSION NUMBER: AK102208
  ref <309>: DATABASE ENTRY DATE: 2002-08-28
gtggtccgtcgtcggaatacctccaaccccgcagtcggcggcgacgaccagaccacgcatttcttttctttttttcttttttctcgaggaggagcaggagcggctttgctgttgcatggtgtagtgtagccaagccacctgggcgggcctcgccggatcgccgtccacgtcccggcgaccggtgaccggccgctttcggccgcgggcaccaccaacctccctccctctctcccaaaatctttgcatctttcccgagtccgacacgtggggaggagatatgggggcggcggaggaggaggcggcggcggcatgggacaaggcggaggccaaggaggagaggataatggtgtcggtgcggctgcggccgctcaacggcagggaggccggcgacagctgcgactgggagtgcatcagccccaccaccgtcatgttccgcagcaccgtccccgagcgcgccatgttccccaccgcctacacctacgatagggtgtttggtcctgattcctctacaaggcaggtctacgaggaaggagcgaaagaagttgctctatcagttgtcagtggaatcaactcaagcatattcgcgtatgggcaaacaagcagtggcaagacttacacgatgaccgggataaacgagtatagtgttctcgacatctatgactacatcgaaaagcatcctgaaagagaattcattttgagattttcggcaatagagatatacaatgaagctgtgagggacctcctgagccacgacaccacacccctcagacttcttgatgatccggagaaaggaactaccgtagagaaactcactgaggaaaccttgagggacaaggatcatcttaggaaccttcttgctgtgtgtgaagctcaaaggcagattggagaaactgctttgaatgaaacgagttcaaggtcccatcaaatactcagattgacaattgaaagttctactagacagtatttgggaagaggcaactcaagcacccttgtagcttgtgtgaactttgttgacctagcaggaagcgagcgtgcatctcagactgcttcagctggagtgaggttaaaagaaggtagccatatcaatcgaagtcttcttacactgggaaaagttgttcggcaactcagtaagggaagaaatggccatatcccctacagagattcaaagctgactcgtatattacagtcttccttgggaggcaatgcaagaactgctattatctgcacaatgagccctgcacggagtcatattgagcaatccaggaatacactattgtttgctacttgtgcaaaggaggtagttacaaatgcacaggtcaatgtagtgatgtctgataaggcactcgtgaagcatctacaaagagaacttgaaagattacaaagtgagattaaatttccggcgccagcctcctgcactactcatgctgaagcattgagggagaaggatgcacaaattaaaaagctggagaaacagctaaaagaattgatggaagaaagagatactgtgaagtctcaacttgactgcttgcttaaaagcgattgtgatgaccatagtgacggccgcgttgcgaagcgatgggatgagcatagtcgatcctcagagtcttttgcacggaatgcgtctgaagaagcattttcagtttcagatacttctggtgttccttaccaggatcaagataatgctgtgtttaatggatcctatgtcttcagtgatgaccgtgatgatattgtattccctgttcaaacagtggatcttcctgaagaaacaaagcatgaaaaatttatgtcaccttggcaccctcccagccaccatagttcttctgattgcatagagtcatatcatatgacagaagcggcttccagaactgcatcagaagtctctgaagagcattgtagagaagtccaatgcatagatatacatgagcatagaagaagcacaagtcacaaattcgaccttttgctgccccaggacaccgagttccaaacacctgaattagagatctccaaagaagcagtccctcaacctgatgaagaccaagaacttgagagcataacaaacagaatggaagatcctaccaggatgtgccctgtcgaggaggagcaacaagatgagatcgtagatacatgtgaatctaatggtaccacagacaatgatgtcaagctatatacatgtgattctaacatttcttttgacattcagaaaccttaccctaatggatgtctgactgtaaaaaggtgtatactgagctccaaggatagggcgttgtctagaagtaaaagctgcagggctagctttatgattattccaaatagttggtttgatgattccgagtacaccagccagacaccacctaatgaaatcttgaagcataccccaagaaggtttgacaaggttaggagaagcttgtatccagaaaatgataacccttcttcagtagaccgttctgagttttctggtgaagtttcttctgatgaagtagtgaaggacatgagcaccattgatgaagcagccaaagacatgtgccccagcgacgcagaacaagaaactctcaccagtgacatcagttgtctcaccaagttgaagaagactgatagtgaccatgaggatgaacttgatgagtatcaggatcagtctattagagatggatctacaaccttgagaactgtcaaagatgttggcatagattcatcactgagtgcctctccttctcgttggcctattgattttgagaagatgcggcaagagattattcagttgtggcacgaatgcaacgctcccatcgtacacagaacttacttcttcctcctcttcaagggagatccagcagataacatctacatggaggtggagcacaggagactgtccttcattaggaggtccttcagtgccagccctgcaggaggcgagcttaattctgccgtcgtatcaagcctgaaaaatcttcgacgcgaaagggacatgctctacaagcagatgcttaagaagctcaccaatggggagaaagagcgcgtttacgctagatggggaatcgatctgagctcgaaacagcgaagattgcagctatctcgtctcgtctggacgcagaccgatatggaacacatcagggagagtgcatcccttgttgcgaagctgattgagctgctggagccagcacaggcactgaaggagatgtttggactgaacttcacactagctccccgatctgaacggcgatccttcggccttctaggtacctgaaagaattgcacattgtgaccggcaaaacgatggcccatacgatgacaatgacaacatggaggtagaagaacacgtagtacaggaggttgacttgtttggagaggaattgctccccagcactgatttcactgaagcttctgatgcttcccttctttcatttgtgtgtgtgtgtggttggtttctgatgtataatcatcttacagatatgaaccaatcagccatattgcagctgttacatatgactatccttgtgtcagtttgtctggggaaaattcatcaataaaattcttg

SEQ ID NO: 26767 - DNA, 3442 bp, Oryza sativa
  ref <308>: DATABASE ACCESSION NUMBER: AK102209
  ref <309>: DATABASE ENTRY DATE: 2002-08-28
gcctgacccgccccgcctccttctctcgccgcgctctcgttaagtttctctccggagtctcgaactctcaaccacttccctcctcgtcgtcgtcctcctcctcccactcccctgtccgcgtctcggctgactcggcgactgaccgcgcgccaccgccgctgacggctgagcacgccgcgcgccggcctaaccctggtcaagtggcgacgccgcgagcgacgggttcgtcgtggggtgtcgcacgtggcctcaccctccccggtcccttgaatcctctgcctccgcctccgccaccgcacctaccaacccacctaccgccaaatcgcgcgctgcgactgcgagcgatcgaggcggcctagcctgcggggggctgcctgggcgacgtgaccggcccgcgctcctctccgaatccgaagccgcagcgcagagcgcacgcctcctccccgccggaagcggagcaggacgcctcggaatcttcgccagcccgtgctccggtcggtcatcccatctgctggattgtcgtggagcggagcgtgagtggagtggagatccgtcccgaccgctcttccgtgtcgatacagactagtttgatcagtggtggtgttaaatacgaagtttttatcatataacatttggaaacatgcataaggggactctcacgtcttggaaatgagtaattccattatctgaaaaatggacgatacaccaactagttcggggaaatccgaagtgaattcatgtgaaccgagttggtggccaccagactttttggcaaagatagaatctgtttccttatctagaaaacaaagtgtattttctgataaagaacctcgaagcaatttgcgatcctcatcatggaaggcttctcaattactgtggtcaacagggacttattcagggttcatccctaatggtttctactcaataattccggataaaaagctgaaggaaaatttcccaacaataccatcattggatgaccttcaaactcttgaagcagatggacttaaggctgacataattattgtggacgttgagagagataagaagcttttcatgttgaaacagcttagtggcgcacttgtgaaaggattaaactctagtccagctttggtgataaagaaaatagctggcttggtttttgactgcttcaagagcctagatcctgatgtaagtcctgcaagatctccaactgaagataatcatttctttggaaacaaagggtcacaacttctagggcagataaagcatggatcatgccgaccccgagctatcctgtttaaggttcttgcagatgctgttggtcttgagagtaaacttgtagtgggtctacctgatgatggtggagttggatttgtggattcctacaaacacatgtccgtggttgtttcactgaactctatggaactgctagttgatcttatgcgattcccagggcaattaatcccgttctcagccaaggctatctttatatcgcatatctctgctgctggcgagagtgattcagccgaaaatgactcatgtgattcccctcttgagcccaacagtcctctgtatggattatcagataaagttgaagctgaaggaattgaagcttcatcaaatctatctgggcgttcattgcgcaatgttatgttgaggtcaagaacattttccgaggggaaattgagcacatcatgcagcgagccaaatattgcaaatgccttttggaggcgaagccagagaagaggagttgctgaagaacctcgcggtgctagttcaagccctgagcatccattaatgaagacaagggcaagatctatactaggtggcgagcaacattcatttcaggaatatgcagaaagggagttacatcaagatcagatggtctaggtggtgcatcaacatctaaaactcgaagaatacggggaagaagcattagcatcacgcctgagattggagatgacattgtgagggcggttcgggctatgaatgaaacactaaagcaaaatcgcctccaaagggaccatgttaatgaaggttcaccctcgtatgttggggaggaccaaaacaatgcaagtgattgcccaaataatgatgatacatctggaggagttgttgctaccaacaatggcccaaggaaccgaaatggttccactcagaaagctatgtcattgccttcttctcctcatgaatatagggcgcaaatttctgaaacaatcaatccttgtgattttgtaagtaaagaaaagatggtattggcgtggaacaaggttttgcagagttccccatttctcaataaacctttattgccctttgaagagtggaacatagatttctctgagctaacaattggcacaagggttggaataggattctttggagaggttttccgtggtatatggaatggcactgatgttgctatcaaagtatttctagagcaggatctgacaactgaaaacatggaggatttttgcaatgagatatatatcctgagccggctgcggcatccaaatgttatattgtttcttggggcatgcatggtaccaccacacttgtcaatggtaacagaatatatggaaatgggatcgctgtactatctcatccatatgagtggtcagaaaaagaagctcagttggcgtaggaggttgaaaattgtccgtgatatctgcaggggtttgatgtgcatacaccgcatgaagatagttcacagggacctgaaaagtgcaaattgcctggtgaataagcattggaccgtcaagatatgtgatttcggcctttcccgagtgatgactgatagtcctatgactgacaactcctctgctggcaccccagaatggatggcccctgagcttataaggaacgaaccctttacagagaaatgtgatattttcagccttggtgtgatcatgtgggagctatgcacattgagtcgtccttgggatgggatctccccagttcaagtggtatatactgttgcaaacgaaggttcacggctcgagattcctgaaggacctcttggcgagttaattgcagattgttgggcagagccccaagatcggccgagctgtcaggagatccttacccgcttgctcgactgcgaatatgccgtcagctgaagtcaagctgacgaaccagctcactccttgcctgcaggggccgataagtttctcctgtaaaacctgtaaaaattagcctgtggattttgcaaaccggcgagggtacacatattgacttcttatattgcggctgtataaccgcgaaccttcatgaatgtacaaaaagaatgtgtctccgcttatagaagaacatgccttgaatcgcaggactagttttgctgtcatacttcatcaggaccgttgcgtgtcctcggatctatcatttgtttctctgaaagttttggccggggtactcggtaaaagttgacatttgagatcttccttgagatgcaaccaaattgagc

SEQ ID NO: 26768 - DNA, 1768 bp, Oryza sativa
  ref <308>: DATABASE ACCESSION NUMBER: AK102210
  ref <309>: DATABASE ENTRY DATE: 2002-08-28
ggtccccggcccggcccgtgcctcccccagtcctcctctcccccgtctcccgccgcctagcgattcccggagcgcctcctccgccacccatcctgctccaatggcgcttccttacctggaggccgtgctgtgctttatgattctcatgtatatatttgagacatatcttgacatccgtcagcatagagcccttaagttgccaacactgccaaaacccctggtaggagtaattagtggtgaaaagtttgagcgctccagagcttatagccttgataaaagcaaattccattttatccatgaagctgtaactatattaatggataccacaattctgtactatagagttcttccctgggtttggaagaaatctggagagctagcaaccaatgctggcctaaatgctgaaaatgagatactacacactcttgcattcttagcaggtgtcatgatttggtcacagatcacagacttaccattctctctttattcaacatttgttattgaagctaaacatggttttaacaagcaaactatttggctcttcattagggacatggtcaaagggattttgctatcgatcttacttggacctcctattgtggctgctattatcatcatagtacagaatggagggccctacctggcaatatatctatggggttttatgtttgcattatctcttgtgatgatggcaatataccccatcgtgatagcacctctgttcaacaaattcactccgcttccagaaggagtactcagagagaaaatagagaaattagcagcttcactcagttttccattgaaaaagcttttcgtggtggatgggtctaccagatcaagccacagtaatgcttacatgtatgggtttttcaagaacaagcgcattgttctctatgacacgttgattcagcagtgtagtagtgaggatgaaatagtttctgttattgcacatgaacttgggcactggaaactcaaccacactgtgtattcctttgtagctgtccagctccttatgttcctacaatttggaggatatacgctagtaaggaactccaaagacctttttgaaagttttggtttcgaggatcagcctgtaataattgggctgatcatatttcagcacactataatacctgtccagcaccttctgagtttttgtctgaaccttgtcagtcgggcatttgaatttcaggctgatgcttttgccaagaaccttgggtatgctcctcagctccgtgcagcccttgttaaactacaggaagagaacttatctgcaatgaacacagatccgtggtattcagcctaccactactcccatccaccccttgttgaaaggctctctgctcttgaagacgcagacagcaaaaaggaaaactaacggaaagttgatccacctgaaacaccgaagtctttactcttccatgggttaccttacggtgtcatggaatcgtttcaatgttcgggatgttaatggaatgtgtgagtacatgagaagtactgtaagcgttcaaacatttatcatacaggggaacgttggcaactatgtagctctcgattaagatagtttgccttccattaattggcttacagatattgacatatactccttccatttcacaatgtaagttattctagcattttccacattcatattgatgtattaatatgaatgtgggaaatgctagaatgacttgcattgtaaaacggaggaagtacatgtcagtgtattctcctactactttcgacaagaaatagaagtgaatcagct

SEQ ID NO: 26769 - DNA, 3671 bp, Oryza sativa
  ref <308>: DATABASE ACCESSION NUMBER: AK102211
  ref <309>: DATABASE ENTRY DATE: 2002-08-28
gagtcgctccgcctcccataagcctccacgccgccgcctcccgcacgggccgacagcggtatgcacccgtcgaccggcgtgcttcgatgggccggagcaatccgccgcggcccacccgcgccgcgtggtggcggacccgacgccacgaaggcgtccctcccctcccctccccgccgactggtacgacaccgccgcagtcatcgtcgccggcggccggagcagctaggttcggtggtagagagaggaggaagggagagaagaggggaaagagcctgaggaggaggaggcctcggtaggcatccctaacgccaaagggggaggaggcgacgaggccttccgccaagtgaagtcatccgaggagccatccgccgcccggaaaagtccggtggcgaagaagccgagccggccgcatggggggagtggggggccccaaccggcgtgttccccgccgacatctccccgcccgcggccgcgaatcatgttgctctctccctgtcacttcacaacacgcggaggcagcagcggccggtggtgcggggctgcgggcttcgtctcggcgggacggacggcagcggctgggtagcgtcgcgagcttggaccccccggcggcggcggcgtggggagggcggtgagatcgagtcctgcgacgtcggggtcgggctgtggctgggaaagtgcgacgagaacgagcacgcccggtggcggttactggaggagcacgtcgaggtcgggcccttggcggcggcaaggtcaagccttggcttcctgtaatcaaaggtgcctcattgtacttgataatgtgtggactgtatcaacatggaatgttgttagacatgctttacaagaggattgctgtagtagaatagtagtaacaacagaaattaacgatggggctcaggcatggagtttttacaagtctcaacataatgcatctcacgtgatcaagaagcatattttgaagatggaaccgcttaatgacgatttctcaagagatttacttgttagtagagtttttggtgataaagacaaatgtcctgaagaactcaatgaagtttcatatgagatagcacgaaaatgtggcggtttgccactagcaactatcgctgcagccagtcttttattgagtcggccagacaaaccagatgaatggatctatgtacagaagtcgttgattccagatttgaggatacaacctacttccgaaggaatggcacaactactgaacaatagcttcaacaatcttcctcatcatttgaaagcatgcatgctgtatctgagtatatataaagaggatcacataatcaatccggacgatctggttaagcaatgggtagctgaagattttgtaagtgcgacggaagggaaaagtttggatgaagctgcaaggaatcatttttatgagcttgtccataggggaatacttgaaactgaacatatcagctgtagtgatgaggttgtatcttgcacagtgcatgacatggttcttaactttatcaaacgcaaggcaatggaagagaattttgtcactgcaattgatcattctcagtctggtataagactagcagacaaagttcgacgactctctctccatttcggatattcaaaagatgcaaaggcaccagcatgtattagattgtcacaactacgatcacttgtgttttctggattttggaagtgcgggccttccatttcggagtttcatcttcttcgagttctattccttcatggtaaacatggcgaatttcttgacctcactagaattcgtgaactgtttctactgacttatttgcagattgaaggtaatgtttgcatagacttaccatcagagctccaaggactgaagtatctcaggactctgcatattggtgcaatggtgacctttttgagatcagaagttgttcatcttccgccgttgctgcacttcagacttccacccaatctagggtactttgttgacgcagggagtgtacagagtattgaagaactgaccaatttgcaggatcttcaactcgcatgtcctcagatagccacttctgaccatattaagcacaacatgaaactgttgggttcaattattgggatacttaagagcctcaaatctctaacagttgttcctgtctgcttctctgaagattctaatgataacgaaaattcaagcattgccattttcttggatttcttagataaagttccccccccttgtagccttctgcagaggcttgagttgtttccacgtgtttgcgtcttccatagacttcccagttggatcataactattgagaaactctgtattttgaaagtagcagtcatggaactcctgaggaaagacattgagactctctcaatgctgaatgccctcactgttttctcactgtatgtccggacaacccctgcagaacctatcatatttgacaagtcaggattccatgttttgaagtacttcaaattcaagtgtagtactgtatcaagtctgagatttgatgaaggagctatgcccaacctccaaaggttaaagatggaattcaatggtagcacagtggagcaatacaaccttgaaaatgtgggcttcaagcacttgtcaggtgtcaaggtcagcgcaaaaatttgcattgccggtactagtgaagctaacagaatggctatagcctctgtactgaacaatgccatcaggcaaaatacaagaatatcaagtgtaatcatacggttcatcaacagggttataaaagatcttccgattgtccccacccctcacacggatcatatgcatgaaaatctgaggctggataagagtgtcaggtcctggcctacccagtgcgatggctgcaaggagcttggtgccggccacaggttcaagtgcgagcaatgcaactccaaggtgtactatgatatgtgctgcgcaacagcgcctcacaccctgaaacaccctctgttcccaggctccgtttttcggttcctccgaaagcctctggcctctgaatgcggtagggcctgtgatgcatgtggtgacctcatgcacggcttcgtctaccactgctttgagcgtggcctcgacctccacccacgctgtgcgaggctgcctgttcgcactgcaaacgtaaagggctatgtcatggagcttcgcagggtgtcggcttgcagcagatgttgcatttgcatgtgtggcaaggagggttatcgcaacaagttttggtcctaccgctccagtcaggaaggccaggacattaacgtgcatatggcgtgtttaaaagacttggcatcaaaatcacatgaaaccctaactaaactgtatgagatcctaatgggtgaatcacagtggacgccaacagaggttttaggcgaagatacatccgaccaattagttgtcagcagtgcggaggatggtgatcgtacgccactgagacaagatgaaattacagaggagtttcagcacaaggatgaagtatgtaatgttctagagcatggacgggaggaactccggaagaaagaaaccgataccaggtaatatatagttgatttcattactaaagaacggccaccatcaaatacaactgctattgcacagttggtcaattccagagctaatggtccacgctcatcgcagccactttccaccgctgcgggttgttcactttttcttaaccctaatactctagtaattactttgcactccc

SEQ ID NO: 26770 - DNA, 1566 bp, Oryza sativa
  ref <308>: DATABASE ACCESSION NUMBER: AK102212
  ref <309>: DATABASE ENTRY DATE: 2002-08-28
ggccgccgccacctccccggcgcgggcggcggcctggaccttcgccgccgccacatgcgtcaagctcctgctcgtccccacctaccgctccaccgacttcgacgtgcaccgctactggctcgccctcacccacgccctccccgcgcggcggtggtacaccgacgcctcgtcgcagtggacgctcgactacccgcccttcttcgcctacttctcccgcctcctcgccctcccggcgcccctcgtcgacgcctccctcgtctccctccccgtccccgacgcgccgccctccttcgcctacctcctctacctccgcctcaccgtcgccttctccgacctcctcctcctcctctcctccgtcctcctgctggccacggacgcgctcacgcggcggcggcggcggccgttcctctccctcgcgctcgtcctctggtcgccggcgctgctcgccgtggaccacgtacacttccagtacaacgggttcctgatggggctgctgctgctgtcgctgcacttccttgagcaggggagggatctcgccggcggagtcgtttttgctgctctgctgtgctcgaagcacctgttcctagtggcggcgccggtctacttcgtgtatcttttccggcattattgctgtggccggggtgtggtgaggggattgggaaggttggtgctgatgggggctggtgtggctgctgtgtttgctgctgcatttgtgcccttcctgtactatgggcagatgcaacagctctttaaccggttgtttccctttggtcgaggcctgtgccatgcttattgggcgccaaatttttgggtattctacattttacttgacaagatcttcgcgtttcttcttagaagactaggcttcaacatccagatacctgaagcttcatttaccggggggcttgttggtaattcgtctccttttgctgttcttcccaaggtcactccaataactacatttttattggtcatacttgctatgtctccttgcctcatgaaagcattctctaaaccccagccaaggcacattattagatgggtgtcatatgcaactacatgtgggtttatgtttggatggcatgtacatgagaaggcatcactccatttcactattccgcttgccctaattgccatggatagcttggaggacgcgaagcattattttgtgttgtcaatagtttcatgttattcattgttcccattgttgtttgagaaccaagaatatcctataaaggttatgcttctgttgacctatgctaccctcatgtgggtaggattttcttcccattttgctgcaaaatctcctcaagaagggaagaaagtaaatgaatcaggcagcgtggtcaggaaaaatagcttcattgggtggatcagttttagctatcttttaggaattgttgctatagaattatggtctcaagtattccaccactatgtatttggcagcagatttcctttcctacctctcataatggtgtcactctactgtggtgtcggaatgatgtactcatggatgtggcaactcgcatggattgtcaggcactaatatggtctctggttagc

SEQ ID NO: 26771 - DNA, 2551 bp, Oryza sativa
  ref <308>: DATABASE ACCESSION NUMBER: AK102213
  ref <309>: DATABASE ENTRY DATE: 2002-08-28
gagatcgaaaaaaaaaaatctcacgcggctagcgagcgcgcgtgatcgactcccggccgctgcccggtgactcgccgccggcgaccgcccggcaccccgcgcgcccgcccgtcgcccgtcgcgccatgccgccgtcgacggtcgaatgtcgcccattgcggcgtcgcccatctccgcatcggcgcatcgcgccgtagcgctgcccgttgacctagctcatagggagattcgccgccggcgagcggcctgcgtcccgcccgcctgctgcccatcgcggtgccgccatcgacgctcgaccatcacccgttgcgccgcctcgctgcctccaccctccagcccacggcctcacgcgccccgagcccgcgacgccgccgcccggaggtccagcttccacctacagacgaagccacgcgtgaattgagttgagctgctatctgtcagactgtcacaagtgcaaattaacttcgattgattgatcatggataaagggtggatgaaaggagaacaatacatgatctaacatgcaaggataacataggacatgaagatgtacattctaggacaagtactcttggaaaagccagcgctggttccttaagtgctatcaagttcactaatagccaagtgctaacaacttcacggttctagcttatgaaagtaagtctcctatcccaagttcgaatgtcttttctcaagaccatggcaataactctgctgttacatgataagaaatagaactattggtctggatatattgtttcttactagtatttaagtggatttgcattgtaaaatgtagcaactcattttatggacaattataatttctgcagatacctcatttgacttgtattacagttatttgcccctagatactttcatggtgcattccccaacaattatactatatatgtttaaatcttacggattcaggatatttttcatggtgcattccctaataattcaaaatattttgggcacctactaatgattatatttacttcagtgctggcctaagaatagtaatcctgagagcaatataggatagtatgttatggttggttagctgaggaacactgagacagtaagtatcatctctttgtgtctctttgtttgtttgcattatgttctgtttaaaagagtatgtagtcatgtagaatgcaatctgactcaaatcgatcaacaatttgttactttgattatgtgcactgtatatattgtgaatctaattcatgtaattctagacttattcaacttgcagcttgagagttaaatgttttgaactgatagaaaattagaacaccattatactgccacatcattatattgcaacatcatcaaaattggaacatcttgatgggacactaaaatctgtagttttgcaataaatgcattgataaatcttgtattgatggaacattaaaatatgtagtcttaatgtatatttataatacattgctaaatttgtagtttttgcaatactgtgacttgcagctttttgataaatctagtgttataagcttggatttgttgttgtatgatttttgttttgtcctaatacttgcagtttcatgtaaagtacactaaatcaaatctttttttttaaaaaaaactagttttactggaaactggctttggttatccattattttgtctgttaaccaaacagaccagcaattttccaagaccctactagacctggtctctacaaaattcataacccaaacaacctaagtctttcctaccgatttcatatgtgttgttgctatgcatgatatcaaggcaaggcctctttttaggctggttgccagattgtaatgatttgataatcttgtatactggacgtttctttttctttatacttttgtattctttaacagagcacaaaatataattggaacatcatttactatttttaccaccacccaccttctcaggttgtcatggagcgcaaaatatctaacttttgctgtccatatcatacttcatcattttggttcttttagaaagaactttgctcaagtcgtcccgtgtttattacagcatcatatagcataataaagcatatgtatcatcagatgtttgaggtatgagttatgaattatgtatctgcactgggaatcaaatcaatagttgatcatcattaatcttttaacaacattgatcattacgatgattaaagtgcaaaaatatttcaaactctgcaggcaattattggatttcatttttggattagagacatgtacgaagattatcgttatctggcaagtgttctgatgccattggaaacaattagaagctatcacgtcaagatattcaacaactgcacatggccctttattgatttgtttgtcttttcctctcacttgtagccagtatataacttcagtgtaacagaatgttatttttttagttgtaaactgtgatgtgagaaatagttggaaagatatctaaaaaagatagcaaactgcaaatttttggtgttgaatgagcactaatattggtttgattgtaccaatatatcagtatgtaattggatgattcattggcc

SEQ ID NO: 26772 - DNA, 1696 bp, Oryza sativa
  ref <308>: DATABASE ACCESSION NUMBER: AK102214
  ref <309>: DATABASE ENTRY DATE: 2002-08-28
gagatcaagaggctacacgatggcaagcagcaacaacaagaggccacctccttacctcctcctgctgctgctggcactcggcgctgcggcgctgagcgtgggcatcctgcacaagatgagggagcgccgcgtcttctccatcctcctccaggaacgcgatcagcagcttatctcccttcaagccctcctgcagaaagaacaagaaatcagtaaagagatgaggagaaagatggatgaattagaagccaaaacatctgtcctaagcattgagaggacagaactgaaaaacaagctcatggattctgaaaccaccacgacatatctcacaaatacccagaaagagctggaagcggctctagtggaaaaagagggtcatatcaaccaaatgaaagagaatgcggctgcttcaggccctgaacaaatggcagctataaaggaacttctgcagcaaaaagaagctgagcttgaagagatcaagaccaagttgcacgactacaagaaatcagatacaaatatcagcgagagcattttggttggcacaaacaatgagaatacaacttctgacacagcggtacctgagaattctgcaaaccctggtgactctgctccagcagaagaacatcattcttacgacaatagtgcgtcagagagtaaccaagatgagagcactggagcaagcacaaacaacgaaaatgcaactgttgatactgtggtggtcgataagtatgcaaactctagtgattccacacctgctactacagaagaaccgcatccctacaacaccactgcatcagagagcaaccctcaagaaaatagttccccagaacaacactttataaagcttagaactaacagggaagatgatgaaccacaagacaaaacaacaggtgatgccaatgataattcaaatgatgctctagagggaagccacttggggaaatctgaacttcctcagtggagccccaaattggcagatagtcaagataatagcacagaagaactagatagcactagacagttggagaactcacaaggtgaggccaactatgaaagcagaggcagtaatctgctggagaaagaggtggaagccagcaacgaagttgaaccaatgaaggaaaccagtcctgagactgagctggagacttcgaaggatagcttgagtgaagccaaccaaaacagtacacaggctgttgaacctgtggctgatcctgcagatgtgaagccccgtatgcccatatataatgatgaaacaaaagagacaagcaagagacgtaggcggagaaagtttagatccagaaggaaaaagaggaccaatgctccttctaccaatgttgatggagaagtcaccaaagtaaggtagccacagcaaaaccaaaaagatacttggatttggaaaatgactgcaatgcaatgatgaatcataaaaggtatagataggaaaactgcaaaaacaattcaaaagagatgacccagatagctgccatatgctaaatagccctgaagagaaggaaagaaaataatagctaagcagctgcagttaccagtttgtagccgatggcagcacaaataatatttctgttctgaatattacactttgttttgtgtaaacactttcttgcacgacaattcatcaaaagttctgtaagcactaaatttctctctgaggttaaacatgataatccttatgattactacg

SEQ ID NO: 26773 - DNA, 3165 bp, Oryza sativa
  ref <308>: DATABASE ACCESSION NUMBER: AK102215
  ref <309>: DATABASE ENTRY DATE: 2002-08-28
ggcatgccaaccttttccgtctcctctctctctctttttgccctctgctcctgcctgcctggctgccgcgatcgcagatcgggatctcggctcagcgcgctgcggcgaccccgctgcagcttgcagaaattctggttcaacaccagccacctttcaccaatctaaagaacttgagtacagcaattgtgaagaattgagcatactgttcaaagatgggtacaaggatgccaaccttacggagattgtcagccacactgtcatcggtgttgctcgagtggatcttgatgctgctgctgttcatcgatgcggtttattgcttcttggtcaccagatttgcccgcctctgcagattgccggcaccgtgccctttctgctcaaggctagaccatgtcctgggtaatgagaaaccatgcttctacagggaattgatctgcaaaactcacaagtcagagatctcatctttggccttctgccgtctacatcagaaacttgcaggtgcccaaagtatgtgtgagagatgcagtgactcacttgtagaaaacaatgatgaccgcaccgatgagccaacaatggctgccactctacctgatagtaatcaaggattatattcccatgatacaagaatttgctcatgttgtgcacagcattatacacaacagagaccgacaatgttttctcgaatgatcacagaactagaacctgctgaggctgtttgctcaccaaagatttgcacagattattccatacttcatcaagtggataaatctttggataaagatatttgtcaccagagtgatcactccatccatgaacgatacagtgtgctgcagatgacatctggctccgaggatgaggctccctgtgctgatgatggcaaaatttcacaccatcataaaaccaattgtatggaggaagatttgaatgaagatgccactgccgagaaatttgctgcttcttccactgagttggtcaggccattagaaatgaatgttccgatggaaaccgatgttggtgactcatatgatatatccttgccatatgttcttgtagatgatcatcctgatagtataattggtgagggccaaatggaagcagaagatgcttcattagaaaaacagacatgccagcatgatcccctagctgtcaaagaagagtcaggtttgacagatgtcaatgtttcccaagttccagttgcatcaagtgtcgagtcacctcagaatcttgggtacaacgaggctgtcatggagcgagtgaaagcaccattgatccatgttcatcacagtccacaacactagaacaaaacattgctgtttcagagcacaacagcacaatagatgatctggaaggtcacaggtcagaaattactgttacatcaagtagagagtttcaccagaaaagtgcattggttgatgatgatccagttaattttagagatgaccatgtttcacaagttaattctagttctgaagctgttgatgaagctgaagattatgctaaggaggctgaacagacttgtgatatggtaacacatgaagcggcactcaaagatccttccaatacaaattccaaagatcctacagcaaaaggttttgtggaagaagctcctatatcaccacaggctattagaccaaacagtgaggtatttcagggtctcaatgtcatcgaggaacatccgcaaacaagcgcgactattggtgaaaggagaccatctctaagcactcagattagcatgaatgaagcctacaagcttgccattggtgccaagagtagcttgccatcccccaccttgactgatgtgattcttggaaaggattcctcttctagtgtaaatgaagaattgaggttactgctgtcacagctctcggcttccagaggactcgaggctccatgggtcgacccaggccctagcccacgtgcgtatgggcgtggtgatgatttgatagtgcagaacatcacgaacagaatttcaattgagagaaatgcatctggtttggagtcactggagggtagcactgtaagtgagatggaaggtgaaagtgccactgaacggttgagacgacagattgatcttgaccgaaaatctatacacctcctctgcaaggaactggaagaagaaaggaacgcttcagcgattgctgcaagtcaagctttggctatgattaccagattgcaggatgacaaggctgccatgcagatggaagctttacattaccagcggatgatggaagaacaagcagagtatgatagtgatgcgcttgctaaagctaacgagctacttgctcagagggaacaacaaatagaggaattggaagctgagctcgaaaactacaggatgcagtttgcaggtggaccaacagagaaacaatccaatcaggtctcctttaatgaagaaaacattgccgaaactttgcttgatgaaactggtcttgaagctcctgcaattaccacaccaagtggtataaattcattagtgagctttgaagaggagagggcatatatagttgattgcttgacgaagctggagcagaagcttcaatcctactccaacaacagtactaacattcacttgtcaaattcagatgtcatagaggattacctttccaacaaaatgcacgttgtagatgatggctcactgcaatgccaagaaagctcaagagaggcccaggagcccgttttcttagctaaagaagctcattcttcaacagtgagtcggaagactgatcttagcacgcttcaagaagaaatctcaaacttgaacaaaagattgaagacgctagaaggagaccgcaactttattgaacatagcataaactcactcaggaatggcaaagaaggtgtgatgtttattcaggaaatcgctagcaacctaagagaactgcgagcaattgctggtagtaaataacacgcacaacttctttttagttttttacacaacttatttgtatagcagatacccatccatcttgtaaattgtatacttggcaatctgttctagtttgagggaaattgcatagaaaaagcttgtattaaacacaaggcagacataattgtaagctgtgcatgtttttcatttttttgagctttgggtttgctcataatttttttaattgtattactccaagacagatttgttcatcttaatagcagcaaaggagtcatgtgggt

SEQ ID NO: 26774 - DNA, 3090 bp, Oryza sativa
  ref <308>: DATABASE ACCESSION NUMBER: AK102216
  ref <309>: DATABASE ENTRY DATE: 2002-08-28
ggcagatttctgcacatgaggcatctctctctcgaagtatcgtgttttgatttgggcaggtatgagcaaaggtccctcatttcttcctcttttctaaatccttgaggagagcagtgtgatttaaggtttcagatgccttgaatccgctgtgatttgtctgaatttttgttagttaattgatgcccaatttgttggctgagattgcccctggacaccaactagggagctattgctttaattgatgcccatttgctggctgaggttgcctctgaacaccagctgttgctttagtttgttaggggaaatgttgctttagtgtctgaaatgtttagtcttggcctcttggggtaaattaatatttcagcttaaaattaagatttcagctattgcaatttgcaaggagatatattctttgataaatatatatcttggcatttctgctagataatgctgacgcgtgcctcttctaagaaacttgcagtgttctgcaaactgagagtctgagataagctgataactcatctagtaattgttgttctgaagcaaagggaaatactttctttactgttcataagctctcagtaacttaatctgaggaagcaggtttaaccaaccactgacatcttattaattgctagtgctagagatttgcaaagtttcagataacaaaagtgagcaattgatactaccctcctccactaaagctactttttataccagtttattctgtatctaaaatatctgaacttcagttgactggattcgatttagtaacgagctcaggtagctttctgaaccaacctaactcctgtatttctactctgaatttctgatggattacaactattcctaattattcattggtcgtagtagtcagatggattacaactattcctaattattcattggtcgtagtagtctttcgtcagaagatatatatctgtacataacccaatatcttcctcatcagagacagtcgttgcaaactttgcaggtagccagccactgtgagagtgtgagctgaggtgagcatcgccatgggagaggttgcagaagacatctacacccaagatggcaccgtggacgtcaagggcaacccggccaccaagaagaacaccggcaactggcgtgcctgcccctacatcctcggtaagtaacaacatcttcctcgtcgattgccaagcttgttcgtctccattgatggtgagatataagcgagtgaagtgactgatgtttgcaatggtttgatcagctaacgagtgctgcgagaggctggcctactatggcatgagcaccaacctcgtgaactacatgaagacgcggctcgggcaggagagcgccattgccgccaacaatgtcaccaactggtcggggacttgctacatcaccccccttctcggtgccttcttggctgatgcctacatgggcaggttctggaccattgccagcttcatgatcatctacatcctggtaactaatcgtcttggatttcagtttctgattgctatgatcgatggtgtgatcgaagagagagatgttttgatggttgcagggtttggcgttgctgacaatggcgtcgtcggtgaaggggctggtgccggcgtgcgacggaggagcgtgtcacccgacggaggcgcagacgggggtggtgttcttggcgctgtacctgatagcgctgggcaccggcgggatcaagccgtgcgtgtcgtcgtttggcgcggaccagttcgacgagaacgacgagggggagaagcggagcaagagcagcttcttcaactggttctacttctccatcaacatcggcgcgctggtggcgtcgtcggtgctggtgtacgtgcagacgcacgtcgggtgggggtgggggttcggcatcccggccgtcgtcatggccgtcgccgtcgccagcttcttcgtcggcacgccgctgtacaggcaccagcggcccgggggcagcccgctgacgaggatcgcgcaggtgctcgtcgcgtcggcgaggaagtggggcgtcgaggtccccgccgacgggtcgcggctgcacgagacgctcgacagggagtccggcatcgagggcagccgcaagctggagcacaccgggcagttcgcgtgcctcgacagggcggcggtggagacgccggaggacaggtcggcggcgaacgcgtcggcgtggcggctgtgcacggtgacgcaggtggaggagctgaagagcgtggtgcggctgctgccgatctgggcgagcgggatcgtgttcgcgacggtgtacgggcagatgagcaccatgttcgtcctccaggggaacacgctcgacgccagcatggggccgcacttctccatcccggcggcgtcgctctccatcttcgacaccctcagcgtcatcgtctgggtgccggtgtacgaccgcctcatcgtgccggcggtgcgcgccgtgacggggcgcccacgcgggttcacccagctgcagcggatgggcatcggcctcgtcatctccgtcttctccatgctcgccgccggcgtgctcgacgtcgtcaggctgcgcgccatcgctcgccacgggctctacggcgacaaggacgtcgtgcccatctccatcttctggcaggtgccgcagtacttcatcatcggcgccgccgaggtgttcacgttcgtcgggcagctggagttcttctacgaccaggctcccgacgccatgcgcagcatgtgctcggcgctgtcgctcaccaccgtcgcgctaggcaactacctcagcacgctgctcgtgaccatcgttacccatgtcaccacccggaacggcgccgtcgggtggatcccggacaacctcaaccgcggccacctcgactacttcttctggctgctcgccgtgctcagcctcatcaacttcggcgtctacctcgtcatcgccagctggtacacctacaagaagacggcggattcaccggacgacaaggccgagcacgccggagcaaactgagccacgaggtgaagctgattatgacatacaagggggaattgaactgaattgtggcgtgtgaatgtcagaatgtgtggggttctaaacaagttcttgggagataaaatggaaaggaaattagtgtc

SEQ ID NO: 26775 - DNA, 1963 bp, Oryza sativa
  ref <308>: DATABASE ACCESSION NUMBER: AK102217
  ref <309>: DATABASE ENTRY DATE: 2002-08-28
ggcccgcgaattgcaaaattttttggcccattagggcacgattgcactagacggggagacgtcgctgggcagcgagacggcaacgcagccgccgctactctcgtcaccgacgccgacttactcgtcgcccatccatccagcagcgaacgccgtccatcgctgcgatgctgcccatgctgccgcctccagctctaagggctccatcggcgtgggagcaggcaactacttcgagctccattggcagatctgccatggaagagagttgcagttccaattggccggccacaccttgtgcagcagcgacgacggccgataaatcgaattgtacagtgggtagcactaataactccccctctgaacaagttggccatggcgattcactgatttattcactcccgtaccttcctgaggacatctggcgtcacatacattccttaatgccgatgagtgctgctgctcgtgctgcttgcctttctcattcctttctgaattcctggagatttcatcccaacctcagcttgaatttcaaaacactttgcccgaggacatctaggggaaatttcaagtgcaaaattgacagcattctgagaaaccacttgggcactgcgaagatattgaagcttaatgtagctgatgaggacagtacatatccttacattgatagatggcttgaggttgctgttacaccagggattgaagagctcactcttacgctacataaaaagtacatctttgcatgctcacttttatctgatggtgttcgagactcaattcgatgtcttcagcttaccttctgtgccttccatcccatggctgaacttggccccttgagaagcctaacaaaactgcatctgtgtggtgtgcatattacaggtgacgagttagagtcccttcttttgaactcccttgttttggagcagttgagacttaatgtatgcaacaagataagtttcctgaagataccgtgtgtgctgcagcatctcagctgcctgagtgttatggcatgccgcaggatgcaagtgattgtgtgtgaagctccgaatttgtccagtatttcccttagtggagggatcaagttctcacttggagaaacactgacaatgaaggtcttgtccatgatccgaccgaatgtcgtgtgctatgctcgtgctcagcttccatccattatgccaaatcttgagagtatggtattaagttcagactctgaggcagtcaatataccaatgctgcctaccaaattcctctgcctcaagcacctgaccattcagattgcgcgagggaccttttccccatcctatgattatttctttctggtttctttccttcacgcgtctccttccttggagactttatacttggatgtttttcaggaagatatgaggcatgaatcgattgttgaagattcttccgcacatttgaggcagctgcccgagctcagccatgaatgcctgaagagtgtggagatcatagggttcaactccgcgaagagcttggttgagctaacatgttgcattgtcaaagccgctgcctcacttgagcgtcttgtgttggacacacttagaggtggtgataggtgttctggggaaagtaatgggaagatttgctggcctgttagcaacgctgtgctcaaggaatccgcaagagctgccattgctgtacgaaggtacatcgaggataaagttgcacctacaacaactctgactcttgtggggacttgcacacgctgtcattcccttgcctttggatgatccctatgctgctggaaggtggaagatgtcataacttatcttagttgtgatatgtatttcaataaatgatagtatatgttagtcataagatctttgtagtttcatctttaactatcccttattattttcttaagactatgcgataagctatctgaaatgcacaatgttgtcgctttaatcaaattatagataaaccatgctttgtttcttggatt

SEQ ID NO: 26776 - DNA, 3325 bp, Oryza sativa
  ref <308>: DATABASE ACCESSION NUMBER: AK102218
  ref <309>: DATABASE ENTRY DATE: 2002-08-28
gaattacgccgcggcgaggaggagaggggcggcgacgcggcgcggcgagggggagaggtgaggagaggagaggggaggggagatgcgggaggaggtgaggagctcgtcgggggcggcggccgagccgcctcctacgccggttgcaagttctgcaggaccctcgtcacctgctatgcaagctaatgttgccagcatagattggtcgggtagcagacaagcttccagagttgattcctcatcacatgttgctccgcatgcccatcagccttctcatagtttcgatgccactggaactgctttggattctgcaccgtcatgtaggccatgggaacgcggagacttacttcgtcgactggcaacatataagcctacaacttgggcttctaggcctaaggctgctagttctttggcttgtgctcggagaggttgggttaacgttgacatggacaaaattgaatgcgagtcatgtggtgcacatctcatattcagtacattgacatcctggtctccagctgaagtttcaaatgctggagaagcctttgccgagcagcttgatgcatcacaccataatagctgtccctggagaggcaatagctgtgctgacagcttggtgcagctccacctaacacaatcagcccttattgggggttttaaagatcgatgtgatggacttctgcagtttacttcccttccagtgattgcttcatcagcaattgagcacatgaggctgaccaggagttcccagattgaccgcttattatcccaatcaattacctttttatctggagagcttagttacaaagcagagagcacaacaggaattgatatccagcaagattcctcttgtagctactcaaaagctaggaagcttataagcctttgtggatgggagcctaggtggcttccaaatgttcaagactgtgaagaaaattcaacccactcagctaaaaatgcagattcggtggaaccattttttccccgttttgctgaacatcaaaaaaattcattctctgggtcagccaaaaaagataaaggaaaaggcaaaaggccactcaaagactctggatgtagcatgagatcacctttgttagattgtagcttttgtggctctacagtcaagatctgggactttagatctgtgtcacgtccttgtcgttttagtccaaataacattgatgcacctgaaacaggcaagaagcttgctctgacacgtggaattagcgctgccagtgggatcaatgaatgggttactgatgggatggaaagagatcctgctgaagggcgtgatgaagaagcaacaaatgagggtaaatcattatcaaatgctggagtggacctgaatctaacaatggctggaggattaccatcaattcaatcttctatacgaattgcatctgagcgtttcaacggaggattgggaagagatctgatgattggacaacctactggaagtgaagttggtgatcatgcaacttcatacgagtcccgaggtccaagctcaaggaagcgcaaccatgaggaaggtgggagcacagttgacaagccacaggacaggcttcagcatgctgatagcatagaaggaagtgtgatagatcgtgatggtgaggaagttgatgatgctgcgcaagattcggacatcccgaataaaaggtcacgtgggtttgatctatttggttcctatcttccatcttcttctggagctggtcccagtagaaacttttgctttgatcctgatgcggatgctggtaaattcagtcatgctagagctgcaggtctagccgctgttgacagagattctatgagggaatcttctgtagctgcaatggatactgttcatagtgctgatgaagactccatggagagcgttgaatactatccaggtgatggtaatgatattgacatgccctcatctagtgcacacagaaatattgaaatggatgatgtcttgggcctgaactatagtaaccaagcacagcaaagtgcatgtgtacagcctgcttctggaagtgatggaagggaaataggaggaagcagtacaaatgaaggggaggaagtccttgatgcagtaacagcccctgcttttgcaagggatcaacttagtgtaggaattagcggtggtagtgttggcatgggtgctagccatgaagctgaaattcatggaattgatgtttctttgcaaagggctgaaagtgttgtaggtgatgcagaacctaatactgagctaacagagacgatgggtcatactggtgaatcagttcctggacctggactaatggatgagtttgtacctgacgaagttgatcggcaagaacctcatggagatagccaagatatggtgtctcagtcagtcggccaagctgacagtggctcaaaaatttatggttccactaaagctgattctgttgagagtggagaaaagataggagggcatgctgttggtcatgcaagcaggatgcatccttctctttcttgcaatgcagggatgcagaccggtttggatgtatctaaagaggaagtgacacaggctggcaaactattgatcgctggtgatgtgccaatggggttagattatgaccctcagaatggattaggagcaacaaatggagaaaatgattttgaatcaggacttccagaatttgatcctgttaagcatcacaacagttactgcccatgggtaaatggaactgtggcagcagcttgctgtagcaacactgaatcaagctcaagtagttcaccactttctggctggcaattaacagttgatgcacttgacacattccaatctcttggtcaagctcaaaatcatgctatgcgatctgattccgcagcctcgttatatatggatgatcatgtaactcctaaccacaagctcgccagaagggcatcagtgagcagaagccatgggaaatgctgatttgaggcccttccacgcatgctagcctttactaatcacccaagtttgcagcaatactataccagtaatttcacagcttatccgaatcaaaaagaaaaaaaaataaagacacagcttctcaatcataagtaacattcgccagagatccaatttggcacatcgaggagcgtatttacatgtaattctttctgaattatgttgggttggacatcatccccagtatgttgcgctgcccatgatcagacaggataaaccggctaattaataatccatgttagttacaccgtgtgacctatatagttgttgctcagaaaccggcaatttgatgtggtgtccaaacgataatatcatagtactgtatttattctgaaagagtcgattcaatgaagttgtccccagattgacatgaac

SEQ ID NO: 26777 - DNA, 1286 bp, Oryza sativa
  ref <308>: DATABASE ACCESSION NUMBER: AK102219
  ref <309>: DATABASE ENTRY DATE: 2002-08-28
ggatggcacaattcctgactctttcgtcaatttgaaaggtatttctgagattgatctctcccgaaacaacttgagtggggaaattccaaacttttttcaatccttcaattctttgaagcttctcaacttgtccttcaacaacctagaaggtcaaatgccagaaggggggatatttcaaaattctagtgaggtatttgtccaagggaacattatgttatgctctagctccccaatgttgcaattgccactttgcttagcatcatctagacaccggcacacttcccgcaatctaaagataattgggattagtgtggctcttgttttggtctctttgtcatgtgtagcatttattatcttgaagaggagtaagagatctaaacaatcagatcgccattcattcacggagatgaagaacttctcatatgctgacttagtcaaagcaacaaatggtttctcttcagacaacttgcttggctcagggacatatgggtcagtatataagggtatacttgactctgaagcaaatggaattgttgctatcaaagttttcaaccttgatgaacttggagcaccgaaaagctttgttgctgagtgcgaggcctttagaaacactcgtcatcgtaatcttgtgagggtgatttccgcatgctcgacatgggacaataaagggaatgatttcaaagctcttattattgaatatatggctaatggcaccctagagagctggatttattccgaaatgagagaaccgttgagtttagactccagagtaacaatagcagtggacatagctgcagcattggattatttacataaccgctgcatgccccctatagtccactgcgatttgaagcctagcaatgtgcttctagacaatgccatgggtgcccgtctcagtgactttgggttagcgaagttccttcccactcacaattccacaagtattactagctctacaagcttagggggaccaagaggctcaattggatatattgcaccaggtaaccacattttacatgatttgtctctcctcttgaacaggaaattattattttaataggtgcggtgtccaccagcaaattttcaacttttgggagtgttttccctccaaaagtcacttcgtgccgtgtcctaccgcaaaaaccgcgaagtcacagagtcttgtagcaaaatttaccctttttttttctttcatcctaagggctgtaatttttttctctactatatttaatgaaatagcacaatcttgtacggatttatttttaaaaaaaacttctgttatgtgc

SEQ ID NO: 26778 - DNA, 1580 bp, Oryza sativa
  ref <308>: DATABASE ACCESSION NUMBER: AK102220
  ref <309>: DATABASE ENTRY DATE: 2002-08-28
gccacacgcctgaaatccccaccgaaaatgacgccgccggcgagcacgggcaagtgcaccggcgccgccgccggcgaggtggaggagccgctgctgccggagttctctggcggcgggcatggggcgtcggtctccggcgcggtgttcaacgtgtcgacgagcatcatcggcgccggaatcatgtcaatcccggcggcaatgcgggtgctcggtgtgctccccgcgctcctcctcatcgccaccgtcgccgcgctgtccgacgcctccgtggaattcatgctgcggtacacgggctgggacagcggcccgccgtcgtacgccgggatcatgggcgacgcgttcggccgcgccggcgccaaggcgctcaatgtctgcatcgccttcaccaccacgggcaccctcgtcgtctacctcatcatcatcggggatgtgctgtctgggagcgcaggagcaggagacgagcacgccggtgttctgcaggagctgttcggagcgcagtggtggacggcgagggagctcgtcatactggtcacggccatcgtcgttctgctcccgctcgtgctccgccgccgcgtcgattcactgaagttcacatcagccgtgtccatcctactggcagtggtgttcatgttcatcagcctgggcatcgcggtgtacgccctcttcaccggcacagcgaagatgccgcggatgctgccggatttctcgcgcctctcctctccgttcgagctcttcaccgccgtccccatagtcgtcgtcgccttcaccttccacttcaacgtgcacccgatccgaacggagctaagcaagacgtcggacatgaaggcggccgtgcgcatctccctcgtgctctgcgcggccatctacgcggcggtggggttcttcggcttcctcctcttcggcgacgccaccatggcggacgtgctcgccaacttcgaccgcagctccggcgccggggtcccgcaggcgctgaacgacgcggcgcgcctcagctacgcgctgcacctcgtgctcgtcttcccgctgctccacttctcgctccgcgtcaacgtcgacgagctcctgttcccggggcggcggccgctggccacggacacgcgccggttcgtggcgctcacggccgtgctcatggcggtgctctacgcgctcgccatcgccatccccagcatctggacgctcttcgagtactccgggtcaacattcgccgtctgcatctcgttgatcttccccggcgccatcgttctcagggatgctcatgggatagcaaagacgaaggacaaggcattggcagcgacgatgatcgctctggccgtgatcacgagcagcatcgccatcgcctccaacgtcatgagctccatcagcggcaaggtggaaggaggccatgccgcaggtaggtagcatgtggtatattggtttgctgtccgacagcatcaagattcaaggctactgcccctgtagcgttcctctgttttacattttttttaaaaaaaaggaaaaaaaacttgcagggattgactcgtaacaatgtatacttgtgtgttgtaaggatttagcggcgagtcattgttgtatacttttac

SEQ ID NO: 26779 - DNA, 1994 bp, Oryza sativa
  ref <308>: DATABASE ACCESSION NUMBER: AK102221
  ref <309>: DATABASE ENTRY DATE: 2002-08-28
gccacccgccttccctttcctctcttctcctctactcctcgccttcttcttcttcttcttcttcttcttcttcctcttgctgttcttcgctcgcgcccgcccaccactgcaactcctcgtctccccctccgccgcgttgccgggtggagttgccttgcccgagaggagcgggcacttcgggtttgtgagagtgagagctctgtgcagcggacaggtttgaggcggcggcggcggggctcccactcggccgaatggactgctagtagcggttgcttctatgtgtacagtatctaaccttctaaccattttcaaaggaggtcatattttgtagggcatcgtatgccttattatctggcattggctggtttagatgtcgtttcgtagcatagttcgcgatgtccgggatggttttggaagcttgtcaagaaggagctttgaggtgacccttgcaagtctttatggacttactgggcatcacaaagggaagactcagagctcattggatgagctcgatgactcacctgctataatcccagagagccgctgggcaagtcttccgcccgaactcctccgtgaggtcatacggagactggaggctgatgagagtacatggccatcccgaaggaatgtcgtctgctttgcagctgtttgtaggacatggagggaaatgtgtaaagagactgtgttgagcccagagttttgtgggaaacttacctttccggtctctataaagcagcctggtcctcgagatggtatgattcaatgttatataaagaggaatagatcaaaatccacctaccatctctatctgtgccttagcaacgttgttactgcggaaggtgggaaattcgtcttagccgctaaaagacaccgtaaaacaacttgcacagagtacactatttcaatggtttctggcaacatctcaaggtcgagcagaactaatattggaaaattgaggtcaaatttccttggcacaaaatttataatttatgacacacagcccccttacaatggggctgtagtccctcacgtcggaaggaccagcaagagatttaactcaacgaaagtttctccgaaggttccttctgttacttataacatagctcaggtgagctatgaactaaatgtccttggcacaagaggtcctagacggatgcgttgcatgatgcactccatacctgcctcctcggtggagcctggtggcatagtccctggccagcctgagcaaattgtacctcgagctctggaggactcatttcgcagcaccacctccttctctcaatcattccggagcaccacctccttctctaagtccatcatggacccatccatggatttcagtagtgctcgcttctctgacatcagtggttctataatgggtggtgatgacaatggtgaaatcaaggagaggcccttagtgctccgtaacaagcccacgagatggcatgagcagctacagtgctggtgcctgaacttccgtggccgtgtcaccattgcctcagtgaagaatttccagctggttgctgcaccaagccctcctcctgctggtgctccaactccttcgcaacctggtccagccgaccccgaaaaggttattctgcagtttggaaaagttgcaagggatatgttcacaatggactaccgctatcctctctctgccttccaggctttcgctatttgtttgagcagtttcgacacgaaattggcatgtgaataattgttggaagaaggaaaaactgaagaagggcaagaaaagagttcagatgtctggggataggttactagttgatgtttgcatttttttttcttgttttctcggttgtaattgtgcttgttgtagccttgaactagacgtatatgcaggaaagcatgcttttatgtgccctcatgcatgatagaggtaaggagccacatatcatccactgatccatactccatactgtgatgatgtatctgctgtgccattgccaacacaactgtgaaaggttccctcc

SEQ ID NO: 26780 - DNA, 3502 bp, Oryza sativa
  ref <308>: DATABASE ACCESSION NUMBER: AK102222
  ref <309>: DATABASE ENTRY DATE: 2002-08-28
gggggttaaatcatcccaccaacaccaaccaaaccaaccaaccaacctccccacaccgccgccgtcgcgtagcgcccgcccacccccgcgctcgccgccggcgggcgaacgctcgccatccgcccgcatcgccataggattcatcaatgttgttatcctctgaggcttcctttgtaataagaaggcagtgatcaatttgtttgacctgagtaccgggatgaccagcaaaaatgtgctaactgatagaactcacagagatgcttgcatctttcaggctctcgagttcataaaagccggcaagatgtcaatagaactgttgatcccaaaataggttgtgtagaggacaaattacaggtagtagctagtactaggaattcttcaagcaacaaatcaaccatatctccaatgaacagattagtagcaatggagatgtccaaaggagtggaatcaaagaggaagccacctagtgtcgttgccagactaatggggcttgatgatgatctacctgctaaagaaccagcattacaatcttctagaagaaatttgcggagaagtcattcacttgataatttggcagcaacaaacaggccccaacaacagcaagagcagcattacagcaggacaacaccaaacatacacataggccccaaagagacagttgaatttaaggatgtgtacgaagtctctgaagatccattaaagagacatcatattctggggcaaaattttccttgggaaagatcttctgggaacaagagtgacactaggatcgaagctgttcgacagaagttcatggaagcaaaacgccttgccacaaatgagaatctcatccattcaaagcagtttcaagaagctcttgaggttctaagttcaaacagggagttgtttctgaagtttcttgaagaaccaagccctgctttcttgaagcagctcgatggacttgacacaacgcctgcaccgcctccgacgaagcgtattacagtgttgaagccaatcaaatctgttgagaacaatggaataagagaaaccagaacacaccaagttattaatgaagaaaatgaacttgtgatgggaaagactcaccagagatcttactcagcagatgacaacttctccaagtcaactaggatagtggtcctaaagcctagccctgggaagcctaatagaacaggagccaggctaactgcccgagcagctccatctgaacaaactcggcggatcgacttccatggaggtttacaagatgatgcatccatcctaggatctagggaattactgcatggttcggttcagcacatgccagagagtcgtcatcggcgggacgaatccctgatatcatccacatattcaaatgggtatggtggagatgaaagctctttcagtgggtcagaagttgactacattgatgaaggaggtagcccaagtgactcagatgcagtcagtccaatgtcgcgacattcatgggattacatcagaagacacaacagtcctcactcagcctctacttttagcagggcccattcacattcacctgagtcatctgtgatcagggaagccaaaaaacggctttcagagagatgggcaatggtatcatacaatgagatcaatcaagaacaagtacctttgcgaaggagctcaaccaccttgggtgagatgctctcccttcaagtagctaagaaagaagaagctgttgctgggataatttctgtttcaagcaaccggtcaagtggcacagaaaatgagttggccatgaaagatgcatgcaaatctactttaagagagtacgatgaaaatgggaagagctctccaaggaatttagcaaaatcaaaatctgtcccagtgtcttcatctatatttgacaacgtagcagtgaatgctcaatctgcaaattctgaagggactccgaaggtgtttacaaagtcaggtagagcaaaattatctttcacggggaaaatatcaagttttttcttcccaggcaataaaaggccaacaaaagagaaaacttccctctcatctgatagctcaggcgagatatttggatgtatcgggcacatggtgccgcagtctgatcacaatcttggtcctgatgaacaaatggctttttgcaaggatgaagctgataattccaccaatcatgctccctgttctacaaaagatgctggttccatagaagtacctgtatcttctgactgtgtaagtggagatgttgatgaagtaaaatcaaatggtgatctaaaatctatccacgatgagactagtcctacttcaattcttgacacggtttttgaagatagcaacagtaatgaaactgaatcttcaagaagaacttcctgcaccgagagggttgccttacgatgccctgctatcgattctgttgcccgctcattttcatgggaagataccaactcaggttctccgttgctaggtggcctaaagcattccaatgtagatgatgccgattatgatgatgatgaactaaaatgttactctcttgtacaagagatagtatcatctgctggattatgccatctgcagttaagtatggtcttcacagggtggtacctgcctgaatccccccttgatcctgcattgtgtgacaagttcttggatcgcaaggaggaggatgctaaatcgagggagcgaaggtcacaccaaaagctcattttcgattgtgtaaatatggccttggttgagattggccaggatacgttactatgcagctatccatggagtagagcatgcttaagaacatggagggagaaactatctgaaaccttgggtgaagaagtatggaacatcgtgagcgattggctttatggagatgggagctttgcggtaaacaaggacgacaatgctggaataatcttggaaagaattatgcaggaggaggtggaagggaagggttggattaagctattgacaatggaaacagatgagatcactgagcagattgccagtgaagtgttggaggacattgtcacagattctgtggagcatctgtcaatttgttgttcagagcatggcatttcaatgccagtagcaaatctgtaggaagcaatttctttcatatgagcacttgccttgaattttgttgtgctgaaagaattcctcagcagcttcatagattgtatataagtccatgtagttgcttactcttgcttctgcttatacctacagctcagattggccaaaatcgtgcagttctttactctgtagatgtcctactggtcaaattgggttagtcagaagtctaacaatagcatatggtgtcagtagtattgtagctttttgggaagcgaaatactaacttttagtggccgtgtgtgtttgactttgaggtgcagcagaacactgctccatatgaccatatgctgcaaagagtattatataatgcattccggcgccagttggcagcatcctggtgtcttgagctctatgtcaaattcgtcaatctgaacgtctgaatataaaattgaaacgagggcatcttaatgtcccaacc

SEQ ID NO: 26781 - DNA, 1275 bp, Oryza sativa
  ref <308>: DATABASE ACCESSION NUMBER: AK102223
  ref <309>: DATABASE ENTRY DATE: 2002-08-28
gacccaatctcccggtgcgcagcggcgagcgacatggagctccgcgagctcggcgccacgggcctccgcgtcagccccgtcggcttcggcgcctcccctctcggccatgtcttcggcgacgtcccccgcgacgtcgcccgcgccgccgtccgccgcgccctcgacctcggcatcaacttcttcgacacatccccgtactacggcggcacggtgtcggagtcggtgctcggggactgcctccgcgccgcgggcgtgccgcgggaccggttcgtggtcgccaccaagtgcgggcgctacagggaagggttcgacttcagcgccgcccgcgtcacccgcagcgtcgacgagagcctcgcacgcctcggcctcgactacgtcgacatcctccactgccacgacatcgagttcaccgacctcgaccagattgtgaatgagacgattccggtgctccagaagatcaaggagagcgggaaggcgcggttcatcgggataaccgggctgccattgagcatctacacttatgtgctcgaccaggtgccgccaggttctgtggatgtgattctgtcttactgccactatgggatcaatgataccgcgcttgtggatttgcttccctacctgaagagcaaaggtgttggcgtgatcagtgtttcacctcttgcaatggggcttcttacagataacgggccacccgaatggcaccctgcaccgaaagaactaaagttggcatgcagggcagcagcagatcactgtaagaagaaggggaaaaacattacaaagctagctatgcagtacagcttgatgaacaatgagatttccacggttcttgttggaatgaactctccagaacaggtagaggagaatgtggctgctgcaattgaattgtctacttccggtattgataaagaacttctgcacgaagttgaagcaattcttgagcctgtcaagaacatgacctggtccagtggcattgagcaagcctgatatctggcagcagcctggctcattataattcattcatgtattcattgagtcaattgtttgcattgcaatatttcaatggtgagcaaaggaaagtcatcatcggaaattcgttggtatgttgtctgtatcaatttagaagtctgtgaatagacaaacagccaaacatggatgctgataataatggaataagttgtgcccatgcaccttgctgtaatgaggcttgtatattgcttcaactacaaactgtaccaaaaaacaaattgcaaaccaataatttgccgatgcaaaagg

SEQ ID NO: 26782 - DNA, 2187 bp, Oryza sativa
  ref <308>: DATABASE ACCESSION NUMBER: AK102224
  ref <309>: DATABASE ENTRY DATE: 2002-08-28
gatcctcttcctcttgtttttcttgctgcttgtccctatctttttgttgcattgaggagctgatgagctgagctaatcagggcagaacaaaggcaggaggatatagttttccaagatcctagggccggcctgcatcaaaaagaaggatgcatccgagcggcggcgcgctgtcggtgccaccggggtttcggttccacccgacggacgaggagctcctctactactacctgaggaagaaggtggcctacgaggccatagatctcgacgtcataagggagatcgacctcaacaagctcgagccctgggatctcaaagatcggtgcaggatagggacggggcctcagaacgagtggtacttcttcagccacaaggacaagaagtacccgacggggacgaggacgaaccgggcgacgacggcggggttctggaaggcgacggggagggacaaggccatcttcctcgccaacgcctgccgcatcggcatgaggaagaccctcgtcttctacgtcggcagggcgccccacggcaagaagaccgactggatcatgcacgagtaccgcctcgaccaagacaacgtcgatgtccaggtatatatatatatatatatatatatatatttgacatcagcaaaaaccatatgcaacattaagttcacgatatacatacttagcatccatgaaatgccaaagtcatgcatgatatcacgactcatgagtactggtactccctccgtccaaatatataagtatttctagctatgaacttgaacaactgcgtgtttagattcatagctaaaagttactatattttgggacgaattgcagttatgctagttttgctatttatcagtcatctagaactttgttattttgtcagttacctacatgaatttgtgtgtactatgtatatgcaattggtggttgatccaaagagaataaagtttcaggctgagaattagtaaaaagggatatgtgtgttgtacagaaagattcaccttcatggaaccttgcatatatagctcaagggtttcttgctactgagattgatgaactaattaacagcttaattaatttactgagattcattgtctgatctgaaaatgaaaatacatcattgcaggaagatggttgggtggtgtgtagggtattcatgaagaagagctaccagcgaggcctcaacccggcggacatggcggcggtcgacgacgacgacctcctccaccaccaccaccaccccttcccaccggcccagctccacggcggcgccgccgaccacaagcacgacggcgccggcggccaccaccaccaccacctcatgcagccgcaccaccactacgacgacttcccttccttcgacccctccatgcagctcccccagctcatgagcgccgaccagccgccgccgccaccgccgtccctcctccccggcgtcccaccctccgccgccgctgccttgagctccctcgacgtcgagtgcccccagaacctcatgaagctaacgtcggccgccgccggaggcggtgccaccgggctgctccacgccggcggcgaccaccgcttcgccaccgccgccacggactggtccatcctggacaagctcctcgcctcgcaccagaacctggaccagctcttccagggcagggtcatcgccggagcgtcgtcgccggctgccatggctgctcctagccaccaccagcatctcatggatcagctcgccggcggcggcggcggcaccgcctcgtcgttgcagaggcttccactgcagtatctggggtgcgaggcagccgacctgctcaggttctccaagtagagagattatccctccatgcatgcatggatcacttgaactaagctagcttaattagctgccaccgataaatgagcagttgatgatggtgatgatgatctgaatgatcagctcatgtttttttggttagactggttaatttgatcttccttttggtatggagcttaatgcttccaagtgtatatacactctatgctatgctatgctatgttttcccatgtgcatgcatgcaaatgtggctttgaaacctaattatacatgcatgagaatacttaattaatatttctgattttcccatgcatttttggatttaagtgttgcttcttaattaggatgcttcataattgctggctgatgaatgagaaccgatattaatttacc

SEQ ID NO: 26783 - DNA, 2012 bp, Oryza sativa
  ref <308>: DATABASE ACCESSION NUMBER: AK102225
  ref <309>: DATABASE ENTRY DATE: 2002-08-28
gtcttttctcctccaaggtgaccacctcctccccaccgccccccacatccggttccccgaggttgcagcctctgcagccttgcgaggatcagatgaacccatcgtcaccagacgaattctccaactgagtactctgctcccataatcctatttatccacacagcgaggggcactgcaagaagcatgcagtgcccaatggacgcagctgcaagtggaacttcgcctgtgatgcagttccatggcattgttgatgagccaccctcccattcatctccgctgcacacggcgctggaacgttcgcagcgccattgctatggtcatgaaaccccaggagaattcccccttgctgtgagcccctccattgtgctacatgtgctctccacctgcgagctagatcctaaagatctcgctgcactggaggctacatgtacattcttcagtaaacctgcaaatttcgagccaaactttgctctatcgcttccagaggttgcggcatttgatatgtgccataaaagacccatggttaagctaatggcacagcaggaacgggagcaactgaagcagaggtgtggtggatcttggaagcttgttttcaagtatattgtggctagagaaaggaattactctcggattgtcgccgggccgggccatagtattgttgtcaccacaaagggagatgcatactcatttggggctaattgctggggccagcttggccttggggatactgaagatcggttcaagccatgccttattaggtctttgcaaagcatcaaaatcacacaggctgcagttggatcaaggcagacaatgcttgtgagtgacacaggaagtgtctatgcatttgggaagggtagctttgtgtgggaagagctttctgatgcagctgatcacattaccactcctaagatagtggagtcgctaaagggtgtgtttgtagttcaagcagccattggtggttacttctctgcgtttctatctagagagggtcaggtttacacgatctcgtgggggcgaaccgagaggcttggccatagttcggatccttcagatgttgagcctcgtcttctctctggaccacttgagggtgttcttgttgcacagatttctgctgggaattgctatctccttatgttggcctaccagccaactggaatgtcagtgtattctgtaggctgtggtttaggaggcaagcttggtcacggatgcaaaaacaataagggcacccccaagttgattgaacatttcctgacattgagctttaatccggtttcagttgcggctggcacttggcatgctgcagctctaggtgacgatgggcgtgtctgcacctggggttggggccatactggttgtttgggacatggcgatgaggagtacagggttctccccactgtggttcaaggattgagcaatgtgaaggctgtgcatgtctccaccggtgaatacaccacctttgttgtctccgataacggcgatacatactcctttggatccgctgaatccctgaatataggtttccaggaggatgaggaagcagcagatgatgcagatttttctaccccaagcttggtagaatcactgaaggtgttgaatgataaggctgtacagattagcacaacaaattcttcatattggctcaactcagaaatgggatacccgcatacgttcgcgctcatggaatccggtaaactgtatgcctttgggggagggatcaaaggccagcttggtgtcaagctctctgagggtcaagaaagagctcagaacccagagcgagtcccgatcgatctctgctaatttcaaccagcattctggtgaccatttgcaatgacatattctgtgatctgtggttagcatgccctcctgaatttcataggaggaactcaaatgttagcatcgatgtaaatactaggggcacttacctttggttcttctctgaagtaacagtgtggttgttggtagttcttgcattttgaattgttggtgcagccaagtcctgaccgagtcttctg

SEQ ID NO: 26784 - DNA, 2293 bp, Oryza sativa
  ref <308>: DATABASE ACCESSION NUMBER: AK102226
  ref <309>: DATABASE ENTRY DATE: 2002-08-28
ggcttgactagctggtggtttggttgcattgcgttgcatcccccacgcgcacgcggccatcaccacgccgcctccacggcggcaacgacaacgacaaggcttccctgcgagcgcgagcgcgagccagccatctcgtactggcacccactctctctccctgcctctctgccaatggtgaggcgaggccggggagggcggtagcagcagcagcagcttctcgtcgagtggcggcggcggcggcggcggaggctcgtgggggcgggtggcggcgtgcgcgaggggctggggatggggagtagcggggaggcggtggcggagtgggggaaggagggagagggaggcctccggcatcggtggcgggcggaggcggtgggggcctcgtcgtcgttcgcggaggggatgggggagttcgtgctgaggtccatggacgccaggttctccggatcggccgacgctgatgggttcccttcctctcggcacccaggatttggacatagtaaatccacaactgccacttcggattgttctaaagggcaagagcatgtttttgtaagatcatactctgataggttgctcaagtgtgacctcacgttggatatgctatcggaaaatgagaagataaagataattgagaatctggtaaagatccagaatgatggtacactggaggtagatgtgaaacgtagtgctcttattgcacccgaactttcagagattgatgcattcggttctctgtctcgtgatattgtggaagctgcacctggattgagcaagtcagtcccaaagttgaagattgttattcttgtagttggaacacgaggggatgtccagccatttatagccttagctaaacgacttcaggagtttggtcactatgttagattggcaactcacgccaatttccgtacctttgtgaagtcagctggtattgatttttacccgttgggtggtgatcctcgcatattggctcagtatatgacaaaaaacaaaggattttgcctggctggacccacagaaatttctgttcaaagaaagcagcttaaggaaataattttctctgttctacctgcatgcacagaacctgatttggacactggattaccttttagagctcaggcaataattgcaaatcctcctgctttaggacatctacatattgcagaggcacttggggtacccctgcacatcttcttcacttttccatggacgccaactaatgagttccctcatccattggcacgaatgcctcagagtgcaacttacaggctatcctatctgattttggatttagtaatttggtggggcaccaggggattcataaatgagttcaggaagaagttaaaattggcccctattgcctatttcagcacatatcatggatctatatcacacttacctactggatacatgtggagccctcatctaatgccgaagccaaatgattggggtcctctcgtggatgttgtgggatattgcttcttaaatcttggaacagagtatcaaccaccgcaagagctttctcagtggcttcaacaggggccaaaaccaatatatattggttttggtagcatgcctcttggtgatgaaaaaaaagtcacttctgtcattctggacgcactaagagaaacaggacaaagaggaatcattagtcggggttggggagatcttggaagtttttcagaagttccagttgatgtcttcattttggaggattgccctcacgactggctgtttcctcgctgtgctgcagtggtacatcatggtggggctggtaccacagccgcggggcttgtagctgggtgcccaactaccatagtgccattttttggagatcaattcttctggggtgagagaattcatgcacaaggtgttggccctgcacctattcctatagcagaacttactgtcgaggcactttcaaatgctataagattcatgcttgatcctgaggtaaaatcacgaacaatggaactggcaatagcaattgggaatgaagatggcgtggcagccgcagtagactcatttcatcgacatctccctgccgaacttccgcttgccccaccacccacagatgtaaaggaagaacagctagacttttttcaatggttttcacaagcccttgagaagtgttgcttcccattcaatccttagctgtccataggttagatagaggttcaatttatttattgcttatttatttgtgtggttacaagtcaaaaataatgtcttgtaaaagactgccgtagactgtagtgaaataaatattcggtcaatatatattgcattgatcagc

SEQ ID NO: 26785 - DNA, 2018 bp, Oryza sativa
  ref <308>: DATABASE ACCESSION NUMBER: AK102227
  ref <309>: DATABASE ENTRY DATE: 2002-08-28
gccccctccaataattctgccccttgtccgcacgcacgcgcccagctcagctcggccccctcccctccccgctcccaccgcctcccgaatccggcctccaaatctcgccgggatccgccgcgcggccgcacggattcgcctcccggagccgcggctctgtcggcgcgggggcgggagaaggggggcctgctccggcccgggggacgccggatctgggtcggggggtttctcttcgggctcggaggaggaagggcaagtcacggtggcgttagtggtggtggtggttgttgcagcggcggcggttgatttgtgggtgtgattcgtgggcttcttggtgtcggtgtgcctggtgctggtgacgcgccatggattacaaccccgtggacagcagcggaactgatgatgatcttccaccgacatatcagaacagaggtgtaagaggcagtggacgtgttagtggtaatgggagagatattgttagcgctgttccatataatagaactaagccacagacagatatggaaacacaaattcatcagcttgagcaagatgcatattgttctgttcttcgtgcatttaaagcacaatctgatgctatttcatgggaaaaggaaggtcttatcactgaacttagaaaggaacttagagtgtctgacaaagagcacagggagttgttaaacagagtgaacggtgatgatatcattcaaagaataagggaatggagagagacaaaaggtgggcttcaggcagatatggtgaataatgctcaacgttcacatgatcgcgtgcccagccctaccacctccgctcgcaagaggcagaagacgtcacaatccatcccttctgcttctgtacctgtaccatctcctgctgtgcattcacagacactgactgccccaatgcaaccattgtcatcagcaacaaaaaaagtagctccacctggtacaaaaggcaaaaagactaagccaggccagaagataccaggtggctctgcaatcaagaccatgtcttctgctggccctagtggtaggggaccaattatgaataagaacctatcaggtggtcttcctactgaaccaatatcagtaaatccattaatcggacggaaggtcatgactcggtggcctgatgataatagcttttatgaggctgttataactgactatgatccacagctggatcgttatgcactggtttatgacataaatacagcagatgaaacctgggagtgggttgactttaaagagatggcacctaaagatattagatgggaaggtggcgaccctggaataatccagcaaggccgtggcgctactgttcatggtggtaagaagtcaagcagccgtaatggccccatgtcaggtcctggaagggggagcagagggccgcaaaagaacacatccaggaaagagtttccaccttcacaaaatggtgttgggaagaaaagctctgattgcatagaaatactccatacggagtcattaataaaggaggtggagcgggttttcagcgcaagcaaccctgatcctcttgaaatggagaaagcaaagaaagtgctcaaggagcatgaacaatctttgattgatgcaattgcaaggcttgctgaggcatctgatggcgaaagtgaagaaagggcacaacccttgcaacacaaccgtggatggagaaaccatcatggtggaaactatgcaaatgatatgactatcgatggtcacatggttggagatgctgatgccctgtaaacaattactgaactgtatacagaaccctttttttatctattgtataacttcaatgctgatttattctagattagcactaggttcaaaagtatcctctaattgtttcaaatgagtttatctgttatgatgggcctctcgaattgtggactttcggaaaatcaatattggtgagaggagagcgttttgtagaattgtagtctagcagatcatgatgacactgtaaatttagatgtggagatatttttggtgtcgtactactttcagatgtgactactc

SEQ ID NO: 26786 - DNA, 1744 bp, Oryza sativa
  ref <308>: DATABASE ACCESSION NUMBER: AK102228
  ref <309>: DATABASE ENTRY DATE: 2002-08-28
gactacaggatacagattgcacaccgggtcggccggtccatccatggcggcgaaccagggcgaggcgcatcggcgggagcccgaccagcgccgccccatgtgcggcgtctgcaccaagcccctccgcctctgcctctgcggctgcctccgccgcccgccgctcgacaccgccgtcggcgtcaccgtcctgcagcacctcatggaggcgggccacccgctcaactccacccgcgtcgcccgcctcggcctccgcaacctcgccgtcgcgctcgtcggcgacgtcaaccaccgcgccagcttccacctcaggacgctcgacgccgccgccgccgccggcggtggaaatcatgaccgtcccgacgggcccggggagattcaggtgctggagggcgacggttttggcggcggaacgggaggccctgctggtcctgtgcaatgcgaaggtgaaacattagattctgcaatatgctctaatggaatttctggcgaatcgggtggagcagttagttgtgcaaggcgtgattatgtgacgaagggcatcaatgcttctagtgatttgggtgtgaaagctgcgaatattcgaggttctagcgatatcggtggtgaaatattggatcttgtggatatccctgataggattggctttgatttggatggagagatctgtagtgttaaaagcgacttaggtggaggtgaggaattggggtttcagagtatgaagaggaatggatattgctcagattctgaaagactgggctcctcagctaaccagacaggaaactcctttgttgatggtatccacggtgaaaatcatcacagtattggcgaggtaaatggtaatctccctcgtcatttagtagaaaacgcctcagaatttcaaatggcaactgcccaaaactgcaatggtatacctagagaaaatgttggaactgttgctgctattggtcaagactggactgtgaaaaacatggataagtgctctattacctatacggagaaggaactcaagattgaaattgagcgtggtgtgaagcccaaaatcagatggttgtcaagaggaccacttggtcagtcagctgtctccaacggttttactgtcacgaaaatacaaatgaagaagtcaaaacaaactggggaagtttcggtgtttgaggaattctcaatcaccataccaccaaagtcagctctgctattcccgtgccagcgggcaatcagcattgatgcttcagactgtcagttacaacatttgattgtgttggatggaacttgggcaaaggcgcaacgtatgtaccatgagaatccatggctacaacttctgccacatgtgaagctagaatcagatggtgttagcttgtatagtgaggtgaggcatgagccaagggctgggtgcttgtctaccattgagagcatagttgttgccatgaggaaacttggagaggatgcaaagggactggatgatctgctggatgttttcgagtcaatgattgcagatcaacggagatgcaaggatgagaattggaaacaaaaactcgagtccaagacataaggtggccctgtttttcttttgttgtctaattctattcatatgatttctggatgcatttttctgtccagatgtcatctatatcatgattttatactagggattttcgtttgctgaaagcaactgtctgagatattgtacttttgaactgtcaccattgctttcaatcatagtggcaaaagctgaccattaccctagttt

SEQ ID NO: 26787 - DNA, 1502 bp, Oryza sativa
  ref <308>: DATABASE ACCESSION NUMBER: AK102229
  ref <309>: DATABASE ENTRY DATE: 2002-08-28
gaagcttcttgtagacatagacaattctaagaagacaacttccatggccgctgctactcaacctcatgtcatggtgctaccgttccctgcacaaggccatgtcatcccactcatggagttatctcataggcttgctgatcaaggcttcaagattgacttcgtaaacactgagttcaaccacgaccgtgtcctcaaggccttggcagagaaaggagcaatccctggtggaattcgcatgctctccattccagatggattggaccctgctgatgaccacacagacatcggcaagttggttcaggtcttaccagacgctatgctcagccccctggagaagatgattagatccgaaaagataaagtgggtaatagtagatgtatccatgagctgggcactagaactggctaccacaatgggtgtccgtattgccttgttctcaacttactccgcagctatctttgcactcaggatgaaccttcctaaactgatagaggatggtattcttgatgaaactgggaatgtaaagaagcatgagatggtccaactgatgccacctattgatgcagccgagatcccttgggtcagccttggcagcacccaagaaagacggagatataacatccaaaatgtctttaagaccaaccgactaatggcacttgctgaaatgatcatctgcaacactttcagggagatagaatccgaagcattggaactcctctcaaatgcactgcctgtcggcccacttttagcacctgcttcggggccaacaggccatttcttgcctgaagacatgacttgcctcacctggctcgacacacaggcccccggctccgttatctatgtggcctttgggagctccaccatctttgacatagctcagttccatgagcttgctaacgggcttgccgtctctgaccaaccatttctgtgggttgtccgacctaactttaccaatggaatccaagaagattggttcaatgaatataaagaccgtatcaagggcaaggggttggttattagctgggctccccagcaacgagtactatcacacccttcaatcgcttgcttcatgtcgcactgtgggtggaactcaacaatggaaggtgtactgcacggtgtcccgttcttatgctggccttatttttccgaccaattctgcaaccagagctacatatgcaatgtgtggaagacaggcattaagcttttccgagacaagcaaggggttgtcacacaggaggagatcaagaacaaggcggcgcagctcctagaagacaaggagatcaaagaaagagcggtgacactgaagaccacggcccgtgcaagcatccaagagggagggtcctcgcaccagaactttctcgagcttgtcaatttgctgagagaacaatgatctttcaggatgcagaaaaaatcactgcagtcttggtgcagtcaaaataggattaatcggtcaataaaataaaccgaatgcacaccataataaagattccgttgtttgatgc

SEQ ID NO: 26788 - DNA, 2844 bp, Oryza sativa
  ref <308>: DATABASE ACCESSION NUMBER: AK102230
  ref <309>: DATABASE ENTRY DATE: 2002-08-28
gtcgttccccaattcgccacctcccctctccctaacccctaacccctaacctacaggcgcgggcgacggccgtggaccggcggcgagacggccggcagcgcgtggcccgtgtgcgtgccgcaagcaggcggcggcgtccggagagacgtgagcgggcgggccaggcggcggtccagcgccgccgcacgggtggggaggtcgcgagccgtgagccagcgaggacgcaaggtgggcaggcagcggcgcagcacttcagtggccggcaacgacgcagcgtgtatcagcaacccggtgattggaattgaaattgaaatcggtttttgggttccaccagctggtctttcttaggatgtgtgaaccaagtggcagtgatgatgcaatggtgcatgccagtgagatggttgatggtgatgagatgatccacggcaatgagatggtagttcatgacagtgtgatgatcgatggtaacgagatggttcaagagaacgtcatggtccatgggagtggtgagatggttcaaggaagtgagatggtccataataatgaaatcattcaagttaatgacatgatacaagtcaacgagatggtcaatggtgataagatggcccatggtcatgagttggtcggtgttgagttgaccacgccaaccgcatcaagacgccggagaaaaaagtcagttgtctgggagcacttcacgattgaagaaatgcctgggggagtttcacgagcatcctgcaatctatgcaagcaaaccttcgcatacagttgcggctcaaaaatttcaggtactagccatctcaagaggcatatcaccctggcttcatgtcccatgttgaaaaatgaggatatgaaactttcattgcctttagcgacagtaactaacaatgatggtgagggttgtgcagaacgtgttgctaaaaggcattacagatctactggctatgcaaatgctatgtttgatcaagaccgcacctgctcgaatctggctaagatgataattttgcatgactacccacttcacattgtcgaacagcgaggcttcactgcatttattgggagtttgcagcctcgtttcagggtgatagatgttgatacaattgaaggacaggtgcattctgtttatcagaaagaaagggaaaacctgatgcatgtgttcagcactgtgcctggaagaatcagcctcactgtaagattgtgggcgactagtcagactcttggatatatttcacttgcagcacaatttattgacactgaatggagagtgcatcgaagaatggttaacttcatgatggtctcttcgcctcattcagagaattcacttagtgaagctatcagtacaagcctctcagactggaacatgaaggacaagctattcaccatcacattggataatgatccctcgtcacatgatatctacagtgcaaacatgataaactatctctccaacaagaaggacaacatcatgatcaagggccagttgtttgttgtgagatgttatgcacatatactgaacacagtcgcacaagatgtcattgcttctgttcatagtgtgatctatcatatccgtgaaagtataaagttcataaaagcttcttctgtccacgaggataagtttgcggaaattgctctgcagttggagatccccagtgcaaagaccctttgtctcgatgttacaacccagtggaatacaacttatcttatgcttctggctgcattggattatcagcaggtatttgcatcattagagacgtgtgatggtgactacaatgaagcaccatccacagaggactggaagaaggtcgaggcggcatgcagttatcttagtctgctctatgattctgcacacaacatcatggctgcaccaaatccaacttcaaatatcttcttccatgaggcatggaagcttcagtcagagctttcaaatgccattgcccatgaagacccaattttcaggagcactgccaaaatcatgcatgaaaggttcgacaagtactggaaggactgcaacctcgtgctagccattgctgttgtcatggatccacgcttcaagatgaagcttgttgagttcagctactcaaaaattcatagtgtcgaggccgcgaagtatgtcaaggtggtggatgatgctatccatgagctttacagcgagtatgccacgcagggggaagctaacagagatgcccatgtaacggacaatagtgctgcagtgactccacccaatggcgatgaactcttagacttcgatatctatctttcagaaattgcgacgagccagccctcaatatctgagctggagcaatacctggaagaagccctcatgccccgcatccaagactttgaaattttggagtggtggaagcttaacaccattaagttcccaacactctccaagatggctcgtgatgtattggccatccccatgtccatggtgagcagtggtagctctatattttcggcgacggcaacgggaagccagatgcttgatgactacagaagctccctgcgtcctgaaactgtggaggctcttttctgtgcgaaggactggctgcagtacccaccggctaccactgaagctccaagcacagcgttggtgaagatggagaactaagttataacttagtattagttaaatatttgcatttaggtggtgtttaatttgcatgtggttttttggctgtgtgagtggtttagaacatagaatgtgactcagattccgttctagctacccctcagattactttgcaccatatgttatattactagataatcttaagccatgtgactgagagttcgaagttataaaggatattaggagccatcttcaataaagttaggcaattagag

SEQ ID NO: 26789 - DNA, 2233 bp, Oryza sativa
  ref <308>: DATABASE ACCESSION NUMBER: AK102231
  ref <309>: DATABASE ENTRY DATE: 2002-08-28
gaaaaggcggcggcgccaccggtggctcgcgacccgcggcgaggcaccgtcgcccgaagcccccccccccccctgtcttcgcctgctccgtcgcgccgagggtttctctagcaaaagaaatctggttcctgcaaatacaccatctgccaaggggagagtaccacaacagttggagttcacacattgttcacctggtattgttgcctgactcttgggacttgacattgtgcctcagcccaataaagctcttgaccaatgccaaagtgacattctgtgcaacatgcagcggcacttatctagaagtgatcaagtctatgatgcttcatctgaggatcaaccatgtagcagcagtgctgaccatctcccaggactaaggatgttttcgaggtcacggagatggaaaataatgatatgtgcatggggttgcagtcagggaacgagtaggcttttccaggagtgacaaggatgatttgtaatttgtgaggcataagttcttggatccacatgcaaagcgtctttccgcagatgaagcccataggaattctaaggagtttagtgaggcacttgagttactgtactccaaaaaggatgttttccctaaaatccttcaggagaacagtggtgcatttccaggattctcagggcacatccttggtcacagtggattgctgtactccaaattgtttgagcaagacaactgctctagcatgggtgttgaacatgacgggttgtttaatgtgccaaaggagccagagatgcagcaaaagtaaccacccacaagatttcatcagaaacaaactacaatcatgataatgtacagaaggcaggtattatggttggaaggcagggattcactgtaaagaagattcaagagctgtctcattgaggaaattttctaggtcgtagtttatccagacctcagataccaacagtgcaaaattacagggaaggaaacaatctacaccaatttgtaacctgcccattcggaaatatttattgaatgcacccactgaggcactaatgaatctggaagtgaccatgtcaatagtagatcaccattttgaaaaacaaagcagaaaaaggggagatctatgaatctatcatccaagctggcaagaaaaacatgctacctgtgaacgagattcatgtaacttcagaaaaagcaaggcatagtatcttcatatccgatttgtctcgagcaggcaacacacatagttctggttcaactgctctggatgatgatttacaaagttgtaaagaaaagatggcatggacagaatagaatctagcaccaccataactattcggtggaaactgaggatgcaatcatgcatactaccatatctcaaggctcagttctatatactatagacatgggataaaatggagtcagaaaatcaggacagacacacagattgacactatgtgcagggcagagcgtgacatacgaacggactactgacgacggcggtgcctgtactgtataaccaagaactcaaaagccagtgtatcctcctcggtcatgggaggaaatctcatccatgtgtatcgagatggaagttccactatctcaaagcggacctggtgccaacgtctgctatccccgtccatctcgtagaaaaagagctggcagagcacgctgcctctgtcgtggatgacgtcctgcactcggaagaaggcgtggtatacctccgatccggtgcgcctggcgtagaagatctgccacctaggcagctgtggaacgatggctccctcgaccacgcattcctcctcaagcgcaagctgaggcagtatgggaacggcgaacccccgcctgttctgccactctgggcatccgcatggattgacctccgcgcagccgacgcacagcagcctgtggcagcacgtcatgacccactccacgcggtgggtggtgccacagccggagcaacaaggaggcggtggtggctggtcccacctgctctggcgctgatgctggccgctgctgctgccctccgatgatcgggatcgggaatgggagctggacgagctgctgcgtatgacgccagagatgggtctggagacgtgctcgtgctgcagaaattaaactgtattagtgaattccagttttgtattaagaaaccatcgtttttgacttctctccaacatagcgttgtatagcatatagtgctggagctaataagttgttctttttttttacacttgggtatacgcattgcaaactactactgct

SEQ ID NO: 26790 - DNA, 3790 bp, Oryza sativa
  ref <308>: DATABASE ACCESSION NUMBER: AK102232
  ref <309>: DATABASE ENTRY DATE: 2002-08-28
gggggacgccgccctcgccaactgggcgacgccgccgccgtcatcaactcgtcccggtcaccaccaccgcgtatccgcggtatactaccccgccgtctctctctctctgctgtcgcgccgccgccgcctgcctgctcgacgcgcggccgtgtcgtggtctggttcgaagccgcgccgctttttttttttttttgggtttcctttttccgctcgtcgttatcgagctccagggtccaggtcggcgcatcgtcttcccatcccaggtgtccctcgtacggtcggggtagcggtcgtcgtcgtcggcggcggcggcgccagatcccggtcggtccccggccgtgctaaccccgctgcactgcgagatggatgatcttgaagtaaaaaatgatgaagagtaccagatggatcctattgaaatcaaggatggtgaagagcattcaatagagatgcttgttgagcagccacggtttctagagcccatatgtcctgaagaggttaatgaagatacacgagtgtacccacgtgtgggggatgagtaccaggtggaaattccaaatctagcaacagaagaggaacgcatgaaactaaggtcatgtccagttgatgacagtggaattttcggttttgattatcctgttggtgtgggactagctattccagtcacatggacccaaaaaacaagcgatcatgtaaaaaaagagcagacaggattctcaggacgcagttcatgttcttcacaagatgaatgtaatagccacgtcacagaagatattcctagaaatgttccaggctgtaaagttgaatgtgatgagcatgatgagaaacttctaaaatctgctgaacaagatattaactgcttacaaaatgggaaagccagtgattatattcctctgccaggaatgacacattattcctggactgatgaagaagcacaaacttttcttcttggtctatatatttttggcaaaaatcttgttcaggtgacaaaatttttgcaatgtaagacaatgggagaagttctatcctattactacggagagttcttcaggtctgattcatataatcgatgggctgcatgtagaaaagtaagaagccggagatgtatacttgggttgcgcatattttctggtacaagacagcaggaactgctgtcacgtatgcttgctggtatagcaagggaagttcaacatcctttgttggaggtctttaaaacattcaacgagggaacatctacctttgaggagtttattttgtccttaaggtccacagttggcgcacgagttcttgtagaggcagttggaattggcaagggaaaatatgacttgactggatttgcattagatcctagtagaaaccatggtatctcaacacgtgcagaaatccctatcggcaaggcttgctcatcgctttcatctggagacatcataaagtttttgactggtgatttcagactaagcaaggcaaaatctaatgatctattctgggaggctgtctggcctcgcctgcttgcaagagggtggcactcggagcagcctaaggattcttctctagttggcaagcatgctttagtgttcctcattccaggcgtaaagaaattttctagaaagaagcttgtcagaggaaatcattattttgattctgttagtgatgtgttaagcaaagttgcatcagaaccaagactgcttgaatttggagttgagggtagtaatggtgaaggtgggttcaagattgaaaatggatggatccatgatgctgaacttgagaaaagcacagttactgacaagaaatcttcttgttatacccggcccagtgaacctgggtgttcaccagagctaatgaaatttactgtggtggatactagtgttgttcaaggagaagaaccatgcaaggtgaggtccctaagaaatctacctacagatgccagtcatggttacatgtcttcaccacattcagaagattctgggagtgacagttcagaagaacactctgactcagaggacagctctcagtcttatgaacatataaatacaaatcaaaacaagacaggtgctaagtatgtcaatgagaagaaatgtaaaccaccaacaggtgataggatggatattgatgtacttcagaagaattctactttcgcaggcacaatgacatcaaccaatggtcacatgtcatttgatcaaggtttcagcttaatgaataatgcctgttcctcaactgcaactattcttcctgtcggtactcaaagggtccatgctactaattcttccactgaaataaactttcagtttgatcaaagggtaactcctgagccccagattttcttagcagcatctgttgcaaagagaaggaggttagtatcttgtaagaatgagagaactggacgcagaaatactgctgccaataaaagacagcatgggaagcaagttgacaccgcacaacatgatgtgtctaaatcaaatgaagcaagcgcaggggctaagcctttcatatggggttcaattccgaactcatcaactaccataaactttgacatgagtaacattcatttatgtcacaagcagtacaatgtgccccctaccgatgaaaaaatggtactcaaggaaaagtcccaagataagcatgttattgatctgaatattccacaagtgccttctgattatgagtcagctgtgagctacatcgtgccttcttctgacaagaatacacatacaatggatagatctatacattcttctgacaccaacaggatggatgactgtcttccagacatcaatgcctcctgtaatgggctattgagtgagcagaggaggcagagtaccagaagccgcccaccaacaacccgagctctggaagctcttgcttgtggctttattgggacaaagcagaagggcgcggaaggaaacttcccatcttcaagcaggagcagcagacctgtccggcgaccacggagattaactgatggtgcagtgtcatttccttctgatggtgagggaagtagttctcattttaccgattcagccattattgtcaatgaatggcacatgactaaccgtcagtatcaagtccttgacaacacccccacagataagtccactgataacaggactcgtgaattgtttggggcagacaaatctgctgataaagggactcgtgaattttttggggcagacaaatctgctgataaagggactcgtgaattttttggggcagacaaatctgctgataaagggactcgtgaattttttggggcagacaaatctgctgataaaggtagtcatgaattatttggcataccttagatcacatgaaaatggaatcaatacttcgtcgaactttgagttgggctaaggaactaatggaggaagcctatacaactcattgccaatttcagctatagcttggtgcatatgcctcctactgttcaagcttatatcaagaacagatggacccaatgctctttccagattttatggatatttaccctcaggtcatccttctgtgtcttgttaagtgtttttggattaacattaattgaaaagaaaccaatgagcgcaagactcatgctctccttcggaagtcacctgctgaagcatttaccttcctctggaggtttttgatggacctttacctgcagttatactctttgcctttttttacatgtactatgtggagtggctggaaattggaaagtgtgtaacaatgaactcatataagaaccatattatagcttggaactctaatcttttcaagcaaaccataaattcaaaatggagaaccaaaaatactatgaacc

SEQ ID NO: 26791 - DNA, 1767 bp, Oryza sativa
  ref <308>: DATABASE ACCESSION NUMBER: AK102233
  ref <309>: DATABASE ENTRY DATE: 2002-08-28
gagtcgatccactgctaacccctaccgagttaacacttaacacctagtcatatcgcagatcgagcttagctagaatggcgcgaatgcttgagaccgtgtcggagatggagaacaccgaggcggccgatggagatggagctacagctacctggagaagatccggtgcatgtccacgggtggcgggtcgtcgtctcgctcagtgagatccagtaactacagcagcgcgtcaagcaccgcgtccagtgcgcgtcctaggtacgtccgctgctacgatgatgctgatttcgtgacctactccttccagagggcagtaggacttggagcccccggacctgctcgagatattcgtgggcagcttggtgagtgagttcagccgggcatccggatccggccctgcgctggacaggtggttctcagaactggacgtcagctgtgtactccgcaatgatcaggaggaggaggaggcgaccgggagcctggtggggaggtgggcgcgagctctcactgtgatggcgcgcgcgctgatcgccacgctccaggaccaggaggacaacctcaccggccgactctgccaactcgggcggcttatggaggcgagtttctccaagatccaacttgcacagttcgcgcaggcgactttctccaagatgcttgcctttgccaacgccctcgctgataagccttggacgcggccaacggacaagttctcggggctcatgcaactccgcatctgcatcaacgacgtctcagatatcctcgtcccgctgtacaatgaggttttcttactagctgattattcaaaagaaataattgaaagcatagtaaaggagatcgatgatgttttctgggtagagccatattgatgatgacgacggacgccttgagccccccgagtggaccatttccggacaatgcagaaatccacaaggctactctgttagctgtcaactatgcaatattgttttgggggtaccatagcgtgctggaggccatcctacttgataatggcgatttgtttggtaattgcagttggtattctgagaagctagtagtagaaagattgattgtgcaaattataaccaacttgcaggatgagctcgagaagaaatccaagttgttctctgaccatagcctgagatatctgttcttgcttaacaattcctacgtcgtacaatatcagtttcttgtacccagcgactacagccctccatcggaaataaagttccactatgagcagtaccaaaaagagtatatgcgtgcctcctgggaacctgttctgtcttgcctacacgataagatgccaccgtgcttccctaagctctcatcgcattcggagctgtcaagattcgagttggaatttgagaaaacatgcagtcatcagaagctgtggaaggtcccgcttccgaatcttaggcagagcctgcgagaaaccatcattaataagatcattactagatacaaaaagtacatggaggaccatccagagcaggagaaatgcggcagagatccactggacatggaaggcatggtgaatgatctatttgaaggatgaaggggttgctacagtttcagaatgacaggcccgcacaaatagagtataagttttaaagcagctacgaagaggaggccaaggttaaataggtgttcttgatgtcctttttacttttaccgtattttgatgtcgggtgcaattgtgttcttatcccttgtttcttaactccagcggtgattttacccctaccattttaactttgtgattttatcacc

SEQ ID NO: 26792 - DNA, 3398 bp, Oryza sativa
  ref <308>: DATABASE ACCESSION NUMBER: AK102234
  ref <309>: DATABASE ENTRY DATE: 2002-08-28
ttgttgaaaagaggtcatgcaaagatgtggagaatagtggcagccaatcttctcaccgagaaattactctttgtaatgtttcagtgcagctcctttgtgatactattatttatgaccgaaaggttctgttgaagaatttggtgtcaggtttttgccatgctctgaagaaatcggtattgtcttttgttactgatgctaatgaagataatgacttgttggactcgccacctgatttggtggatatattaactaaactggaaaatgagaagttttttagtacaaattctgatgttacacacacaaatggcatagataaactatggatttgtgagaatttacttaatttttttagtacagttcctggatttcatgcaaactccaagtcattgttgcaacttatagcttacattctccatctggaaagactgctgctattggcaatggtatgccatcgttatgaatcttgtaattccatggggctacttcgtctgtttgtatgctgtcgaagagcaatgaaaaatcttatcttcaattttggtaaagaatttccagagttgaagcaatactcagcattttccaaaatttttggtggctcctgtctgatttggcttttgaggtctgttcaggaacttgtcagtttgtcacacaaaatatttgaagagcacactgatgagatgaaaaatacaattttctccctggtagataagacatcagaaatattttcaacactaactaacatgaattctgtattttacttgttgggtgcaaagaaacaaatcatatcttccagcggagaaagcagtactccaaaacatgatgatcaggcattcagcatactagaaaattcagctttggagcatgtcaaaattatggctgaactgttagagaagtctacaactggcattcctgtaactgttaagggtagtcagtgtgttatcaaattagagaactgttatgacactgtatgctgggatagattattatgcaccatgtcttgcataagaggattcttgtggggtcttatttcagcactagaaggcacatgcaaagattatctatcaagcccagaggaaaggaacgtgatgtttcagtatgcctccagattcagtgggtgtgttgctaagtttgaggcctttgtagatatttgcatgcatgtcttgtttatggagaccaaggattgcgagttggctgatttaatctctgttcatcttccacaagagctggactgcgagaacaactctctgaatattactgcaatcatggatgaatggactaggcaccaacctgaggagatcggatttcactcagatggtgtactaaatatttcaactgagactcgtggttttgatctgcccaaagtacaatttgtgaaaggatttcttttagaaaaccttttaagtggtgagggtccatccatagcatttactttaagggagctctacaatgcatctgctgctattgttaagctgaagggaatcctatcatttccaagtgaggtatgtagacagatatgcagtcctttccaaaagcttccattgggtccaatggttgcgacagcttacatcgctctacacaaattagcagacatgtctaactggcctgacatgttttctcttttatggattgacggaatattaagttatcttgaagctgtaggaaacattttggcattacctgagatcaacatgtcaaaagaattgtacactcaagtagttaatgctcacttgagagctattggaaaatgcattttgcttcaaggaaagaatgcaactctgcctacccatgagattggatcaagtacaaagacactatatttgcagaatagatctggtcatgttgttgctaaaggtatcatcaataggcagaacagattaaattcactgaaatcaagacttagactatcactgggaaaatatgtcaatgtttcatcaaacatgcatctaaatacagctgtgcaagtcattgaaagagcattggttggagtgaatcgtttcagtcattcaatatatgaaataaacacaggaaattgtgatggtgggacagtttcttctgatgttgcggctgggatttattgcctctatctggttcttgaaactgtgccaggaaataaacgtgtttttaagagaaccgtcccaggcctaattggtgctttattcaatattgtcttacatcttgaaagtccttttattttctacacagagaggatgcctgttcattacccttatttgcacccagatgctggagccattgtcctaatgtgtattgaggttataacagcatttgtggggagacattcttttcaaattgattcatgccatgtctctcagtgcttgcatgttcccatgacactttttaagggcttcaaacatcttctttcatgtcggaatatgccccattcttgcaaccagagtgaagagcaactggcagctagtaatgaatatatacttgatagacaattttcagttgacatgtatgcttcatgttgcaaattgttatgcactactattcgacaccaacagcgtgaggttgcacgatgcgtggctgtcctggaagattcagtaaacatacttctaagttgtttggagtctccaaatcccaaaatggttagtagggccggttatttttcttggaacatggaggaatcaatgaaatgtgcttccttttttagaaggatttatgaagagatgcgccagcaaagagaactcctaggaaagcactcgatgtactttcttgcaggttacatttctatgtattctggacagggtccatttcagacaggcataacacgagaaattgatgaggccttgagacctggggtttattcgcttatcgatatctgcgaggaaagtgatcttcaactgctccacacatatctgggtgagggtccatgccgaacaacttttgcaaatctggtgcaggactacaaattacacttccagtatcagggcaaaatctagtcaaacttgctaaaggctttttggagcatttgatgttgatccgtcttattctgcataagatatccaatgcatcatctgcatgatcttgggtttgtgctgtactattaattgctgactgcttatgcactgaattttcacccttcagaacggaaagggaatatggctgttgctgaagatttaaagctcatcaaattaatctgctggatttggaacaagatgaaaaggagcaaacaagaaaatgagcttagtaatcaagatgagaaggacttggtgatctgcagcctttggctcttgttccataaatcacaacttggtaatctctagcacgtagtgttcatattctggggtaatatttaacacacttgccccccaaactaaactaattcttttggaaggtagttcaatcagactgatcctatccaggccatactccatattacc

SEQ ID NO: 26793 - DNA, 2007 bp, Oryza sativa
  ref <308>: DATABASE ACCESSION NUMBER: AK102235
  ref <309>: DATABASE ENTRY DATE: 2002-08-28
gttcgctcgcaatcgcaattcgcaagttggcatccaactccgtcccgtccctccctcccccccaacccgatgggaaacgcggccgccggcgattcggccgccgagctgctgctccgcgcggcggcgctggtgccgccggcgcactacgccctcgccgccctcctcctcgcctgcgccttactgtaccgcttcctcgagctccacctcatcggcgacctcctccgcggcctccgcgggggccgcgtcgcgctcaccttccaccccgcctcccacgtctaccaccgcgtcgcatccaagtgccgctccctccatggcaggtacttggcgacgccgtggcttgcgagccctcatttgcagacactgttcctgagcatctctgggagacccccttcgttcacgtataggaggcagctgtacacagttcgcgatggtgggaccattgctttggattggttactagcctctgattgtgaagaagaagatgttggtttttgtgatggagttatctctagggatgattcgacgcctcttgttgttgtgatacctggattaactagtgattctactgctgcttatgtgaagcacttggtcttttctatggcaagcaaagggtggaatgttgttgtaggcaatcataggggtctgggtggcatctccataacttctgattgcttctacaatgctggatggacagaagatttccgtgagattgtcaattaccttcatcagaagtatccacaggctccattatttgctgttgggacaagcataggtgccaatattctggttaagtatctcggagaagaaggtgagggtacccctgtggctggtgctgtatctatttgctcaccctgggatctgctggtgaccaacagatttattcagcgcaagcttgtgcaacgatgttatgacaaagctcttgcaattggtctgaaaggatatgcaaaactacaccaacccgtcttggcaagacttgctaactgggaagatattagaaagtcacgatctatcagggaattcgaccgtcatgccacttgtgtggttgcaaaatatgagacagtggacacattctaccgtcggtgcagcagtgcaaattacattagtaatgtgtcagtgcccctgctttgtatcagtgctcttgatgacccactttgcacaagggaggccattccctgggacgaatgcagggcaaacaaaaacattgttttggcaactgcacctaacggtggccatcttgccttttttcaagggctaactgctggaaagctgtggtgggtgggagctgtttctgagtttctacttgctctacatgatagcccctgcatgcatcggcaaaaggcacaagaacacagcttgcacacttcgttggaatcatccattgataaaagcccatatgtgaatttcatggaagatgggatggtaactgcggtgacaaatgatgatgccaacaatagtgactcagataatcctatttccaatgaaatggaactccgcaatggcatggttggtgtgcaacaggatggaatcgccacagaaatacagaatgagtgtgacggtaataggtcacaagagaatgtgacgccagcccaaggtcctgtaggatcacaggaacagccaaaacaaaacatagataaaatccaggatgctattgctcctgtaaagatatccattaatcagctcattcgatcgcaggggagatctgtttggttgcttacttacattgcttttgtaacatcttggcctttccttggtgccctgggttttatcttgtttaggaaaaagttcaggaattctttgcctgctaaacggttatgaaactaaggcaattatgcttacagtacatacacataattgtttcacgtgtagtatgtaaaatgctggcaacaacagttcatatttgtgtatcagttcctaagaaaataaattatataggtgtaacatgctgtcatgcaatgattcaattcctctgtaattttctgtagttggaattactaaacatttcccagt

SEQ ID NO: 26794 - DNA, 2638 bp, Oryza sativa
  ref <308>: DATABASE ACCESSION NUMBER: AK102236
  ref <309>: DATABASE ENTRY DATE: 2002-08-28
ggctttttggatcgacggcgacgccgccctctccatctccagagagagccctcttctccgtttcttcctactaggctactactactcctcctcggctcaaccctcccgtcccctcacccccacgcgcgccgccttctccccagaacgcgccgcggcgaagcgccgccgaagcagcccccactcctccgcgcgcggcggcggcggcgcagtctccagacgcttcctcctccggggatctcgcctttgaatggaccgaagtgattccatggctgattcgccaaggaggcgtaatggccttctgcgggaccaggtccagttggtgaaaaggaaggacacaaatcgctacgaaatcgtccgctttcctgatccattgtcatttgagaaaggcttctttgttatgatccgtgcctgccagcttctggtgcagcacaatgaagggatgatttttgttggcgttgctggaccctctggggccgggaagactgtgtttactgagaaggtgctcaatttcatgcccggtgttgctgtgatatcaatggataactacaatgatgcaagtcgcatagttgatggcaattttgatgatccacgcctaacagactacgacacactgttggaaaatattcatggtctgaaggagggaagatcagttcaggttccaatatatgatttcaagatgagctgccggactggatacagaacagttgatgtccctagctctaggattgttatcattgaaggcatctatgcattgagtgaaaagttacgatctgtattggacctacgtgtttctgtcactggtggtgttcattttgacctggtgaagagggtcctgagggacatacagagagctggccaggagcctgaggaaataattcatcagatatctgaaacggtttatccgatgtataaggctttcattgagccagacttgcagacagcacatataaaaataatcaacaagttcaacccattctcagggttccaaaatcctatgtacattctaaagtctccacgaactataacacctactgacatcaaagttgctcttggtgaagatcatacagaaagcattgaagaaacttatgatatatatttgcttcctccaggcgaagatccagaatcatgccaatcttatttgagaatgaggaatagggaagggaaatataatctgatgtttgaggagtgggtgaccgataatccttttatcatatcaccaaggattacgtttgaagtcagtgttcgtcttcttggaggtttgatggcattgggatatactatagcagctatactgaagagaaagagtcgtgtgttttctgatggcaaggcaactgttaaaattgattggttggagcaacttaaccgaaattatatacaggtgcaaggaagagatagaaatcatgtcaaatttgtagcggagaagttaggtctggatggctcttatattccacgcacatatattgaacaaattcagctggagaaactgataaacgatgttatggcattaccagaagatctcaagacaaagctcagcattgatgatgagctggtttcaagtccaaaagaggccctttctcgggtttctgctgataagagaaacaaacacctgaaaagtggtctatctcattcatattcaactcatggagataaaaatattgtgaaattgagtaaattgacagaaaccaacagaaggtttggaagtgggcgagcccctgaacctcctgcaattaatcagggtgctatcactcagctatccgaacagatttcaacgttgaatgagaggatggacgagttcacctctcgagttgaagaactcaactgtaaatttgcaataaagaaatcatcgaccagtcagcaaaatttagctcttccaaatgaaacttgcaatggttctgcacctacaaatctctttgtttctcatttgggcaatggtaccctgatacctcattcgtcatcatcgaaccaacttttgaaggagtcccccattgtggatgagattaatgccatatcaagaggtcagcgccaagtgatacatcagcttgacaatctgaccagcttgcttcatgagcatttggccttgacccgccaaggaaatgcagtccgcagaaacgggatcctggaaatggacatgtccatctgcccactcattgccctgacaattggcggtttcggctatttggtgttcaagagcctcaaccggagctaaccgaagcgaatcaggcagcgacatgctgctttaaaaagctcaccaccaagttcaaccaagaaccagagaaagccaagaagtctcaaaacggatcttcactcttcagtactcagtccagacaccaaaccgatgttctcctgcgagctatagacggtcctcactcagatcattggtctcatggggaccatatctgatagattttacaatttcaagatagataaactcatataccagcacaagcaacagagcagtcttgatactcgggccaagttacttggaagcttaaaaactgtgtactaaagagcgtagagttatacaatatcgtctgtaatggatactggaaagcccccagtatcaataaattttggagacgctagtaatcccgatataatgtcgaacaagtcgtgggaaaagagcatagtcattttaccg

SEQ ID NO: 26795 - DNA, 3586 bp, Oryza sativa
  ref <308>: DATABASE ACCESSION NUMBER: AK102237
  ref <309>: DATABASE ENTRY DATE: 2002-08-28
gaggatgatattactattctatagcgtagaattgattgaggttgaaggcttcaagcgatatacgtactatcaatctttgaaatgcgcgtgacttgctattaatctttgaaagataaaggtgcgactcgatcggcgatgatgcgagtgcagctctgagaggcagacatggagaccctgagctctgtcactaatatcgtcgtggggaagctcttcgcgctactggagaagaagtacgagcagtggaggggcctggaggacagcatcggtttcatcaagcgggagctccgcgtgatccatggcttcctgcacgaccagctcccgcgggatcggaatggggaggatccgccgatcagcgccgtgcaggccacatgcatcgacgagctccgggatctggcgcacgacatcgaggactgcctcgaccgcttcctgccctgcgccgcgtgcgagcgcgattcgtcgttcctccgccgcctcgcggcggactctcggttcgccggcgaggtcgagaggctcaagtcgcggctggaggaggcgcacgagcggagggctaactacggcgtcaacggcgtcgccggctccgccgccgcagctggcggatcaagctcaggctcagcaaatacgacggattacatggcccagagctgtggccttgtgggcatcaacgtgcccaggcaagagcttcttgacctgctcctgctcgaggacgtggagggccggccggagcggatgcgcgtgatctccatcgtgggattcggaggctcggggaagacgacgctcgcgagggcagtgtacgactgccccgacatcgccggccagttcgacggccgcgcctgggtcgtggcgtccaagcacagagatgataccatggggctcctgtcggcgttactcggccaaattcgtcaggaagatgaccaaagattcaatcaaattcctcaggatgatgagcaaagattccagctacagtcccaagtccaagctgatatcaggcaacacctgaatgctaagaggtaccttctcgtgtttgatgatattgaggagaagcagtggaactgtataaaatcaaccttccctacagaaacaagaagcagagtactagtgacaacgactattaaaccagttgcaaatgcctgcagccatggtaccggttctgtgtacaatatgagaactctgaatgtgaaccattccaaggatttgctgcaatctgtcctaaaggaatactctcctgagttggagttggacttgccatcgattctggagaaatgcgacggcctcccgcttgctctggttagtgtgggaaactttctatggcgagaaaggatcactgaatgttaccgaaatcaagtctgctgcaacctaggtcatcacattgagaaggagcacgcctttgcagaactgcgacaagttcttgcgaacaactacaacactctgcctggccatcccctcaagacctgcttactgtacacgactgtgttccccaatggctgttccatcagaaggagcagtctgatcaggcgatggttagctgaaggctatgtacaatgccaatatcctcgcagttcactggaggttgcagatgcaaacttggaggagctaatggaccgaaatatcatcaggtcgatggatgttaccaacaatggaagggcgaagaactgcagggctcacggtatcatgcacgaattcatgctgcacaagtccaggtgtgataatttcattgcatccctccatgacccagatcgaagcaaatgccgccacctcttcttaacccagagccttacaagtggaaatcaatcatacatggattgtggaactaatccaaagggtaagcaacctcgtgccaggtctctgacgatctttggaaatgcaggggaatttgctttagattatgccaagtgtgagctgttgagggtcttggatctagaagaatgtgatgatctcaaggacgatcatgtcaagtacatatacaagctgttgcatctaaaataccttggccttgggagcaccattacatatattccgagaaaaatcaataaagggctgcattgcttacagacactcgacctgaggaagacaaggataaacacattgcctgtggaaatcattataatgccacatctagctcacctgtttggaaagattaagattagggaagcaaggggcctttgggtccttgaaacgaataaaatagagaagatattatcagataaaagtaaattgcaaactctagcaggttttgttgtagacaagaactctttgtttcctcgcctgatggttcatatgaataaactaagaaaggtcaagatatggtgcgagcccgcagctgaacgtaatagcagtatcagcttaatttcagcggctattcagaagtttactcaggctggcatggacactactggtgctcattctctgtcacttcgatccagaaaatttcctaaccgtctactgtgttgtctggagaagtcgtatggttatctcagctccttgaaactgcagggcgagttgagccggtttccacagttcatcacatcactgtgtggtctcacagagctgtgcctttcatcaacaaatctgaataaggaggatctatcaaacgtttgcacattgcaccacttgctttatctgaaactggttgaatctgaccttcagggctttatcataaaaaatggtgacttcccacgtatgcgacacttatgccttgtggtgcaaaatcccaatctccctacagttgaaaaaggagctttgccacatctcctgtcactccaattgctctgcaaggatctagttggtctttctgaaatcaagattgagtaccatgattaccttgaggaagttgctcttgattctatggtcaatatagaaacaatagaaatttgggaaaatgaagctaagaagcacccaaatagacccaaggttctgttccgcaagagggttgatccaaccgatgctcagtccacagcgaagtatgctgcaacagaaagaccagtacctgagacaggatgccctgcggtgataaaaaaacggaaattccatgctatccaatcatattataacgggtctgttgaaacaaaaaagagtttaagatgctgctctggcgtttaactgaggtgccaaatgctggcaatggtttgtagattcttctttaggtggaaggtggcagatcagatccagtggcggtggagcctcaccctcatctcctcagggcccaggctacggtcgccgctcgccgctcgccggtgcaggcggggacggcgccgttggccgatcgcaggtgaagagaaggttaccgcgacgacgtggggggatgccacacccgatctggggcttgccttgcggctgtggcctgcgactgggagagggcctgccgttgcgcatcgtggcggcgcacgggaatatcagcgtggtgtgcggccggcgggcggcggcgatgggagaggcgcaggccttggtctggtgcagccagcctagatattttcccaaatttctgaactaaaacaaattgactgaaatactcccaatgttttgctattactcctagaatattggactgtctatacatacgttgacagaaaatcccacattctatctttcc

SEQ ID NO: 26796 - DNA, 1954 bp, Oryza sativa
  ref <308>: DATABASE ACCESSION NUMBER: AK102238
  ref <309>: DATABASE ENTRY DATE: 2002-08-28
ggcttctcgcttctttgaccggcggcgccgatgctcctccgccgcggcgccgcctcctcctcctcttccatggcctttccagcgccgtcgttttacccgtcctccaacagtgcttccctaaagtgtacggtggtggctgcgctcgatggaggggctcaacggcggtttcaacatagccttgaggtcggggacctggcggcggcgtcggagcctctagcacaggggtttggcagcggcggctgctgctggaggtcccagcgatttgaggtcgctgcggctcccccaacagttttttggaggtcttcgacgtggtgacgacgcatcgagttcgacgggtccctgtcgccgccggcggttaggccaatggcatagaggaggattaggacgagaagaagctgtcctctctgttgcctctcctgtacagcccaacatactactatcatattgtctgtagctagcacatgcagaagatagactggcaggatgaggtggtggtggttcttccccagacccgtcactgctctggttgcatttattaccttttgggttgttgtcctatgaattgagcctaattagttgatattcaacagctggaggttatatttcctttttacactgcatcttcttggttgttcaacagcagtgatagcatttgttcacttagtgaaacagctatcttgttgtagcagtgatagcttttgttcccttagtgaaatagcttttggcaaattgtactatcttgttgtattggctagatgagtgtcctagatgtttaatatggcccgaggagtttgctaagatgtgtgacagaattcaaaaatatatttcaaaagaatttttgttgttacctctaaataaaagaataatgttctaaatgataactatattatgttgaatcatctctaaagagttccttctatttttgttcccactggttccatttacatggtcatgaagcagtttgcttgctggaccttttgcgtcgcttacatggctcctcccattatatctggcttttaggtaaagactattcatttctttgattgttggataactaagccagggtgatgtgaattgcttcttgctgattctgctgtatttaatacaaatttttcctatctttttaacagtgcttcagagggcaatgaattcttctgaagttttccattgttacctgttttcagtttcagtaaaaaactaagctcttcaatgtaaatgggacaacaatttgaatagttactataagatcttttgggatcaaaagatttacttgttgcaggcttaactttcatttacattgcagaaacttatcattggtagataaggatgtgttaaaaggggcttgcttagtacaactcaaggcgaggctaatactaagccattcagaacacgatagccatgacagccaggcaaaggcaacagaaaaaggaactacatatgcttgcattgaagtttctttggggaaccaggagatgctttaatctttattgatgtattgtcctatggtttgttggatagtcgatctacaaaattaatcctaacactcccaatttacctacaagagtcaatcttgataggcccaagatccccgctcaatcttcaaggaataggtttacttcatgataattcatgtctcatgttaatattgggagaggcaacccactatgctcagctcatggatcttcaggaatggagctgccagcatcttattgacaaacaaatacaaggaaaaatactccatgcacatcaacggttaatgcttttctatgagctggtcttaatatctcaaggctgcactgtgttaggctgaagcaccccagtccaattcttttgcctaccaaataaacttaccaacaccaagtcagttgagtgctgcaatgtgcaaattaaacaatatggtctctgtagcctgctcagcaggaaaaccatttgaaatacctgtggaaatatcccg

SEQ ID NO: 26797 - DNA, 1796 bp, Oryza sativa
  ref <308>: DATABASE ACCESSION NUMBER: AK102239
  ref <309>: DATABASE ENTRY DATE: 2002-08-28
gggggtaccgcactgtggcagccatggagtccggtgggctaatcgcgccatccgagacatgttcgtccgacggtcgtggcggcggcggcggcggctggcgcgccgcgcgcttcctcatcgccgtcgggttcctggagcgcatcgggttcaacggcgtgcagggcaatctggtgatgtacctgaccgggccgatgggcatgtcgacggcggcggcggccgccggcgccaacgcctggggcgggaccgtgctggtgctgacgctcgtcggcgcgctcgccgccgactcgcgcctcgggcggtaccgcgccatcgtggccgccggcgtgctccatctcctgagtttgggaatgctgacgatctcatcagtgatgcaaccaaatcatcctcacccggcgagctgccatgacgcagccgccgcctgctcgccgtcgccgccgccgccgccatctctcgcccgcctcgtcttcttccacgccgcgctctacctgctagcgctggcgcagggcttccacaacccgtgctccgaagccttcggcgccgaccagttcgcggcgagcgaccccggcgcgcgcgcgtcccggagctcctacttcaactggtaccagttcttcaattccttcggctatggcatctccaacaccgcgctcagctacgtcgaggacagcgtcagctgcaccgtcgggttcgccgtgtgcttggccacgacggcggtgtacctccccatcttcttgctcggcacgcgggcgtaccgcgccgagcaacccgtcgacggcgccctgctcgcgcgcctcgccaagacgtcctcctcggcggcgcgtgcgtggacggcgagggtgtttcgccggaaggatacctcttgcacagaacggcttctggcgagggaagaggtaggcgagaaggggttccttgccaagttgcttccgatctgggtgaccagcatagtgttcgccatcgtcagcgcgcaagaggtcaccctgttcatcaagcagggcagcacaatggaccggcgcatcggcgcgcgcgggggcctcgtcgtgccgcccgctgctctgcagtccattgtcagcgtcatcttcctcaccttcgtgccggtctacgaccgcgccctcgtgccgctcgcgaggcgcttcacggggcaccccgcgggcatcaccacgctccagcgcgtcggcgtcggcatggccatgtcctgcctcgccatggccgtggcggcgctcgtcgaggccaaacggctccgcgccgcgagcgacgccggcctgatcgaccggccggacgcgacggtgccgatgggcgtgtggtggctggtgccgcagtacgccctcgtcggcctatcgaaggtgttcggcatcatcgggctcgacgagttcttctacgaccaggtgcccgacgacctgcgcagcgtcgggctcgccatgtccctgagcgtgcgcggcgtcgggagctacgctagcggcgtgctcgtgtcggcgatcgactgcgcgacgaggagcgggggagagagctggttctccgacaacctcaaccgcgcgcacctcgactacttctactggatcctcgccgcgctcgccgctttggaggtcgccgtgttcgtctacatcgcgaagcgatacgtctacaagaacaaaggcgagccatgattcttccgagttcggattagagtgtgtaataagtctgaaaaatggtccacatgctcaaagatgtgtactctttcccgtttcataattcttacattttacataaggttaaggttaaacttttataactttaattatcaataactttaaagtatttagttt

SEQ ID NO: 26798 - DNA, 2332 bp, Oryza sativa
  ref <308>: DATABASE ACCESSION NUMBER: AK102240
  ref <309>: DATABASE ENTRY DATE: 2002-08-28
gccatttccttccgctcccaaatttcaaattccctccccttccccctccccctccccctcctcgccgaaaccctaatcgccgccgccgccgccatgggaggctcgcacagccgggaggacctcgacctctccgactccgaggacgacgactccgcctcccacgcctccgacgcctcctccgacttcgccaccccacccccctcctcctccgccaagcccagcgccgccaagtcctcggccgcggcggccaccccggcctccatcgacgcgatcgaccgccacctccgcagcctccacctcaagtacgccgagcccatctcccccaaccctagcccctcccccacctccgccgccgcccccgccgccctcaacgccgtcaagctctacctccacatcggcggctcctccccctccgcgcgctggatcatctccgaccgcctcgccgccgcctccttcgtccgcgccggggacgacgacgacgacgacgccccctcctccggcccatggtgcctcgtcgtggggtccaagatccgggccagggtcgggcccgagctgcagctcaagacgttccccgcgcagcgccgggtcgacttcgtcgccgacggcgtctgggcgctcaagtttctccacgccgatggctacccgaatttctacgccaagtaccagagctgcctgttcgagaacagctacggcgtcgccgccaccgatgagggccgcgccaaggtgttcgggaaggattttgcggcgtgggcgcgcccggaggacggggacgagtccatctgggaggacgcgacagacgggtttgtgccgagcccgagtcgcagcccgatgccgtcgcgtagccccattctgaagccgctcatggaggacttgagggagtatgaggagccagtggaggaaggtggagggatacagagccttgcgcttggtgcattggacaacagtttcttggttggtgattcgggaatccaggtggtgaggaatttcgagcatgggatacacggaaagggcgtgtcggtcaagttctccggagggagcacaaacttctcgacacccaagaaggcgcttcttatgcgtgcggagacaaacatgctcctgatgagcccggcaactgatgggaagcctcatgccaagggtgtccatcagctggacattgagaccggaaaggtcgtctcagaatggaaatttgggaaggacggagcagatattaacatgagggatatcacaaatgattccaagggtgcgcaaatggacccatcagagtctaccttcttggggcttgatgacaacaggttatgccgttgggacatgagggaccgtcgggggattgtgcagaacatagccagtgctacagagtcgccggtcctgcaatggacacaggggcatcagttctctaggggcaccaacttccagtgtttcgcgtcaacaggagatgggtcaattgttgttggttcacttgatgggaaagtccgtctgtactcgaagagttctatgagaatggcaaagacagccttcccagggctgggttcaccaattactcatgtcgacgtcacctacgatggaaagtggatcctcggaactactgacacgtacttgattcttatatgcaccatcttcattgacaaggatgggaaggaaaagacagggtttggagggaggatgggcaacagaattgctgccccaaggttgctcaagctgaccccgcttgattcacatcttgctggacagaataatatattccgtgaagggaggttctcatgggtgaccgagaacgggaagcaggagaggcatctggtggcgacggtggggaagtacagcgtggtgtggaacttcctccaggtgaagaacagccaccacgagtgctaccagtgccaggaggggctcaagagctgctactgctacaaggtgatccccaaggacgagtccatcgtcgccagccgcttcatgcacgagaagtacgccgtcagcgacaccccggaggcgccgctggtggtggccacccccatgaaggtcacctccttcagcatctccagcaagcactagcatctcgcctttctgctacgacatttggcggtttgtcgtccgtcccatatgttgtcttgtaacactcactacagatgaaccgtgtgccctttggtttgcctttaacctctcttcttttcttttcttttttacctttgtttttttacattatataagtacgatgatgatcatcatcaattcagcatcatcgtctatgggttgtgcttttgtttttcaagtacgatgataatcatcatcgtcatgagttgtgcccaggtttctatgtactccatatattgtagtattgacg

SEQ ID NO: 26799 - DNA, 1759 bp, Oryza sativa
  ref <308>: DATABASE ACCESSION NUMBER: AK102241
  ref <309>: DATABASE ENTRY DATE: 2002-08-28
ggctctactctattattccctttgcattgcattgatcgagtaggagtagtatgcccatggccatcgagtcatggctcaccaaggtccgctccgccatcatctcttccaaacccagcccctcgtcgtcgtcgtcgtcgtcttggaggtcgaagacggtcggtatcctggccttggaggtggccaccctcatgtccaaacttgtccacctctggcgatccctcgccgacgccgccctcgcccgcctccgccaccacctcatcaaccttgacggcgtccgcaagctcgtctcccaccacgacgccgccctcctcgccctcgcctgcgctgagctcaccgacgccctacgtgtcgccgcccactccgtcgccgcgctcgccacccgctgcgcggatcccttcctccgcgacttcgccgacgccttcgcggacttcgccgacactggccgcgaccctcaccggtgggtgtccacatggaaggacatggacaccagggcgcacaagatggacaagcaagtcgccgccacctccgccctccggactgccatggaggacctggccgacgccgagcacggactccggaagctcctccagaccagcagcagtcgtcgcctctccgccaccaacatctcgctggcggcggagcagcagcagctcattttcgccaagaagcaggaggtgaagcacctcaagcaaacctccctctggtcctccaccttcgacgccgtcgtctcctcgctcgcgcgggccgcgttcaccatcctcgcgcgcatcaagctcgtcttcggcgccgcccacgatcaccgcccgacgacgacaccgctgcaccggagcctcaccctctcctccgccgtccacccgtcctccgtcgacgtgcaagtgcaaccgccggtgtcgcgcaagtccatgtccatggatatgggcatgggggaggcgctgtacttggagaggcagaggcagagcgggctgttggagcgcagcgcggcggcgctggtgccgccgccggggacgctgggcgcggccgcgttggcgccgcgctacgcctgggtgataatctcgatcgagaggatggcgcggtcgccgcggctggtgggggcggaggagcgggacgagctgtacggcatgctgacggcgagcgtgcgcgcgcagcttcgagcgaggctgagtgggacggtggcggcggcggagccggggctggcggggcagtggcgggcggcggtgggagggatcctggagtggctggccccgatggcgcacgcgacggtgcggtggcaggcggagcgaagcttggagcagcagaggaagacgacgagggagatggagactcagacgctggtggtgcagacgctgcaaatggcggagcgcgggaaggtggaggcggcggtggcggagctgctggtgggcctcaactacctctgccgctttcacaaggagatcaccacctgccgtacccgtacgtgccaccacgacgatgcaccatgacaacgtgcatgctgcttcaagacgacgatgtacgattgccaatggaacagtatgcatccatccatccacaccgatcgtctgatccatgctctcatcttctcttctttagtttttcttttgtttttttgggatggatcccaattcccaagtacccaattggctaatggagtaggagatgcatgggctggcatctgggtgatctccagtactagttaagtcgattgatgagaatggagttttctgataattggagcaggatggaatcttgcttcattatattc

SEQ ID NO: 26800 - DNA, 1158 bp, Oryza sativa
  ref <308>: DATABASE ACCESSION NUMBER: AK102242
  ref <309>: DATABASE ENTRY DATE: 2002-08-28
gaccgcacaatctcatcactcttcacccgccgcgccgcgaactccggaaccgaacgccacacgcgccttcctctcacttaatccgccatgcttcctcctagggttgccccctcctctctggccgccgccgccgccgcggcgcctacctatctcgccgccgcggcctcgacccctgcttccgtctggctgcctgtgccgcgtggagccggagccgtggcagtgtgcagggccgccgggaaagggaaggaggtgctcagcggcgtggtcttccagccattcgaggagctcaagggggagctctccctcgtcccccaggccaaggaccagtctcttgctaggcaaaagttcgtcgacgagtgcgaggccgccatcagcgagcagatcaatgtggagttcaatgcatcgtacgcgtaccactcccttttcgcctactttgaccgtgacaacgttgctctcaagggattcgccaaattcttcaaagaatccagcgatgaggagagggatcacgcagagaaactcatgaagtaccagaacatgcgtggaggcagggtgcggctccagtccatcgtcacacccttgacagagttcgaccatcctgagaaaggggatgccttgtatgctatggagttggccttggctctcgaaaagcttgtaaatgagaagttgcacaacctgcacagtgtggcatcaaggtgcaatgatccacagctgaccgacttcgttgagagtgaattccttgaggagcaggttgaagccatcaagaagatctctgagtatgtcgcccagctgagaagagtgggaaaggggcatggggtgtggcactttgatcagaagctgcttgaggaagaagcttgaatggaggagacggtgtgaagggcagtagtaggtttcgtttcttccatccatgggatcatgcagctaaagaaagaaaataagtcgagtctgtgtattcatcaaattaagcacgcagtagcaatggagtgaatgaaccaaccaatttggtcatgaacttccccctgtgtctaggtcagtagagcttcagaatcatgtgtatgtcgcgcgtcctcgcagaaaaggaacatggcgcggctggctgtagcgatacttgtgatattgtggctatgcatggagtcatggtgatggtgtattttggggagc

SEQ ID NO: 26801 - DNA, 2730 bp, Oryza sativa
  ref <308>: DATABASE ACCESSION NUMBER: AK102243
  ref <309>: DATABASE ENTRY DATE: 2002-08-28
ggtcttcccctccgtctccgatggccggagcgacgcctccgcagccttcggggttcggatctctccactccgtatcctcgcctacttgggttccgttctaccaccatcttttaggaccccttttctcgtcctcgcggtctccttgtggtcacctgaattgaaggattggggatttcgccttcctctccacgaactcaccttgccgcgcgtcgagggaggagggaattactaccaccgggtgactcgtggtttcgtacgcagaaggtggcgaaatggacgagttcttcatcgggctcgaatcccggctgcggcgctcggtgaaggtggcggactccgtcatgatggggctcgtgaacgccgccatggaagacgcctacaagaagagcctctggaaggacggcgacctggagcgcctcgtccagaagctccgcttcgccgagctcgccatcatgcagctcgagtggagcctccgcttcgtgcgcggcgagatggagtccggctccggcggcggcggcgacggcgactgccacgagcagctgctcgacgacctcctcgagacgcgcgaccggatccaggcccgcctcgacgaggccgagctcgccgtcgccgacaaggaccgcgactacatgctccggaagcacgaggagcttgcctcgtcgcgccgcgaggcggcggtgcccgccgtctccggccgtgccagcgcgctccgccgggaagccgacgacgacgaggaacgccgcgtgttcggggagctgaagggctcggtggaccggcagatggcgaggatgaggttcaggctcgaggacgcgcggtccacgctcatggcgctcatggagacggtcagcggcgaggcgtcgccgatggcgaggctgcaggaggccgggcacgagggcgacggggtgaaatgcttgtcaggattctacagcatggcgcagctgctcatggagttccaggagatggtcctcgacgccggcgcagtgagcgacagcgtcacatcctcgttcgagttcatggagaggtccgtctcctcgttgaaggaggccatggacgagcagcagtggctggctaacgtcgagaaggagatgtacgcagcgaccatcaatggttttctcagagagatcagtgcgggatttccagttctgaatgattgttcttctccgggagagaggcagccacctactgagaatatttgggaggaaactgaacatctgaaggaaaaaaccgagcacaatcagaagagcctgaagggagatcaatgcgggatatctggttctgaatatctgacaacaacaaggcctgcggcaacagggcaatgttattcagaagagcctagcatctgtcatgaggaggttgagaggcttatagaagaaaagattgattcggagatcagatgtgaactgcaacatgtgttacattcagaaatattcagagacttggtgaggaaattggctgttctggatgttcagaagctaactgaagaaaatggtgaactgaacatcagagttgaactactctgtgaaatatatactacagtatttaaagatttggtgagtaaactaagttcagaatctgctgaacattttatcaggaccttcatcaaagatgaagtagaagctgtcatttttgcccggactttaaaagaaattaagagtgtgactgaaatggttcgcagtgagaagcatatcaaggaagaaaacaattgcagttttcctggggaaatagaaaagggtttagaacaaaatattgattttaatgtgctcagattcccagatgaaaatgcatgcaccaataatttgggaagattcagtatgattggcaatattgaacaactatatactatgaagatgcaaactagtggtgctagtgaagataaatgtacagattattatcaggtacctcttgagaaagagattttaagcagccctggtaattgtgacaggcaagattcagaagaaaattatctgctagctgaaatatcaacaggaaaagatggtgtttctgatgcatggaatggcaatgttgagcagtctttgcagcaacaggatcataggaagctgcacgtgggagacacagctttaaatctgagcatacctcctgaagaagcgaatacagagaatgccgaaatgaccttgattcttaatgagaaacttgatgtgattcactcaacaggttcaaattccatgcttgctgaacaggatcactttgatctgcaaatggctctagtttcattcactggtttccaggaagtgttcatgaattttgaagctgttacctgcgaaaagttagaaacagctatgctgagattgaattatttgaaaaagcaacagggaaatctgattgaacagatgcgctctcttaaaatgagcgaacagagttatcagatagctttcatcaggcgatgccacgatctccaaactgcggaagcagaggtggatctgcttggtgatgaggtggaactgcttcttggacttctcaggaagacatataaagcgttggatcgctattcaccggttttagaacactatctcggggttagggagatgctgaaactgcttgggaaggagctagccctgaggcatcaggtttagtacagtgttgttcgtatcagtctgttgatcagtgaaacatatgcttcatacacccagattaacccatagacctggttcaggtgcatgtattttctttcgcttgtagcttgtttatattttaaagaaaacattaggatcagtc

SEQ ID NO: 26802 - DNA, 3758 bp, Oryza sativa
  ref <308>: DATABASE ACCESSION NUMBER: AK102244
  ref <309>: DATABASE ENTRY DATE: 2002-08-28
gaattgccacaggcaccgtctcgtcgtctccgtggcgacagcgccgccgctgctctgtcgccggcggccagcgcaaccgccgcctcttcggctcgccggcggcgcgcggggactcgaggaaggcctctgcgtcgccgtcactactacccatagctcgagtatgcaacgcgtggccatctccatctgctctctattactactattttcttagcgtgaatctgaaaattgaagcgatatagttgcagacgatggggattctcaaactatacatactagttctgatagagacaaatttgcacatgattttcacgaatttgagtagtgaccatcattcagaatgctcaatctgcacacctgagttgtggcagctagattcttgtcttcaactctgttcatagagttggaaaattaatatgccttgaagagatcttagcctttttagtaccatctgatctaatagcacaccataagcaaagaacaggccaaatgtgatgccaaagataaccttgtcaccgaattgatctgtggatgaagtagggctaggaagtgctcttgctgaattacagtggtgactgagcataccaccacatagctttggattaccagtgaagcttgagttgtcaaatgtatcaaactggcctccagttggaatagccccttccaggtcgttgttgtaaacattgaatgcagaaaggaagtttagcttgttcagttctaaagggattgtgcctgttagattgttgttagacaagtctagcatgaccagcttggtgaggttgcagattgcttgtggggtctccccagagaagctattgaagctcaagttgagcatatcgagtgccttcagctgactaatctctggcgggatcgcacctgtaaaaccatttttggctatgtttattgttgtgtggatatattggtattgtcggtttttgatgaatggaatgccgtaaaatctcatgtttgggacacttacatccagattggttctcttgtctgacttcagcattggaatctgcgttaatattgttggaaattcacctgtaaggttgttattggatatgtctagatagaagaggaagttgaggctgttgatccaggcaggcactgatccgcttaattgattattggataactgcagcaccttcaattttgtgagctttgatagccaaagagaaatttttccatgtaaagaagaaccacttatttctaggtactgaagattttcaaaaccatccattgtttcatctgctagcaatgtctcatggttgaagttccctccaagaagtagagtttttaagttgctaaagctcttgaggatgtaaagtgccttcgtgatattcgtaaaatcattccaaccaactgacaggcaggaaagagacctcagtctgtccattctgtgtgagaactcaccatggaatttgttccacgaaagtctcagtgcaatcaaatttgtgcaatcataaatgctttctggaattgtaccattgaagttgttcacgagaagatcaattatcattagattagataggctggaaaagttgatcttgccaaggtctccactgaggtagttgatcttgaggtcgaggattttgagatttgtgcagttgcctaaagttgatggcagctccccatacaagtagttctcacccaaatggagctccttcaatctcttgagctgacctatggacttgggtatgtttccactgaatatattctgttggagatcaaggatagacaatttgctgagctttataatgttggcatcatcaagtactccatttagatcattgtttgggaaagaaaggtgctccaatgatgaagcattgaatagttcatctgggagtggacccttgaagttgttgcggccacccttgagcactctaagcatggagcagttgcctatgtctgagggtatgctgccaccaaattgattggaagagaggtcaagtacgccgaaagatggtgagttgatgcacaaagaacttggtatctgtcctataaagctgttgttgctggcattaagagccaccagattgttcatcaccttacatgtggttgttggaaatttccctgtaaataagttgcttgagatgttcagtacctgaagaggccagatagttgattgaatgaagagctcttgcaaagctccactgaagtgattgaagctaacatcaagaacgacgatgctgctcgatgacaccaacccctccaatggaagttcaccagacagcgaattgtgtgaaagattgagctgcagcaggccggtgaggctgccaagagacggtgagatctgcccttcaagggccttagaagcgagcaaaatatcagcgatcctcatgtctgcattacaggtgatgccttcccatgtgcagcaatttgtgccgttccgccatgatgcggagaggccaccgtctcctgagaggccagcaaggaactggaggaggacactcttctcctggtctatgcaggagtcggtggaagaagctaaacacagcaccgtcagcagagcaaacccaagtaaatctgtgggtaatttgctgctgattctgctgcatggaaagtggaaaggcctcatgttgctagctgatcgagtggctagtcaatggtcatcacaaagaataagtggtcaaggtcatcaggaattcaggatcaaaagatgaattgagagttgaatgagagtgacaacctgcagtgcttgcttgctaccgatagtacagtcattgattgggcaggcagtaacatcatgaattgtgtcgatcacaactttattcagcagtgaaggaaatatcctggaacatatggtgtagtaagtgtgctcagccctggttgatgctggagctggaggccaggacacaggtccagcgcccgtgatcctgccttgcagagcccttggaaaattgcaggtgaaactagcatgcatgcaggttgaaaagtttcggtggaatatgccctgaagagctgttgaagctcaagaagagcactgtgagtgatttcagctggccgacctctgaaggaattgcaccagtaagcttatggtttccaagatttagcattgcagggagagcattggtcataccatatgtaagtgatggctcttcataatcagcataaacaggaagttcaaatacccttggatccaaatgattgtagcattggcatctccattattgctactgggagatcccttctaagattgttgtttgatatatctatgaagtagaggaagttcaggccatggatccagtctgatattggtccagtgagttaattgtaggatagatccaaaacttccattttgagcagttttgaaagccaacgaggtattttttccagacaacgagcaagaaggtaccgaaagaacctgaagactctgaaaaccatcaactattggtatgccatctggcatggccttgcccttgaagttgattcccataatcaaagtgttgactttttgcagttcttgagtgcatgaattgcatttgagatattcccaaaaacattgttgtcaagtgataggaacaagaggtacttcaggttctgccagtttcatttggaaggaagctggaattttttttcccaatgtaatgagtagagggtatagtctgcccagtttcagggtttctccccctccagtcggaggctgtgcctcggaccatgctcgacatgcttttgtcgatgtaactatacttttgtactttgttttttttttactaattcttaatgaaattggttggccactctttggctgacccggc

SEQ ID NO: 26803 - DNA, 2027 bp, Oryza sativa
  ref <308>: DATABASE ACCESSION NUMBER: AK102245
  ref <309>: DATABASE ENTRY DATE: 2002-08-28
gcctaatctgctcccttcctccgattcaaaaaaaaaaaaaaaatccaccgaaacctcgccaccctccgccgccgccgccatggttgcgaaccccatactcctcctcgggcctccgatcgccgtcccagatggaggcggcgcagccgccgcggtccaggtgacgtggctctccgggcggccgctcacctcgggcgacccctgcctcgacttcttcttccagatcgtccccggcgacaccgaggtcgccagggtcggcgatctcctcgacgccgcgtgggtgcgcgacccgctcacggcgctcaagctcgtgtgccacctccgcgccgtgcgggggctcggcaaggccgaccgggagggattctacgccgccgcgctctggatgcacgaccaccacccccgcacgctcgccgccaacctcgccgccttcgccgagttcggctgcttcaaggacctcctcgagatcgtctaccgcgtcctccacgggccccgcgacgaacacaaggaggaggaggaggagggcgatgaccagaccgagtccgaggatggccgccgccgccgcccccgcctccgcttcaagcgccgctgcatcgaccatgccgaggcggcgaaggccaggctgcaggaggaggcgcagctcgcgcagtccgtgctctcgcggtacggctcggacgtcagcttccgcttcctctacgacggcgtcgccgacacgttcgccgagctgctcaagtccgacgtcgagcacatgcgcgccggcgagaacgccaagatcgggctcgcggccaagtggtgcccgtctctccgctcgtcgtacgaccgggcgaccctgctctgcgaggccatcgcccgccgcatgttcccgcgcgagtcgagccaggagtacctcttcctctccgacgagcactacgcctaccgcgtccgcaaccggctccggcgcgaggtgctcgtgcccctgcgcaaggtcctcgagctcccggaggtgtacatgaccgcgggcaagtgggaacagatgccctacgcgcgcgtgccgtccgtggcgatgcggcagtacaagggggcgttcgagaagcacgacaagtcgggcgtcgcaggcttcctggacgaggtgcgcaccgggcacgcgcggctgcatgtcggcgccgcaatgccgcacgagctggtggccgctgcactcaagggcgagcacgacgaggccgccgagctccagtggcgccgcatggtgtccgcgctggcggcgggcgggcggctgagcaactgcatcgcggtgtgcgggctgtcgtcgggaggcgacgtggcgaagccaccgggcgcggcggccgtcgcgctggggctgctgatctcggagctgagccaggatccatggaaggggcgggtgatcaccttcgacgcgacgcagcagctgcacaaggtgtgcggcgcgacgctggtggagaagctccggtcgctggcggcgcccgtgcgcgccgcccccaagggcagcagcctgaacctgcagggcgtgttcgaccgcatcctgaccgtcgcgacctacggcgggctggccaaggacatgatggtgaggagggtgttcgtgctgagcgacatggagctgaacgccagcgcgtggcgggtgcaggacgagctgaaaaccatcaggtccaagttcacggcggaggggttcacggcgccggaggtggtgttctggaacgtgggcgcgccggcgtcggcgccggtggtggctaccgaggcgaacgcggcggtggtgagcggctactccaagaacctggtgaggctcttcctggagtgggacggccaactcacgccggccgccgtcatggctgatgccatctccggcccggagtacgactcgctcgaggtggtggactgaccgaatccatcctctgcttccgtatgataagagacgatcagtagtagcttgtttgagtgagatctagtgagtgttttctgcactttgaatggaatgagtttgctggatgcttaatttggttgatctaatgaatgaaatctagtgagatatcacgccttggctt

SEQ ID NO: 26804 - DNA, 3102 bp, Oryza sativa
  ref <308>: DATABASE ACCESSION NUMBER: AK102246
  ref <309>: DATABASE ENTRY DATE: 2002-08-28
gaggaacagtgaaccccagccagtgggcgctggccccctacctggctacctccccgtccttcctcccctccctcgcgcctcctcccaccggtaaactttttcttgcgttgctttgctttgcttttcttctttctccggattcgaatcattcctctctatctatctcatccaacccacccccccttaaccccgcgattagcagctcattaattccactccaaatttaatgcatccatccatcaataatcccccatcacaagcccgaagcgaagcgcagccaccacaaccaacgcgagcagccgcggatgcgctccaatttattgctgctattcccccacacatcccccctcctcctctcctctccgctcctcccatcgcgtagcgtagagtagagtagccccgcgccgatccgcccgcttccagaagcttccagatccgcgccgcttcctgcaatggtgtagcgcggcgtgacggggccgggcgagatgggcggcggcggcggcgggggattcttcgtcctgctcatgctcggcgcggtctacacgctccatgctacggcactgcctagtccagctccacatccatcaggttcccctgatacaagaattttagggccccgaatttctccagcattttctccaagggcaatgtctccagaatccactggcggtccggtgcaccctccttcacacaagcaccacagaagaccatatcatcctcattcgccatccccatctccccttccacaaggttgtactgataactgctctgatccaatgactacaacaccgattggctccccctgtggttgtgtgctgcctatttgtgttattgttgatctggatgtagctccatatttgctattcatgcgcatagcagaactagaagttgaagttgcagctgggacgtttcttaaacaaagccaggtgaagatcatggctgcaattccaagtatccaggatgaccagaagaccagggttaccatttatttggtgccactaagagaacagtttgatggctatactgcctccctgatatctgataggttctggaataataagattcagatcaattcatctatttttggagattatgaagttataaatgttacctatccaggcttgcgatctccgccaccatctctgcctgagacatctcatggatctgatccaacaggaaccggagaagatccaataaccgctgatgtgcaccatgggaagaacaagaaattagattcatggatcattgtggtagttgcagggtcttctatcacacttatagcagcatgcattgggcttggggttttactattaaaatggtataaacttagacagcttcaggaggctgtgagccctgcaactaccccagcagttaatagaagatatggtggcagatcaactttgtctgttagcagggtgagctctgcatcggcgtcaatgctctcaacagtggcaacttgcacaacatcagtaaagacattttcactttcccagcttgaaaaggccactgatggttttgattcaaaaagagtgttgggtcaaggtgggtttggacgcgtctaccatgggaccatggatggtggagacgagattgctgttaaattgctcacaagagaagacaggagtggtgatcgagagttcattgcggaggttgaaatgctcagtcgactacatcaccgtaatcttgtcaaattgattggcatttgcattgagcacaacaaaaggtgtcttgtttatgagcttatacgcaatggaagtgttgaatctcaccttcatggtgctgataaggctaagggcatgctgaactgggatgttaggatgaaaactgctctgggtgcagctagaggcttagcatatctacatgaagactcaaaccctcatgttatacatcgtgacttcaagggcagcaatatattgttggaggaagatttcactcctaaggttactgattttggtttagcaagggaggcaactaatggaattcaacccatttctactagggtaatgggtacttttgggtacgttgctccagaatatgccatgaccgggcatcttcttgtgaagagtgatgtctacagttacggtgttgtcttgctggagcttttatcaggaaggaagcccgtatgcatgtctgataccaatggtcctcagaaccttgtgacttgggctcgtcctctgctatgccataaggagggtttggagaggttgatcgacccttctctgaatggcaatttcaactttgatgatgtagctaaagtagcatccatcgcttccatgtgtgttcacaatgatccgtcacagaggccattcatgggtgaagtagtgcaggcactgaagcttatttacaatgatgcggaggcggcttgcgatgattcttacagccacagggactcatcgtgtgaccagtacgatgactaccatggggccctggcccttgacagcggtagtggtagctggtggaatagaagctcaaatccttctgggttttttgacaaccggaaccccctaccagttattaccatggaatacagctctggcaggatcgaaggagcgcgtgacccccgctttgcattgtcaacaggtggtcatgcacaatcaccagccctgcagaatagatcaggacccatccggatgaagaaaaagcttgcctcattttaccggtctagaggtagcttcagcgagcatggccagctgcctcgccattgattaataatctagtgttagactgttagcttcagttgacttgggattgaggctgtggggggatttcttttacctctcgttgattcttgcctccggttagtgtacagttttcccgacaatcctggtgaccgccagtatagatgatgttttcatttgccttaatttctgcctccccaaagaagcaaatgaggatatggggttggcaggtgctctctaattttgcgatttgcggttcattcctcatgcatctctgatttgtgtaatctgggtaggaaaatttcttgccagaattctgggcatcatgttgtaatgggttgttaaagaattcgattattcgaccctcccctcgttgccgaggctgtacatgtcaggtgttaccgtgttagcattccttccgagc

SEQ ID NO: 26805 - DNA, 1910 bp, Oryza sativa
  ref <308>: DATABASE ACCESSION NUMBER: AK102247
  ref <309>: DATABASE ENTRY DATE: 2002-08-28
gaataacaagaaaaaaaaaccagcatagcaaagcaagggtttagggcggcggcggcggattccgcggcggccatggcgacggcggtgcggctcctgcgaaggagcctgcgagggggcgaggcagcacctcggttcttatccgcttctcaaaatttggtacgactagttgcaaacaacaccagatcagttgatgttggccaaccaacaccccgatctcatcctgagttattagctgaaggagagattacaccaggtatcactagcgatgagtacatcttcagaagaaaaaagcttttggaggttctgccagagaagagcttggccattattgcgtccgcagagcagcagatgatgactgatgtagtgccatactcattcagacagaatggtgattacctgtatattacaggttgtgcacaacctggtggtgtggcagttttaagtgaggaaactggtctgtgtatgttcatgccagatacaagtaaggaggatgtggtctggcaaggtcagacagctggagttgaggcagctgagaatttcttcaaagcggacaaagcatttccacttagtgagatgcaaaagatccttcctgaaatgattgagcggtcaaaagtggtatatcacaatgtaaagacactttcgccatcttataagaacttggattcctttcgtagggcatcactcaataataaagtaaaagatattgcatactacactgatgaactgcggtggatcaagtcaaaatcagaaattgggttgatgcgagaatcagcatctattgtttctcagtctcttttacaaacgatgttgctatctaggacccatagggaggaaagccaactggcagctaagatcgagtatgagtgcaaaatgaggggtgcccaaagaatggcgttccatcctgtagttggtggtggagcaaatggcagtgtaatacactactcaagaaatgacggaagggtcaaagcaggtgaactactgctcatggatgttggctgtgagtatcatggctaccttagcgacctgactcgaacatggccaccctgtggcaggttttcacctgctcaggaagaactatacagcctgatactggagacaaataaggaatgcataaagctttgtaaaccaggcgcaagcattaacgagatacataatcattcggtcaagatgttgataaagggtttccaagaacttggaattttagagaaggggaaatccatccaatacaattatttgaatccaacagcaataggtcactcgttaggaatggatattcatgattccgtcaagcttagcaaggacaaacccttggagccaggagttataataacgatcgagcccggggtttacatcccaccggtgccaatactgaaagagaacgccccagataggtaccggggcatcggaattaggatcgaggacgaggtcctcatcaccgagtctggtcacgaggtcctgacggcgtcggtgccgaaggagatctctcacataaccacccttatgaacatgggtagtaactccatgatggatgcccatgagctgagggctgcctgcagttgagaagttcagacaatgctgtcctgatgcatcatccctcttccctccagcgatcttcgcatccaaattccaattgacattcattcttcgttaaagctgagagatgaatcgggattatgaaggctcaagtggggttatggtttttgagaaacccgaaccaccctgatcgtctcagggctgtacgggtttttcgctggttttcacgagaaaaaccagctgttttcagtgtttgcaattttttttagctttgttaaggactgaaatttgtaacatactacctcagattatgtacaaattcagatggtgacagaaacaaaagcacgaaattagggtcacaagaagcccctgaaagt

SEQ ID NO: 26806 - DNA, 3483 bp, Oryza sativa
  ref <308>: DATABASE ACCESSION NUMBER: AK102248
  ref <309>: DATABASE ENTRY DATE: 2002-08-28
gccactccccctccccctccgccgccgccgccgccgccgcccatccccgcccgcatccgcatccacatccgcatccttcccccacctcgatccccgccctccacttagccctagaacccactctgcccgccgccccggcgaaaccctagcagcctcgtccgggcggggcggggggtgggggtgggggaggggagaagcatcgggggccctccggcgaggaggagaaaaccagcttcggggaggtgagcgaaggagaggggaggcaagatgaggatcatgataaagggcggggtgtggaagaacacggaggacgagatcctcaaggccgccgtgatgaagtacggcaagaaccagtgggcgcgcatctcgtccctcctcgtccgcaagtccgccaagcagtgcaaggcccgctggtacgagtggctcgacccctccatcaagaagactgaatggacaagggaagaggatgagaagttactgcatcttgctaaactcatgcctacgcagtggaggacaattgcacctattgttggtcgaacaccatctcagtgccttgagcgttatgagaaacttcttgatgctgcctgtgcaaaggatgagaattatgagcctaatgatgatccaaggaagttacggcctggtgagattgacccgaaccccgagtcaaaacctgcacgtcctgatcctgttgatatggatgaagatgaaaaggagatgctttctgaggcaagggctcgcttagctaacaccaggggtaaaaaggcaaagcggaaggcaagagagaaacaacttgaagaggcaaggcgacttgcctcactgcagaaaaggagagaattaaaggcggctggtattgatacacggcagaggaagagaaagagaaagggtatcgattataatgctgagattccttttgaaaagaggccgcctccaggtttttatgatactgttggtgaggacaggccacttgagcatgtacagttcccaaccactattgaggagcttgaaggtaagagaagagtagacatagaggcacaattaagaaaacaagacattgccaggaacaagattctccagaggcaggatgctcctgctgcaattatgcaggcaaatagactcaacgatccagaagctgtcacaaagaggtccaaattaatgcttccaccaccccaaatctctgatcatgagctagaagagatagcaaagatgggtaatgctggtgatccttctttagttgaggaacttggcgaaggtagtactgccacaagagcattgctttctagttattcccaaactccaagacttggaatgacaccattgcggacgccacaacgaactccagctgggaagggtgatgctattatgatggaggcagaaaatctagcgcgtctaagggagtctcagacccctcttttaggaggggataacccggagcttcacccatcagatttctctggtgttacaccacgtaagaaggaaatgcagactccaaatccaatggcaacacctttggcaagccctggccctggtgctactccaagaattggaatgacaccctccagagatggaagttcttttggtttaactccaaaaagtactcctttccgagatgagcttcgcataaatgaagaggtggatatgcaagatactgctaaacttgagcttcgtaggcaagctgaattgagaaaaagcctacgatctgggtttgcttctattccacagcctaagaatgagtaccagatagttatgccacctatcacggaggaggagaaggaagaagctgaagagaaaattgaggatatgtcagacaggcttgcacgagagagggctgaggaacaagcaaggcaggaagccttgctcagaaagagatccaaagttttgcagaggagcttgccaaggccaccggcagcttctatagaaattctccgacaaactctaattaagggtggtgaaagcagaagcaggagcaccttcgtgcctcctacatcacttgaacaagctgacgaactaataaatgaggagcttcttcggctccttgagcatgataatgctaaatatcctctagatgagaaaactcaaaaggataaaaagaaaggaagcaagcgccaggcgaatgggactccttctgtacctgagattgaagattttgatgaagacgaattaaaagaggccaattctatgcttgaggaggaggttcaataccttcgtgtcgccatgggacatgaaagtgaatctttggaagattttgtgaaagcacatgatgcatgccaagaggaccttatgttttttccaaataacaacagctatggtcttgccagcgttgctggaaattctgataagatagctgctttgcaatatgagtttgaaattgtgaagaagagaatggatgatgaagctaagtaggcttcgcggcttgagcagaaaatcaagcttctgacacaaggataccaggtacgagctggtaaactctggtcacaggttcaagatacattcaagcagatggacacttcagcaacagagcttgaatgctttcaagagctgcagaagcaggaacagatggctgcatcttatcgtataagaaatttgactgaagaagtaaacaaacagaaagcattagaacggactctccaaagccgctatggtgatctgttaactagttacaagaggatccaagagcagcttgaggagcataagaggcaactgatgatacaggaggaaatggaagcacagaagcgtgctcaggaggaggaggaaatggaagcacagaagcgtacgcaggcagaggaagaaaaagaagcggcgaaagctgaagaggaagcaagaaagatggatagggctgctgatgaagaagcggcaggaagcaaacaagtcaatgaggatcagatggatgttgacaactctaatgctgatggtgatgaattcgtaggtccgattcccccaggaccaggtactcaaggtgacgacaatgtggtggcggtcgaagagaactctagctcgcagagcggtgatactgctaccacggaagatggatcttgtggcatgatcgacgcatcaaaatcaggaggtcaggatcacatcgacagcaaggatgaacttcccactgttggtgccagtctagatgatggaagtgctgctgcatcttctgatcaagatgtctcaactgaggtgaatgccactgtccctgaatagaatgtcatttcttgtacttcatcttcgagggcggcacagagaaagctaagagggacggataccttgagagaaaaaaaagaagaggcaaattgaatgtccaaagctgtgcactgaatttttattcgctgcttgattgttagtgaacgacaaaatgcgggactaagcttgttgtacaatgttaattttgtcaattcccatcgaggactctcagctcttagaattgctacgaaagaatgttagttcgatgtactatctgagaaattgaacttgaaaaaagaaaaaagaaacaatgccgat

SEQ ID NO: 26807 - DNA, 2253 bp, Oryza sativa
  ref <308>: DATABASE ACCESSION NUMBER: AK102249
  ref <309>: DATABASE ENTRY DATE: 2002-08-28
gagggacgacttgtatggtcgtctctgtctctctgccgtgttggacggagattactcactactatagtccatccccgtgggaacgaacatggattgagctcctctttgcgcacgccggaaataccccgatggatcgccgtctcatcctgtccgtcgccgtcgccgtcgcgctgctcgcgccccgcgctgccggcgagccatggccggtgtgcgggcaggacttcggcaccttcacgcccaagagcaggttcttcgccaacctccagctcatcgccgccacgctccccggtaacgcctcgtcgtcgccggacctctacgccaccgccgtggacgttggcgccgtcccggagcaggtcaccgccgccgcgctctgccgcggcgacgtcagcgccagctcctgcctcggctgcctcacccaggccttcgccgacctgcccaacgcgtgcggcaactccagggaggccgccacctactacgaccggtgcatggtcagctactccgccatcaacttcctctccggcggcgccggcggcgaagacccggcgaggatcgacgcgtacacggtgaacaacgagaacaaggtcacgtcggagcaggggcggtacaaccgcctcgtggcggcgctcgtcaacgccaccgccgactacgcggcgtacaactcgacgcggcggtacgcggccggcgaggccgacttcgacgcggcgctccccaaggtgtacagcctggcgcagtgcacgccggacctgtcgccggcgaggtgccggagctgcctcgccaagatcgtggcgcaggagctttggtcgtacaaggacgacatcggagggaggaccctctccgtcaggtgcagcttccggatcgagaccaagcctttcctcaatggcacgacgatggtgcggctaccggcgacatcggcgccgtctccggcgccgccggtcaacgcgacgccttcagcggccacgccgggacgagagacaaagtacaaggttccgcgcctggttcttataatactgctccctataatagcagccgtaaaccttgtcgtttgcttctgtgtctggaggaggaagcgtccagtaataacaaaagcaaagcagacaaatgccaactattacgctgaagcagatgacgttgacagcgtagactccatgctcatggacatttctactctgcgagctgcaactggggattttgcagagagcaacaagcttggtgaaggtggatttggagcggtgtacaagggtgttcttccagacggcaacgaaatcgcagtgaagaggctgtcaaagagctcaacacagggagttcaagagctgaagaatgagcttgctctggtcgccaagctgaggcacaagaacctcgtaagctttgtaggcgtctgcctggatcaacacgagaggctgcttgtctacgagttcgttcctaaccggagccttgacctgatcctctttgacactgagaaacgcgagaagcttgactgggaaaagaggtacaggatcataaacggcgtcgctcgaggcctgcaatacctccacgaagactctcagctcaaggtagtccaccgtgatctgaaggcgagcaacatcttgctagacgcgaacatgaaccccaagatctcaaactttggcctcgcgagaattttcggtcaagatcagacccaggctgtcacgaaccgtgtcgtcgacacatatgggtacatggcacctgagtacatgatgcgtggcaactactccgtcaagtcagacgcgttcagcttcggcgtcatggtgctggagatcgtgacgggaaggaagaacaacgacttctacaacaactctcaccaatctgaagatctcctgaacacgatatgggagcgttggatggccggaaccgtggatgagatggtagacccggccatgagcaggtacgtctcggcgagcgacgtgcggaagtgcgtccacgtagcgctcctgtgcgtgcaggaaaaccccgcggatcggccggtgatgtcgtcggtggtgatgatgctcgacagcgagacggtctccctccaggtgccctccaagccggcgttcttcgccaggaacggcggcgctaaacccggcgtcgcgtccgacgagtcgaccgcgtcagtgtagaacctgtcatagagagagcttcgatcggtccaggatatggaacttcttgcgctgctgattagtggctcccactctgaaaggaggattgtgctactgtacggacaatgtaagaatcatgaaaagtttgcacaatttttgt

SEQ ID NO: 26808 - DNA, 1217 bp, Oryza sativa
  ref <308>: DATABASE ACCESSION NUMBER: AK102250
  ref <309>: DATABASE ENTRY DATE: 2002-08-28
gtagggtctctgatagataagactagtttcttgccacatgagaatgctgcatcttggtagtatgttatcctgtttgcgacatctcaaatggccactgttggatttatgatccaggaaagacccacatctttctgtcacccgccaaactatcctgttactttttatggcctgacaaacgtaagaaaatacttgctcagggaaagttaccaaccatctataaaccttgggtaaggagatatattttatttttgagatgctttctactgttgccgggactcttggcttgattatatttggaaggttgagctgttaaccttgctgtccaggctgcccctataacattttaagaactgataaattacaaatctgaaatttcacaaacacattcggtcatccactctggcaccttgggacacaatttatttgattttctaggtcaatgagagagccatttttcatgactagttagtggtatagaacaagtttagatttatcaaattccacattttcttatggaaaacaaagctttcttcttctttttttgactaacaaagctttcttattgattatgtattcttgttacactgccagcaagaatgtgaggagttgtcccagaaggtaactgaactgacagccgtaaacagcacactcatgacagaactcgacaagcttaagaaggactgtgaagacatggaagcggaaaattcgcagctaatggatgagatggtgcagtccgagggctctagtgttatagccactttgagcgtcaagattgacacgtcaaaagaccgccatggtagcagtagccagctaaataagcacacaaatgatgacagcaaagggtagtttgattgattgagaacatgaactggaggttaactctactctactgagaccatgagacgatgtgctttagccgcttattgttacccccatcaccatcagcttgttggtcattgctttctggagctaccatcgtgtgtgatatcgagttttcgtcacctcatgctttcgtgagggacctgtaaattgtcaagcggtacagctagttagtattagttaagtggctaagccaccgagaagtgtgtactccaattgatattatttctgtaatacctgagccttattatagttgcggacttcttgcgataatggacagtttttgagtcctgatggttcagtgatcaataatattatggaaatacaaacatcatttt

SEQ ID NO: 26809 - DNA, 3555 bp, Oryza sativa
  ref <308>: DATABASE ACCESSION NUMBER: AK102251
  ref <309>: DATABASE ENTRY DATE: 2002-08-28
gagctggattccatgtgccaagatgaacatttcttttccatgtggaacgaacctctcagctaccaccatgtgcattcccacccccaaattcttagaaattagcttgcatataagttggaacggtatgaagaatgaactttccatctagccacagtcgtcatggcgcgggcaatgatgttgttgctcttctgttcctatgctctggccttggtctctgctgggagcagcagcagcagcaatgccacagccgatgagctcgccctcctgtccttcaagtccatgctatcaagcccatccttgggtttgatggcatcatggaactcatccagccacttctgcagctggacaggagttagttgcagccgtcagcaacctgagaaggtcattgcgctgcaaatgaactcttgcggcctgtctgggcgcatatcgccgttcttgggcaacctatcctttctcaagacactggaccttggcaacaaccagcttgtcgggcagataccttcggagcttggtcacctcagcaagcttcggatgctgaatctgagcacaaatttgctccgaggaagcattcctgtggagatgagaggatgcaccaagctcatgacccttcacctaggcaataaccagcttcaaggtgagatcccagctgagataggttccagcttgaaaaatctcatcaatttatatcttaccagaaatcttttgtcgggagagatccctcaatctctggccgagttaccatcgctggaactgttatctttgtcgcacaataaattatctggagaggtaccatctgctttgagcaatctcacaaacctcttgaatattcgtttctccaataacatgctttcaggagtcatcccttcatctttaggcatgttgcccaatttatatgagctcagcttaggttttaacaatttatctggaccaatcccaacttctttttggaacatttcatctttgagggcgctttctgtccaaggaaatatgctaagtggaaccatacctgctaatgcttttgaaactcttccacatctcgaggaattatacatggaccacaaccacctccatggtaagattcctgtctcgctgggtaattcttccaatctgtcaatgattatccttggcgctaaccttttcaacggcattgttccccaagagattggaagactaagaaagttagaacaacttgtactgacacaaactttagttggagcgaaagaacaaaaagattgggagttcataacagcattagctaattgctcccagttacaggttttggtattgggtatgtgtgagtttggtggggttcttcctaattcactttccagtcttagcacgtcgctaaaatatctctctctttcatataacaatattttgggaagcatacctaaggatattggtaatctcttcaacctacaagtccttgacctcgcttggaactctttcatcggaactcttccttcatcccttggtaggcttaaaaacttgcactattttaacgtatacaacaatgatcttggtggaccaatcccatcgacaataggaaatctcacagagttaattacgttgtatttgatgtcaaacacctttagtggtaggttaacaaactcacttgcaaacctgacaaagttgacagaactggatctttctagtaataacttcataggcccaattcctagtggcttgttcaacatcaccacactttctatagctttggagctatcctataacaaatttgaggggtcaataccacaagaaatagggaatctcgtaaatcttgtaaaatttaatgcagagtcaaataaattatcaggtgagatccctagcacccttggacaatgccagaatctccaggatctcactctccaaaacaacatgttaaatggtaatatcccagaacaattgagtcaactaaaaagtctacaaactcttgatttctccagaaataatttgtcaggtgaaatccccatatttatagagaactttaccatgctctcttatctcaacctttcattcaatatatttaccggagaagtgccaactactggtatatttacaaattctactgcaatctcaatccaacacaatggaagactttgcgggggaataactactctacatttacctccatgttcttcccaattaccaaagaataaacataaacctgtagtaattcctattgttatttctcttgttgcaacactagccgtcctctcattgctatacatactttttgcttggcacaagaagatccaaacagaaatcccttcaactacatccatgcgaggccatcctctggtttcttattcccagttggtaaaagcaacagatgaattttccatagccaatttgttaggttctggttcatttggttctgtgtacaaaggagagctagttgctcaaattggtgaaagcccatattatgttgctgtgaaggtactaaaacttcagacttctggtgcgcttaagagttttgccgctgaatgcaatgcactgcgaaacctacggcaccgaaatctcgtgaagataattacagcctgctcaagcattgataacagcggcaatgacttcaaagcaattgttttcgactttatgcccaatggcagtttagaaggctggttacatcctgacaaagatgaccagattgatcacaaatacttgaatcttcttgagagagttggcatactacttgatgtggctaatgcgctggattatctacattgccatggaccaacacctgttgtacattgtgatctgaaaccaagcaacgtgcttttagatgctgagatggtagcacatcttggagactttggacttgcgaagattattgttgagggcaactcattgctccaacagtctacaagctcaatgggatttagagggacaatcggctatgctcctccagagtatggtgctggaaatacggtatcaactttaggagatatttacagctatggaattcttgtgttagaaatggtaactgggaagaggcccatcgataacaaatccatacaaggattgagcctccgtgagtatgttgagctgggtctacatggtaaaatgatggatgttgttgacacccagctgttcttgggccttgagaatgaatttcaaaccgctgacgattcttcatgcaaaggagggatcaattgcctggtcgcattactcaggcttggattgtattgctctcaggaaatgccgtcgaatagaatgttaactggagatattattaaggaattgagttcaatcaaacaatccttgtagggaacacataatatatcttcgagctgaatgacagtttggagttcattccttgggtgttcatctcttaccctttcataccttgttggtttatgcatagtacactgaagtatactgttatcacttgggatttggacatctgagcgcaaaaactgattgccatgcagttgtaatcatgcctgtaaacatatccgtgatttatgtcttttttgctaggaaaagcatttttccagtcatgtactttgtccagacataataaattactacgcaactttgtaatttgtgatcgtt

SEQ ID NO: 26810 - DNA, 2514 bp, Oryza sativa
  ref <308>: DATABASE ACCESSION NUMBER: AK102252
  ref <309>: DATABASE ENTRY DATE: 2002-08-28
gaggtccccccacgccacagcctcttatcccacacgcggaccaacagcgccgccccgcccgtcccccgcttcaccttcggcttcgacttcggcttcgtttcctcttctcttcgtctctccctccctccagcgaaagaaagagagagctcacctcgcgttgcccggccggccgcggaggagagcacggcttcgcattcggctggagctctcgtctctgcactcggagtacagctgcaaactcctccttccttgatttcttcaccctgtctccacggactgcacagatgtccgacggcaacgacttcgccgagctgctgtgggagaacggccaggcggtggtgcacgggaggaagaagcacccgcagccggccttcccgccgttcggcttcttcggtggcaccggcggtggcggcggcggcagcagtagtagagcccaggagaggcagcccggcggcatcgatgcgttcgccaaggtggggggcggcttcggcgccttgggcatggctccggcggtgcacgacttcgcttctggcttcggcgccaccacgcaggacaacggtgatgatgacaccgttccgtggatccattaccccataattgacgatgaagacgccgccgcccctgctgctctcgcagcagcggactatggctccgacttcttctccgagctccaggcggcggcggctgccgcggcggccgccgcgccgccgaccgatctcgcctctctgccagcctccaatcacaacggcgccaccaataacagaaatgctccggttgccaccaccaccaccagggaaccctccaaggaaagccacggcggcctgtcggttcccaccacccgagccgagccgcagccgcagccacagctcgccgcagccaagctgcctcggtcgagcggcagcggcggcggcgagggcgtgatgaacttctcgctcttctcccgcccggccgtcctggcgagggcgacgctggagagcgcgcagaggacgcagggcaccgacaataaggcgtccaatgtcaccgcgagcaaccgcgtcgagtcgacggtcgtgcagacggcgagcgggccaaggagcgcaccggcgttcgccgatcagagggcggcggcgtggccgccgcagccgaaggagatgccgttcgcgtccacggcagccgctcccatggccccggccgttaacctgcaccacgagatgggccgtgacagggcaggccgaaccatgcctgtccacaaaaccgaggcgaggaaggcacctgaggccacggtcgcgacatcgtcggtgtgctccggcaacggagctgggagtgacgagctgtggcgccagcagaagcggaagtgccaggcccaggcagagtgctcagctagccaagacgatgatcttgacgatgaacctggagtattgagaaaatctggaaccaggagcacgaaacgcagccgcacagctgaggttcacaatttatcagaaaggaggagaagggacaggatcaatgaaaagatgcgcgctctgcaagaactcattcccaactgcaacaagattgataaagcctcgatgctggatgaagctatagagtacctcaaaacccttcagcttcaagtacagatgatgtccatgggaactgggctgtgcattcctccaatgctattaccaacagccatgcagcacttgcaaattccaccgatggctcatttccctcatctcggcatgggattggggtacgggatgggcgtcttcgacatgagcaacactggagcacttcagatgccacccatgcctggtgctcactttccctgcccaatgatcccaggtgcgtcaccacaaggtcttgggatccctggcacaagcaccatgccaatgtttggggttcctgggcaaacaattccttcgtcagcgtctagtgtaccaccatttgcatctttggctggtcttcctgttaggccaagcggggtccctcaagtatcaggcgccatggctaacatggtgcaagaccagcaacaaggcatagcgaatcaacagcagcaatgtctgaacaaggaagctatacagggagcaaatccaggtgattcacaaatgcagatcatcatgcagggtgacaacgagaattttaggataccctcttcagcccaaacaaaaagcagtcaattttcagatggtaccggcaaggggaccaacgctagagagagagatggggctgaaacataaagaaaggccagtaggtgtaacttgactttcatgctaaatttgagatctaccactgaaatctgcagaatgttcctgtcctaaaaagatcaatggctgaggaatttcatgtacgaccaactaacaacttccagatatgaaagttagcaattcatactgggagaacttacttgagtatcaagatccacgaggcagatgtatcagccaagatgccccaaaattttgtgtaaaatgtagatggtagaagatgctaccaggttacaagctgtaattcttgacttccagtgcagtttcctatgagtagtttttgccctatctg

SEQ ID NO: 26811 - DNA, 1559 bp, Oryza sativa
  ref <308>: DATABASE ACCESSION NUMBER: AK102253
  ref <309>: DATABASE ENTRY DATE: 2002-08-28
gggtttttctaatcgttcgttggctacgtccctatccgcatccggtagccaccccgcaggccgcggcgacaagatcaaaggatgctctcgttgcggccgccttgtactctgtcgcccgcaccgtggcggagacggcgcaccctccacggagccgcggggaccccgcagcgcgtcagcgtggcggcgccttccgccatcgtagaggccgtttcgccgccggcgaggttctctttcccgatactggtgaatggatgcactggtaaaatggggttatctgtggctgaggcagtcacttcaagtggtcttcacctagttcctatttcattcagtagtagagatacgctagacagaacagtacgggttggtcatacggatgttcggatatatggtccttctgcaagagaagatgttctatcatctgttattgatgaattcccagatgttgttgttgtggactacacagcacctgactctgtgaatgctaatgctgagctctattgcaagctcggtttgccatttgttatgggcacaactggtggagataggcagttactctataaatcagttcaagattcaaataactatgcactgatatctccacagatgggaaaacaggttgttgcatttcttgctgcaatggaaattatggctgagcaatttcctggggccttttcaggctatcatttggaggttttggaatcccatcaagctggcaagctggacatatctggtacagctaaagctgtaattgcgtgttttgagaagttaggtgtgtcatatgacatgaaccggatggttaagattagggatcctgagcagcagcttgagatggtgggtgtccctgaagaacatattgaagggcatgcattccatctgtaccatctcacttctcccgatgacagtgtttcatttgaattccagcacaatgtctgtggccgttcaatatatgctgaaggatctgttgatgccgcaatgtttctgcataggaaggtacgctccaatgattccaaaagaatttacgatatgattgatgtcttgagagaaggcagcatgcggtgaagttgatgaagtccgcatgaacaatatgtttagtctgggaggactattggactatagcatgatcatctgatgaaattagtaagtagctatctcatagtggagaagatgatgttccagtcaaactttcccagtgaacagtttgaagcaacccattgcagtaaagtttcttctagatcactgctttcaaaattgagtattaggcccctacatctccatgttatgcacagggccacctccttccctatcaaccatgagtacatgtgacaaggatgtacgtacctgtagggtttctccacattctgctcattgcagtggctgctgcctgaacggacaagcaatgaggagcaaaacataattgaccaagagtaagtgagcggctagacaaatcatgacaacatattcgttacatacattgtacttcaaagaagtcatacatagcaacatggaatctaatgctatgtagtacgtacccagctaatgaaacgcaacaatgccaatct

SEQ ID NO: 26812 - DNA, 1544 bp, Oryza sativa
  ref <308>: DATABASE ACCESSION NUMBER: AK102254
  ref <309>: DATABASE ENTRY DATE: 2002-08-28
ggcgcgccgccgcgcaacctccatggaatggccgctctccacctccacgccctcatcgccggcggcggcggcgccaccaccgtcccccatctccggcagatccacgcccatctcctcacctccggccgcttcccctccctcggccccgtcctcctccgccgcctcatttcgctgcccaatccccacctccacctcgcccaccgtctcctcctctccctcccctccccatccctcgacctcttcaacctcctccttcccccgctcgcctcctcgccggacccctccaccgccgccgccctcttccttcgcctccgccgcgggggtctccgccccgacgcgcacacgctcccgcacgtcctcaaggcgctcgcgcgcctcgccccgggatccctccccgttgtcggatccgtgcactcggaggccgtcaaggacggcctcgcctccgcggtggtgtacgtcccgaacgcgctcatggccgcgtactcggcctgtgggcaactggagcgcgccgtgcaggtgttcgacgaaatgccgcgccggaccgtcgtgtcctggaacaccgcgctcaccgcctgcgcgggcaacggccgccacgagctgtgcgtcgagctgttcgcggagatgctagaggctggttccgtgccggacccgaccacgttcgtggtcatgctgtccgccgcggccgagctgggcaacctggcgctcggcaagtgggcgcatggacaggttgtttcccggaggctggacatgacgcttcagcttgggacggcggcagtgaacatgtactccaagtgtgccacggtgagttatgccctgcgcttgttcgagaggatgcccgcgaggaatgtctggacatggactgccatgatcgtagggtttgcgcagaatggtttggctcaggaagcgctggagctgtttgacaggatgaaactctcaaagatcatacccaattatgtcacatttcttggtctgctttgtgcatgtagccatgctggcctggttgatgaggggcgccggttcttccacgaaatgcagcatgtttatggtattgtgccgatgatgacgcactacagcgccatggttgatgtcctaggccgcaacggtcttctccaggaagcttatgactttgttgtaggaatgccagtcgaggctgacccagttgtgtggaggacattattggcagcctgccagctgcatagctccaaggactgtattgagatcattgacaaggtgcagggcaaactgctggagctagagccccggagaagcgggaactacgtcatggtttcaaacatctactgcgaaattggatcatgggacgaggcagcgaaggcaaggagggtgatgagggaaggagggatgaagaaggttgcgggagagagttgtgttgaggtgggaggacgggtgcatcggttcatcttcggggatgattcttgccctgaatttcatggggcttgtaggattctccatgaattgaatctcaacatgagaaaatgtgaacctattgacccaatcttatttactgatgatgctgactagctatc

SEQ ID NO: 26813 - DNA, 3748 bp, Oryza sativa
  ref <308>: DATABASE ACCESSION NUMBER: AK102255
  ref <309>: DATABASE ENTRY DATE: 2002-08-28
ggccttaagagatatagcagaaaagaaaggaccaaccaacagcggcagcaatggtgttgatccaccatacccatgaccatgagcttctcttgctcgccatcatcatcttcctttcgtgctctaacaatggccatgcctcccggcctcaccttcttcatccaccaccaccaacgtcaccgaccgccttgcgctcatgtcattcaggtcgctcataaggagtgacccaacccaggcactcgcatcctggggcaaccaatccatcccgatgtgccaatggcgtggtgtggcgtgtgggctgagtggacgccgcacaggccgtgtggtggcgctggacctcaccaagctcaaccttgtaggcgccatctcacctttgctcggcaacctcacatacctgaggcggctccatctccacaagaatcgcctccatggcgagataccgtcggagctcggccatctccgagacctgagacacctcaaccgcagctacaactccatccaagggccgatcccagcgacgctttcaacctgcagaggaatggagaacatttggctctacagcaacaagctgcagggccaaataccaagtgagtttggatccctgcaaaatcttcaggcacttgttcttggggaaaatagacttactggaagcatcccttcattcattggaagcctcgcgaatctgaaatttctaatcctagaagaaaacaactttacaggagaaattccatcagacataggcagactggccaatctcactgttctaggactaggttctaatcaactctcaggaccaattcctgcctcaataggaaatctctcggcactacaatttcttagtgtcttctctaataacctggtaggaagcatcccaccgatgcaacacttgtcctctctcgaattctttgaactagggaagaacaatatcgaaggaagcatcccaacttggctgggaaacctctcatcattacttactgtgaaacttggaggcaatagactagatgggaacatccctgaatcactggggaaactgaagttgcttacatctcttgatctatcaagtaataatctagtgggcccagtacctgatactattggaaacctatattccattaagcagtttcatgtagaaaataatgagctagaaggttctttaccttcttcaatattcaatctttcctctcttgaagaactcaacttacaaaccaacaacctaaatgggaccattccacttgacttaggcaaccgcctgccaaagctccagttattcctaatatctgaaaaccagtttcatggctcaattccaccctccctgtgcaatatttctacgcttagatggatccaaacagtaaacaattctttgtcaggaaccatcccccaatgcataggaatcaaccaaaagagcttatattccgtaacttttgcagtgaatcagtttgaaacgagtaataaatatggttggagcttcatgtctagtttaactaactgcagcaatttgcgactacttgatgtgggtgacaacaagcttacaggtgagctaccaaattcaattggcaatctttccacacgtcttgagtattttgtcaccaactacaacagtatgactggcaaaatacctgaagggctagggaatctggtcagcttgaagttcatcgagatgaacaataacttctacgagggcacaataccagactctcttggcaaactcaagaacctgaatagactatatctcactaacaacaacctttcaggatccattccatcaagtatcggcaaccttcgtatgctaacattattatctgttgcaggcaatgcacttagtggagaaataccccccagtctcagcaattgccctttggaacagttgaaactctcatacaataatcttactgggttgattccaaaagaacttttcgccatctctgtcttgtctacttctttgattttggatcataattttataactgggcctctgccctctgaagtgggtaatctaacaaaccttgcattacttgatttctctagcaatttgatttctggagagatcccgtcctccattggtgagtgccagagtctacaatatctcaatacatctggaaacttactccaagggcaaattccaccatcactagatcaaccaaagggcctcctgttgcttgatctttctcataataatttatccggaagcatccctaagttccttgggaccatgacagggcttgctagtttgaatctttcattcaacaactttgagggtgatgtcccaaaagatggaatctttagcaatgcgactcctgctttaattgagggaaataatggcctatgtaatggaatccctcaactgaagttgccaccctgctctcatcagacaacaaaacacaagaagcaaacatggaaaattgccatggcaatttctatatgcagcacagttctatttatggcagtagtagccacatctttcgtgttccacaaacgggccaagaagacaaatgcaaaccgacaaacatcacttattaaagagcagcatatgagagtttcttacactgaattggctgaagcaacaaaaggttttacttctgagaacctcattggagcagggagcttcggctctgtgtacaagggaagaatgaaaatcaatgaccaacaagtagctgttgctgtgaaagtgttcaacctcaagcagcgtggttcatctaagagttttgcagcagaatgtgagactttaagatgtgttcgacatcggaaccttgtaaaggtactgaccgtatgctcaagtatcgattttcagggccgtgatttcaaggccattgtatacaagttcctaccgaatagaaatttagatcaatggctacaccaaaatatcatggaagatggtgaacacaaggcattagatctcatcacgcgactagaaatcgcaattgatgtggcatcctcacttgaatatcttcaccaatataaggcatcgccaatcattcactgtgatcttaagccaagcaatgttctcctcgacgatgagatggttgcacatgttggtgattttggccttgcaagatttcttcaccaggacccagagcaatcaagtggttgggcatcaatgagaggcacaactggttatgctgctccagagtatggactgggcaacgaagtctcaatccatggcgatgtatatagctatggtatattgttgctggagatgtttagcgggaagagaccaacagacagcgaatttggagaatcccttggcctccataattatgtcaatatggcattgccagacaggacggctagtgtcatagaccttagcttactagaagagacagtggatggcgaagcaaagacatcaaaatctaaccagacaagagaaatgagaattgcttgcattacctcaattctgcatgttggagtttcctgttcagtggagacaccaacagatcgcatgccaatcggagatgccctgaaagagctgcagagaataagagacaagttccacagggagttgcaaggagcaggagcgacaaaccatcaagacattcaaatctgttgatgcgcagcaaccaaccggatcaataaaggcgtaaagagctgcaagatttctgctactccttgccatctaggctagccaaaataaaatcataatgttgcaaattacaaagtttggcattctgtttgatccttgccatgaagatcttgtacatactatgaaccaaccacatcttggcaaatcacattattatatgcttttcctttgttg

SEQ ID NO: 26814 - DNA, 784 bp, Oryza sativa
  ref <308>: DATABASE ACCESSION NUMBER: AK102256
  ref <309>: DATABASE ENTRY DATE: 2002-08-28
gacccagctcagttactcctctcgtgaaaaaaaaaatcagagagaaaaaaaggaaaccaccggaggcggacatctcgcgccgccgcgccgccgtcggcatggccgtctccgcccttctcccgcctattgcggctgcgccgcctctcgccggaagcacactttccttcggtgttccctaccagaacaagagaaggatcctaacgatgcgagtctactgcgctgctgatgaaggagaaatatcacccttactaccctcaagctgccgttatgtgccaacttgcagtgagtactctatgcaagcatacaaaaaatacggtgttgcaaagggtacaatcttgacagcttggcgtctatgccgctgtaatcctcttggtggtcatggatatgatcccccaaggtggtttgatgaggaagagctaccaaagcaatgacagcctggtgaaaaagttggacttgtatgcagctctgaagaatataacatgcatctttgccaactatccaccaaggacaactgcagttgtaaaattttcagccaacttccagctgtcaggtattggagaaggctttactcgatgcttagatatagtcattatggtacctgtttgtggtggaaaatggttggagtgaaaatcaagaaaatgaactacttagtactgaagtattatgagatatagtaggtatggagggaacaaggatatcatataccatcattcagaaattgtaacgatcagaaccataaatggcgtgaaatcaaactcccaaataagagcaagcagcataaacc

SEQ ID NO: 26815 - DNA, 1805 bp, Oryza sativa
  ref <308>: DATABASE ACCESSION NUMBER: AK102257
  ref <309>: DATABASE ENTRY DATE: 2002-08-28
ggttggttagagccacttccacgcaccagatcgaggcaagctgtgatgctgtctccgccgccgccgccgcgctcgctggccgtcctccattccattgcagtggtgccgcccgccacccttctctcagccctcttcgtctccgggcgagcccagctccttcttcgatcaggtttgctatttgtgaaagcaggcaaggttatgatggttagcattggaacggatcacagggttagggatgaatcagcagaacaaatagttacctggagctgtacgaagataccctgatatgttactgctcatgtaggcatagccaatgccaagggttctttctgcaccaaactcagccacaacttttagcctcttgttcttcatatcaacagcaagcacccaagcatcgtcgtcccattggtcggccttggccatgaagcaaacaatgtcatcagagtgcaagctgagcgttggatgacccacatgaagtctctccaaggttggctgaggtgtgccttggtcatcgaaaagcttaggcagcaactcaaaattcatcttgctgtcatcaacagagatatcggaagcagtgagtttgcagtcctggcgccaaccttggttccagggattggtgtccggtgcagtccaggtggcagcagtccaaccttgagagatgaaggtgccgttgatgatggaacctggcttgacatgaagccgcgtctcgatgaacttgatccgaccttggacaagggcaatgtcacgatgaggccttggagagcctgttaacgagttgttgggactgagcggcggcggcagggggaagtagcggagcttagtggtgtcgcggagaaggtcacagaagagaataccacggtagaggtcgacccagcccatggtgcccgccttccctccaatggtgattgccttggtattgatatgggtaaatgatgtgtcgaccaggccatggagggagattggatggcaggtccaagcatcagcgccggagcagtagatgtggaggtcatactcaaagtatcctgattcgaaggtgttacagagtgcagcaacaatgtaatcaggagaggcgcaacagcgcaggaggccaagctcgtggtcgatgaacctgtcgatgggagggggcgggagcaaggtgagtttcggggttggggtggtggcctggtagacgaagtagtcatggaagctgctcttgaagcggatgttccggcgccccatggcgacgcggatgaggaggaggtcggcctccgcggcgatgatggtgggctcggtggcgaacttcttggagtccaatccagggcagtggacgcatatgtaggagacgcgcggcggaggcgccgtccacgaggatacctcgatggggtggccgctcctggtctcggacatggcggtggtggcgttgcggtggttggccatgaaagcacggatgtcgaggaggacccaaggtgtagtcgccgcagcgccgtgggccggcggctgcagggattcctccatgatcgtcctcttcgaccagtcatctcctccagccatgctgctacgcctacctccgactccgtcgatttccccggaatttaattctacaccttgtgcattagggatccggaggagggagatggagtggagtcgaattggatcgggggaggaagagtttggatagggtgggggatttggggaactgatcgagtgaggaagaagatgagcgcaaacatattgattttttttaaaaaaaaactggaagaagattgatatttgtatgttaaattacagttaaatttcacctaaaatatgaataaattgatttcttc

SEQ ID NO: 26816 - DNA, 2488 bp, Oryza sativa
  ref <308>: DATABASE ACCESSION NUMBER: AK102258
  ref <309>: DATABASE ENTRY DATE: 2002-08-28
gagggagtaataaatcacccatcctgcttaattaccatctattcatcattatcctctcctctcttatgtgctaggtttaattttgtgtttttttttcatgttttgagtctgagtttaatttctggcttgtaagtagaattttcttcttttcttcgtatgttttcagagtttcagtggttcgttaatttgctgatttaagttggcgctatttgtgagcacggccatggaggacagtgatggaaacaacgaaggctcgctcgccgaacctaaacatggcatttgctcatatgcatgcccttgatgatcacaatcgtactgtgcactgagtcctccatgctcttaaatttgtgctgtttcgttttagttgcctgttttatctgatggttagataaaagaagtccaaaaattcagacattcagtgctgtcttccgagtttttctcccgacagtgtttctccgtcctttgtctcgttttgtttttagtgaggattctgttggggctccttgattttttttttcggttttgctagtatttcacttgcgacagatttttatatttctatcttttactttttcgttcataggatctttatattaagatttgtgttcttgtatatctaacttgtagttatactcatttacagtgcacttatactcagttacatagcacttgcatcctgttacaattcaccaaaactagatttttacaatagttcttttctctaaatttatgatttttgacatatttgtctctcttttttgttattttatttaaaactagctatatccattagttgaaaattctgtaagatttgaagacataaatttgtcgaagtatcaataggtagtccttttttcagttatggattaaaaaccaacggcctctacatcctccaggttgggcctccttgatatgccttggaataatatctaaaacttatggtcaccttaatctgtagactgttcagaatcagaatgaacagttagaaggacctcaagtcatcgactaaaccatttggcaaggcaaggcaaggattctgccttcaggggacaaggattcttcagaattgttccaaaaaaaaagttgtaaaaggaaaagcaagaattctgaccagcaactgtttacgaccatcttaacaaaccgatgtggcacattgtgattgaatcttggatcgaggctggacttcccttcatcagttcatccattttgtggaaatttcagaattcagattctggagtaatgatcgtgatccgtacgttgtgatgtgcatggaaacagattttgaaggaactacgttgcttcgagaaattttcacgatcgctgaggctatgttggctcttggctctggtacgagtggacaagcccggaaaaatcttggataggaaccccgccgccctcaccgattgtgcactgttcgtggccgccatcaaggtaacagttggagatggacgaaaggcaaaattttgggaatccaactggataggagatcagccgttgaaatatctagccccaaaccttttcaagcactccaaaaggaagaacaaatcgactcttgaggcaataaccaataatgcttggatcgaagatatccgcggaaggtgacaatacagttgcttcaggaatatatatgtgtatgggaagtgctccacaatgcaggagatgtgatccatgaaggggctgatgacacaatcctccggcggtggtcagccagcggcatgtatacggcgaaatcagcatatgccatgcagttcatgggcaaaacgattttcggaatcagccgagcttgtatggaagacttgggcaccgggtaaacacaaattcttcgtgtggttgctggcaaaaaatagaatatggacgacggattgattgcaatgcaggggctggccaaataattacttttgccaactctgtgttcagaaatcttgaaatagtacggcacctcttcatggagtgccccttcacgcagcaggtatggcgggacattggtcgcaagatcaggctgtcacgtttcctcaatatgaccatagacgatactctcctcaattggtggcgcgagcaaacagatgaggcagaaaagttgcaacagaaaaggctgcgttcagtattcttggccacgttttgggagatttggatagaaagaaacaattgcatttttagaggcactgagtctacgccgccggcacttgctagcaagatcatagatgagcttcatttgtgggaaatggcaggcgccaagggagtgcaatgtattatgttaagagagtaggcttctatttttctaaagcgtgtagacaggaatagtcccttttatacatttttgttttcttacttcttctataatataaaaccagctcgctaggttctttaaaaaaaaaaaggattctgaaggaactcgtgtattctgccaaggcccggtatgagctgacgacgttgttgtatgcttgagattatttctctcaaaaacattatataagatgctattatgccc

SEQ ID NO: 26817 - DNA, 2430 bp, Oryza sativa
  ref <308>: DATABASE ACCESSION NUMBER: AK102259
  ref <309>: DATABASE ENTRY DATE: 2002-08-28
gggcacaagcacaaggccctccacttctctcttcactcccttccagctccccccaaaaccccatttcattccaacctttcaaatccgccatcaccacctttttttccccacacacacacacacacacacacacacatatacacattgacacatagcagtagtgtgtgtagtactagtacaaacacacacaacacaagcttctctcttcccttcttggttttgcccaagaaacgaaaaccaaaaccaaacccaagaactctcctcaaaagaaccacctcacttcatagctctcacaaggctcacgcacacatagagcttgtgagagcttcttctttctctctctcttgtccttgtggtagctggtgcttaaaggaggaggaggtgaggaggaggcgcaatgtcggagcagccattgccgcagcctcggagcagcatgcgggaggcgctggagaaggaggacaaggagaaggcggcggcggccaaggagaaggccgccgtccccaagaacggcggcaacgggggaggaggcaagaacggcggcggtaacggcggcggcaacggtggcgccggcgcccagcccggggaggagacgacgagggagattcaggtggtgagggaggcgtaccggagggagccggcggcgccggcgtacgtgatgccggaggagccgccggccatggtggagctcgtcgggtggtacctctacggcttctgctcctacttcatcacccacctgctgctccccgtgctgttcccggccatcatcacccaggtcgccttccccgcctccgacttcaccccggacaccaagtacatcgtcaagggcgccacctgctccatccatgagatgtccatgtaccagaggctgaccaagcattcgattgccattgatggatcccggctgtccccgttgggctggagtggcctatcatgggcgattggaatcctcattgcggctccgatcctcacccaggctgcacaccaccttgaccgtggccagtatcagtcgctcatcctcattgccgcgacatcgtttggctcattcttctgcctcctcactggcttcttcaagacagtctgggtgttcctcttctacatcctgttcattggtgcatccatcattgttgctgaggctgtgcatacacgcaatcttggactcatgatccgtggccttgcagcacatgactctggcaagcactttgtccttcgccgtcgtgctgctgccagtcagctcaccctgtattgcactgccattggtggcattggggctgcgctcatggctgctttcatgtaccacatgcttcggcgcactgaccagctcacaggcctttgggtcgtctccatcttcagtggccttatctggttcattggtatctgccatggtctcttcacaaaccgacccagcagctcatcgcccaccacagcatttgagcctaacttcttcaccaagctcagctacagcatgacccttgtgcgatacccacaggccatcggaagcttggttgcagtgttcctttcatctttcgccacaatgtgcatcttcaccagtggcacattgtatgctattggtggtgtttgcatcaagccagtccttgtgctcgtgctctggatactctacttcctgttcccgttgatctcacttccgctgctgcacccaatccagatcatcatccgtgctgatgctgttcgcatgcagctgcttgggttcatcatctgcctatttgtgtctggtgctggtttctacttcaagagccacaggtggagagccgctcacatcattgtgatcgctcttgtccagagcacagccaatggtgtgctgtactcatttggtcgcattctgctgctcgatgcctcgccaccagggaaggagggtgcttttgcggtgtggtatgcatttgtacgctgcattggtgctatgattggcttcgctgctgcatccgctgggcctgggcgtgctggaggatcgtttgctgctgcgttcctaggcagcttcctcggcatcattgttctgatctttggtaatgtgagcaacatcggggcgctgaaggctgctgggcatctgaagggaatggaagacgagaagaggctgggcatggagaaaggggaaggcatgagtgcggttgccgattccggcgagggaagggggagggtatgatgatgattaaatgggcttgtgggaaggaaagattggaaaattgctgtggaggttgtgtttgtgagagggatttgttcttctttcttgtttctttcttgttcatgtttcagtgacactgttaattcggtgctttgccccccttggatgcatgatgatgatgacatagtggtagaggaagtgtgctagttgttaatgtgttattctttgcttggaagacaattgtaactgatgatatggttctttgttcatcgccaccgaaattctctctggcagtc

SEQ ID NO: 26818 - DNA, 1071 bp, Oryza sativa
  ref <308>: DATABASE ACCESSION NUMBER: AK102260
  ref <309>: DATABASE ENTRY DATE: 2002-08-28
gtaatctgttgctttatctttcaattaatgtctctagcgtcgagatggttatattttgacaatttgagttaagataaatctattactgcacacttggcaaccatgctgcaatttgcaggatgctttagtatattgaaatctttccttttatgctgggcattactactggataaattattttataggcttctggattttctgaagctgaggtggctgagcacagaatagaggaaataagtttgccgggtgctgtccacgttgtcacaaaggagtcgactaccaccgtgcagttggccccatgtgattctagtcattctacaataccgaaacgaactgtgccacctggacgtgatctgtgcccttgcgatggttgtggcaccaaggtagatgttgaagaaggcctaatctgtgatgaatgtgacaccatgtaccactttgcatgtgtcaagctactcaatcctgatattaagcaagtcccagcaatctggcattgttcaacctgcagcttcaagaaaaaagaattggctgcagataccacgaataatgttgcccatgactgcttgcatggtggtaactgtgttttgtgtgaccagctcgagctggtgaagacagaagaagaagatcccaagcttcccataaaaattgaattagctgaagaaagagaggggagctccgtctcaagcatgggggaagacaatgaaccagacctgtcaacaactgccctgtcaaacttgtgcaaacactgtggcacatgcgaagacgatgacaagagattcatggtatgcggacatccttactgcgtttacaagttctatcatatccgatgcctgaaaacaagccagcttgcaattgagcaacaaaagaagcttggttgctggtactgcccctcttgcctctgcagagggtgcttccaagacaaggatgatgaccagatagtcatgtgtgatggctgtgatgaaggttatcacatatattgcatgagaccagcacgcaacactatccccaaaggtaagtggtactgtacattttgcaagatccgcagggcagcggaaggaatgcataagtatgagg

SEQ ID NO: 26819 - DNA, 790 bp, Oryza sativa
  ref <308>: DATABASE ACCESSION NUMBER: AK102261
  ref <309>: DATABASE ENTRY DATE: 2002-08-28
gacaagcaaccaagaaatcaagaaaccgtttcagacaacccactgcgctgcccgccgccgccgtctccggccgaggataccaacgacaacgatgaatcacccgtcctccgccgcgaccgccaccgtactcctcctcctcgccctcctcggcgtcgccgctggcggcggcgaggacggccagaagcgcgccgccggcgtgtacatcgtcatcgtgcagcccccggccgacggcgccgacaccgtcgcctaccacacgtgcatcctcgccgccgcgctcggcagcgaggagagggcgaaggaggcgttgctgtacagctaccgggcggtcgccagcgggttcgccgccaagctcacgccgccggagctctccgccctgcagaagcatcctgcagttcttcaggtgcgccctgatcagatgtatcatgctgtggacaacctcaactgaaagcttcttccctttgtgagagagagagagagagagagagagagagagagaggatgatacaaagtatagtgcaatactgaaatgttcttcatgcttctccgatgttggtgattatgctaatcgacaatctaattaggcagtaaagaaggctataggctctgttgtgaaagagtttcatgttattctttattgatcttctctactatacatacatcgaaatatatacagccaatgtattactaattgagggaataacaattacttacaatgttgttgtaattcctactttacaatgttgttgtaattcctacacatctagtgatatacaatctgtatgttagaacc

SEQ ID NO: 26820 - DNA, 3375 bp, Oryza sativa
  ref <308>: DATABASE ACCESSION NUMBER: AK102262
  ref <309>: DATABASE ENTRY DATE: 2002-08-28
gaggcgggctgccggccgccgctgctgctcacggaacggaacctccacggcgcatcttaggaagacgggaaccccctactcgtcctccccctcgatagttaaccgacacatatatcgaccgccatggcggccgcctccaagctcggccgtcgcgccgtggcgggcactgcagggcggctcccgcttccagaagcgcgcctccgcctcggcctctaggatggtgtaggggccaggggagagggggagtgtgtgtgtgtgtgtgtgtgtgtgtagaggggtgaaatgggggcgattggcggggatgaggtggtgcagtgggacaagatggacggaggtgaggtggtcaatggcggcggcggcggcggtgtggggaagctggagaggatactggtgtcagtgaggctgaggcctctcagcgacaaggagattgcgagaggggatccgtcggagtgggagtgcatcaatgacactaccataatctcccggagcaccttccctgacaggccatcggctccgactgcatactccttcgatagggtattccgctctgactgcgatacgaacgaagtatacaagcaaggggccaaggaggttgccctctctgtagttagtggcattaactcgagtatttttgcatatggtcaaacaagtagtggaaagacatacaccatgactggcataactgaatatacggtagcagatatttatgattacattggcaagcatgaggagagagcatttgtcttgaaattttcagcaatagaaatatataatgaagttgtaagggatctgctaagtgcagaaaacactcctcttagactttgggatgatgcagagaaaggaacctatgtagaaaacctcacagaggttgtattgagggactggaaccatctcaaggagcttatttctgtatgtgaagctcaaaggaaaaccggggagacatacttaaatgaaaacagctccagatcgcatcaaatacttaaactgacaatagaaagttctgctcgtgagttcttgggtaaggataaatcaactacacttgtggctagtgtgaattttgttgatttagcaggaagtgaacgtgcatctcaggcattatcagctggtgctaggctgaaagaaggctgtcatattaatagaagtttacttaccctaggaactgtcattcggaaactaagcaaagtaagaaatgggcacataccatacagagattcaaagctcacacgcatactgcaaccttctctgggtggtaatgcaagaactgcaattatttgtacaatgagtcctgcccgtagccatatggaacaatcgagaaacactctgctatttgcaagttgtgcaaaggaagtagttacaaatgcccaggttaatgtagtcatgtccgataaagcactagttaagcaattgcaaaaagagcttgctaggttggagagtgaattgcgatgtccagcttcctattctagtcttgaatcattggtgaaggaaaaggataaccaaatccggaagatggagaaagaaattaaggaattgaagttacagcgtgatttagctcagtccaggcttcaggatttgcttcaggttgttggagataaccatgtccatgtttcaaagcagtcctcggtttctgggaggaactttaccttcgatgttccacagacgtgtgaagatgagcaatcaacaactgagtcatcagaagttgttgacagtgtccaaaattttaggtttcaaggccggcgagtggcacagagggaacataagcctcagcaggctgaaaataatgtgcagtttactaccccatctaggtactcagtcagcagtcctccgttcagtggtatgctcccaactaacagaagtgatcatctctcacagatctctaatgaagattcagatgatatctgcaaagaagtacggtgtatagaaaccaatgaaacaggaggaaatgaatgtttggaatcgtcggctgtggggagcaatagtttgcaagacccaaatgcaggttctagtatgcatatcaacaatgattcaaattcatctatgaattctaggcttcgtgatgaatctccagttacccttgagcagcatttggaaaatgtcagaaaaccttttgccaatattgtaaaagatctgggatcttcaacacgtaattcgtcaagctctaaagtacttggtaggagcaggagctgtaggtctcttactggatctagtttgtttgaagatttggagaaggacgattgcaccccaccaaacagaagtttcatagatttcgctgggagacctcaaaattgtcaaagaaggggatctgcactgaactatgatgcagagagcgagaccctatcaagggcagggtcaatgctttctgaaattactaccacgagggatggactgaaggctaacagttctgttgcaggcgacacagaatttactggcataggtgaatttgttgctgaactgaaagaaatggcacaggttcagtatcagaagcaacttggtcatagtggaaatggagacttggcagaaggaaccatcaggagtgtaggactggatccgattacagatgccctacagtcaccttcacggtggcccctggaattcgagaagaagcaacaagagattattgacttttggcatgcatgcaatgtttctttggtccataggacctattttttcttgctattcaaaggagacccagctgattccatttacatggaagtggaacttaggaggctatcatttcttaaagatacctactccaatggagcgatagctagtatcccgaatacttctctagtttcaagtgcgaagaagttgcagcgcgaaagggagatgctctgcaggcagatgcaaagacggctctcaatcgaggaacgagagagcatgtacaccaaatggggggtttcacttgcctccaagaggagaaggctacaggttgctcgttgcctttggaccgaaaccaaagacctggagcatgtcagggagagtgcatcccttgttgccagactgatcggactccttgagccagggaaggccctgagagagatgtttgggttaagttttgcgccgcagcagttcactcggagatcctacaatagctggagatatgggcgctcttctctgaactgattgaacctacaagatgctactgacggaagggggctttccagttttcccattttgttttgttttgcttttaggtcctttgtcatgcacttctgtatgatagatgtaactcatttgctattttttattggacgatcagtagggtcgatcttatacaaaaggagttctatatcacctgaattgcaaggttaaaatgtatgttcaactaacacgaaagacttccgaatgttaacagccactcagcattcagaagtagcc

SEQ ID NO: 26821 - DNA, 1819 bp, Oryza sativa
  ref <308>: DATABASE ACCESSION NUMBER: AK102263
  ref <309>: DATABASE ENTRY DATE: 2002-08-28
gttctttctctcctcccactccgctagctccggccaccaactttgacccgtcctcctcctccgcatcccccatcccctcctccccggcggcggcggcggcgcggaggcggcggcacgggagcggctagtggtttcgtcggcggaggcggaggcggggccaagatgttcgggcgcgcgccgaagaagagcgacaacaccaagtactacgagatcctgggggtccccaagaccgcctcccaggacgacctcaagaaggcgtaccgcaaggccgccatcaagaaccaccccgacaagggcggcgaccccgagaagttcaaggagcttgcacaagcttatgaggtattgagtgacccggagaaacgtgaaatctatgaccaatatggtgaagatgccctcaaggaaggaatgggtggaggcggatcccatgttgatccatttgacatcttttcatcattctttggaccttcttttggtggtggtggcagcagcaggggcagaaggcaaaggaggggagaggatgtgatccatccgcttaaggtttctctagaagatctttacaatggtacttcaaagaagctctctctttcccgcaatgtcctctgcgccaagtgcaagggcaagggttccaagtctggtgcttccatgaggtgcccaggttgccaggggtctggcatgaaaatcaccatccgccagctggggccttccatgatacagcagatgcagcagccttgcaatgagtgtaaggggactggagagagcattaatgagaaggatcgctgcccaggctgcaagggcgagaaggttattcaggagaagaaggttctggaggttcacgttgagaaggggatgcaacacaatcagaagatcactttccctggtgaagctgatgaggcgcctgataccgttacgggagacattgtattcgtcctccagcagaaggaccactccaagttcaaaaggaagggcgatgatctcttttatgagcacaccttatctctgactgaagcactttgtggtttccaatttgtcctgacacatctggacaacagacagctgctcattaagtcaaaccccggtgaagttgttaagcctgaccaattcaaggcaataaacgatgagggaatgccaatgtaccagaggcctttcatgaaggggaagctctacattcatttcgcggtggagttccctgattccctggcgcctgaacaatgcaaggctctcgaggctgtgcttccaccgaagcctgcatcccagctgacagaaatggagatagatgaatgcgaggagaccacgatgcacgatgtcaacaacattgaggaagagatgcgcaggaaagcccaagctgctcaggaggcgtatgatgaggacgatgagatgcctggaggtgcccagagagttcagtgcgcgcaacagtaagcagagtatgtcatctaggaaactcgtcattggttcacaaatcaacgtcgtcgcaaaggtttgccgtaaatttttggacccaaagatgattgtgctctgtttcccgttgcggcgaacatgaagatagtgaagctgattttacaccccttaagccgggactgtatcccttttgtttgcgacttaaaaaatgctactcgtatctagtaatagctggctacgttttactatgctgtgagactcgtagagttttacctcctaaaaagaaactcggtatgttgtgaatgctacaactgacactgcaccgtgtgcagtggctcaacattttttgtggtcagatggctatgcttgcaccgtgagactcgtagagttgtgcatctaaatatgcatttcttcctttgctgtt

SEQ ID NO: 26822 - DNA, 1534 bp, Oryza sativa
  ref <308>: DATABASE ACCESSION NUMBER: AK102264
  ref <309>: DATABASE ENTRY DATE: 2002-08-28
ggtcgcaccgcgcaaaaccctaacccaaaggcaagggagaagaggagcggacgccatggatgcttctccgttggcgagctccgcactttcgtggaggcctgcaagaaggacccctccctcctcgccgaccccaacctcgccttcttccgcgactacctcgagagcctgggcgcccacctccccgccgccgccttcaccaaggccacccccaagcccaagccgtcctccatggatgacatcgacgatgaatacgacgacgacgacgacgacgatctcaacatgagggatgccactccggagccggacgagcttgaccaggacatcgtcgagtccgatcttgaacttgaaggagacattgtcgaatctgaccatcaggaccctccgcaaaagatgggagatccttctattgatgtcaccgaggaaaatcgtgatgcctcacaggaggccaaaagcaaggccatggaagcaatgtcagaagggaaactggaagaagctattgaccatcttacaaaggcaatactgctcaatccactctcagctatcatgtatggtactagagcttctgtgtttatcaaaatgaagaaacctgttgctgccatccgtgatgcaaatgctgctctagagattaacccagactctgcaaaaggctacaaaactcgtggaatggcttatgctatgcttggaaaatgggaggaagctgcccatgatcttcacacagcatcgaacatggattatgatgatgagatcaatgctgtgctcaagaaggtggagcctaatgcacacaagataatggaacatcgcaggaaatatgaacggctgcgaaaagagagggaagaaaagagagctgagcgtgaccgattccatcgacgtgcagaagcacaggctgcttatgacaaggccaagcggaaggagcaatcatcaagtcgctcatcgggaggtgcatctcccagggggggcttcccaggagggatgcctggtggaggtttcccaggaggaatgcctggtggaggtttcccaggtggtatgcctggtggaggtttcccaggtgggatgcctggtggcttccctgggggtgctatgcctggaggtgttcctgggaatgtcgatatgagtaaaattctgaatgaccctgatctgatggcagcatttggtgaccctgaggttatggcagctcttcaagatgtgatgaacaatcctgccagctttgcgaggcaccaagccaaccccaaggtgggccccatcattgcaaagatgatggcgaaattcaatgggtcccagtaaacgttttgagtgagctgatggtatgagtaaattgttatttggcaatatggtgtcaagtgttttgtgatgagcaaaagcacgttggacggtctcttgttaggtgctactcttttttgtgaatgtggtattaaacggtggatgtatatgcagaaatacttttcatcgggctgctaactctatattacttcttttagaggtgcgacaatgaggatttggagatatgatttgttgacagttgtcgcattcattcatc

SEQ ID NO: 26823 - DNA, 1466 bp, Oryza sativa
  ref <308>: DATABASE ACCESSION NUMBER: AK102265
  ref <309>: DATABASE ENTRY DATE: 2002-08-28
gattagatgctttttttttctgattttaacttggatctcgtgtaaattttgcatccacattaaactcttatgaggaattcacaagaattgttatggttgctctcttttcaatattgacttgaaagtgactttatggttgcgaaaaagggactttctttcttttctttgtttttaacaattttttcttgtgatagagtagcttatttgagatatgcaagtatgtaattcaaattattggctgtataggacagtcctcttgcactggcacaagctcatgaaacccgagacaagctgaaggctgcacactcagagttagccgaggagggggccgttgagattgtcatcattaagaccacaggagacatgatcttggacaaacccctggcagatataggtggcaagggtttattcaccaaggagatcgatgatgcacttttgcagggaaggattgacattgccgtccactcgatgaaagatgttccaacatatttaccagaaggcacgatattgccttgtaatctcccacgggaagatgtgagagatgcattcatatgcttgactgcaagttcccttgcggagcttcctgctggcagtgttgttggaagtgcttctctgcgtagacaatctcaaattctctacaaatatccatcactcaaagttgttaacttcagaggaaatgttcaaacacgattgaggaaactcaaagaaggagatgtccatgctacattgttggctctagctggactaaaacgcttaaacatggcagaaactgcgacatctgtattgtcagtggacgaaatgcttccagcagttgctcaaggtgctattggaatagcttgcagaagcagtgatgacacaatgatgaattacttgtcctcattgaaccatgaagataccagattagctgttgcatgtgaaagagaattcttgtcagttcttgatggcaactgccgaactccaattgcggcatatgcttctcgtgacaaggatgggaattgttcattccgagggctattggcttcacctgatggatctacagtatatgagacttcgagaactggaccttatgatttcgatatcatggttgagatgggtaaagatgctggccacgagctgaaagcaaaggctggccctggcttctttgatagcttgcaatgaaaatagaaatccaccattggccaactagagtgttgagtggattattttgatttttttttgtaccctagttctactagaggattgtaccacaatgttgagctgtctcattcagatctgtatctttgcttcttttagcaaggtgagctagaatttagaacgtggttccacggttattgtaatcccttgtatttccaatgaattctggaagaagcttttgcggccaattatgttgtaactttgtaatttgatgtaattttgcagatgctttgttttcaaaataatttgattctgaaattgttgattgttgt

SEQ ID NO: 26824 - DNA, 3213 bp, Oryza sativa
  ref <308>: DATABASE ACCESSION NUMBER: AK102266
  ref <309>: DATABASE ENTRY DATE: 2002-08-28
ggatgagcgaatctggttaccttcatctcttctgaaggcatttgcttctattaagcaagttatcttctcatctatggagaagaataatgtgcctcacacattttggtcttcctatctcccatctttgatacaacagaaaggtattgcaaaaagaattgcatcaatcttgtcaggctatggtctaatagcttatcaactaggaaaccatgattctgtgttaaatcacaatgaacagcacgagaagtttgatgcccacagattgaattccaccggttctcacccaaaaggaggtttagcacataaattatcaggatttagagctttagctgctggagcgcccagatcaggccaacaacatctgatccgttgccttcttcatggttttgtgggtcatactgtaatacacaagcttgatcttgcaactatggcacaggagggaaacggtgatattcttagtggactcacacaaattcttctaaaatgccttaatcttggaagatgtataatctatatgcctagaattgatttgtgggccatcgacaagttccatgaacaagaagcagaagatcatgtgctcaatgtgggaacaagcaagttagggtccacagcaacaaaaaatattaaaaaatgttctgaagtatggaattcgttggttgatcagatgggttcattgttagcttctgtatccatcagtgttctgtccaccagtgaactgaagtttcaagatctccctagtggagtaagacatttcttcagcacacatgttgtagatcaatgtcttgcttcttcagaacacacaataccaaggttctctgtgaatgttgacagctactttacctgggatgaggttattgacgcatgctgtttgcggatatcacatgatttagttcagcagcatgttcaacttttgcatgacagggctcataacaatcatgatgaacagaaagaggtctttgttcctatggaaattagtgcaccaggtgaacatagatccagtgggagtaaggaagccagcatgttaacgaagtatccattgaacatggacaagcatccctcatgtggggtttcttcaagagagcatcctactcagctgggcacatgtagtgctcagcaagagccaccaacatctaatgttgaagataaagaggacaatactgagaaaattgatttcaatgagaaagtcgcaacaaatcgttctaatagaattgtgaaggacagtgaatcactagctattatggcctttggaattcagatactacagcacccgcaattttctaaactttgttgggttacatcgaaactacgagagggcccctgcactgatataaatggaccatggaaaggctggccatttaattcctgtttattgcaaagcactacagctgataaatcattatctggaggaaacaatgttcttaagggcaaagagaagattccgtctgtcagaggactagttgctgttggtctattagcatatagaggtgcttatgcatctgttttggaaatctgttctgaggtgagaaaggtcttggaactgttagttggacaggtccgaactaaaattttggaaaagagaagtcgatatcggtacttccatattctgtcccaagttgcttatctggatgatatcatgagcagctgggcatacacctttcaaaggttacatagtgaaaacaggagagtaaaaacaagtccaaaggtaactgttggaaagtcatccacaagagaatgtcaaggcgacagcaacactgcagaagcaaacatacttggtgctcctgctggctgctctgaggcccaaggcactcctggccaacatacagatgaccttgaagttattcctgctcactgccctagtgagatgcaagagaattcagtccaacatgctccaggccatcttgaaatccatggcattgtctgcgaccttgacaatgataatgtgacatctatatccagcataaatgcagtggaacctgatcttatccattcagcttcacttgatgtgcacacagattcacttaccccagcagatgcagtaataaatgatgggcaatcttgtggggttgacaatgatgggcaaatgtccagagtaatcaatggagaagaaaaccacatatctaatattgaaagacctgaaagccacacagtatctgttgcggatttcaatgagttgcaaaggaaaaatgctgttgcatcctcaactagtaccgacagtgcaggaacatccaggaacatggtgtcttctgaagctcgtggaagtgacaatgagcggaatactgatttccctgtggatgatgtcaaattaggtcatttggttaatcctcaatcacaggataccatgaaaagtctctcagttctgaaacctccatgtctctacaaatgttgccctgtgtgtttcaatgctgtttataagatggttcatgatattctttcaaattcagtaaggcctagtctgcattgcttagcagtcgatgatatgcatgaccttttgtcatcatggtcagtgaatcttctagcaacagttagaaaatggtatacttctcaaggtattgttggctctgaagaaaattctggagaagggcattgtgtttgtagcagtgataatggttggttccaagggagtgcacatgccatttggaaagcaacgaagatgctggaactataaaggatgagagctattatctaagtggacagccattaagttttttctttaaagatggtgtattgataccaccagatatcactgcaccaactacacttcattgcagttatatgagattatgtgtttgctcgataccaggttcaatttctatgttcaatcggatctcgagttgatgtgattgtgtgatgcaaggtacttcaatgctaaggataccacagttctgatctttttcctgtgctggcctatcttcagtgtttaccaggtcttgtgcactctcatgggattttgcttgtttccccagtggtagcagctagttcattgcaattacacctcctcccttgatgcaactcccaagctagccttctgcaaataaattgcctttattggttatgttcagcagtggagtgctgggttatatagtttttgggaaacctggatcgactgaaaagaaacaatgctattgattttgtgtctgttaagtggttccgttgtatacgcagtctactgttactgatattggaatctttaaactagctgatccgtgatgctttccc

SEQ ID NO: 26825 - DNA, 1835 bp, Oryza sativa
  ref <308>: DATABASE ACCESSION NUMBER: AK102267
  ref <309>: DATABASE ENTRY DATE: 2002-08-28
ggctgcccccctctcgctctcccaccaccgtccatcccacttccacgcgcacacagcaaagcaaaccaacaccaaaccaaaccaaagcaagcttcgtttccgctgcccccccacaggccactggaggatgaagagcacgcagcatcgcctctaccggcggcgcatggcataggcatcgcctgcccccaccccgcccccgcccaagaatgagagcttgggcctccactacaagagatagagacagacccaccaccatcaagaacatcaggaggagaagtagatagatgggcaactgcgggacgcgagaggagaatgccgtcgttgcggcgcacgcccaagttcagcagctccatttgttacaacatcctgtcaagaatgctgttgcagagaggaagcacacccgcatctcatcagatatgagtgatccttcaacacctaggaaaattgaagatgccaagaacatctccatatacaatgatgtgattgacttcacattgtttgaactcgagactatcacaaggagcttccgtgctgactacgttcttggtgaaggagggtttgggactgtttacaagggctacatagatgagaatgtcagggttggtctgaagtcactacctgttgcagtcaaggtgctcaacaaagatggacatcaaggacacagagaatggcttactgaggttaggttccttgggcagctaagacatccaaatttagtcaagttgattgggtattgctgcgaagatgaccacaggctgcttgtgtacgagttcatgtttcgaggaagtctagaaaaccacttattccgaaggacagctactccactatcgtgggctactaggatgtcgattgcattaggagctgccaaagggttagcttgcctccacaatgctgaaaggccaattatctacagggatttcaagacatcaaatattctgctggactcagattatactgctaaactctctgactttggtctggcaaaagctggcccagaaggcgatcaaacccatgtatcaactcgggtgatgggaacatatggttatgctgcccctgaatatgtgatgactggtcacttgactgctagaagtgatgtctacagctttggtgttgtccttcttgaactcttgactgggcgtaagtccatcgacaagtcacggcccagcagggagcatagcttggttgactgggccctcccgaagctgaacgacaagaggaggcttctccaaatcattgacccaaaactggagggacagtattcagttagagctgcccacaaagcctgcagcctagcatactactgcttgagccaaaacccaaaggcgaggcctcttatgagcgacgtcgttgagactcttgaaccattgcagggcagtggtggaagtgatggagctgttcaatctgttcttggcagtggccttccgagctacagagtaaaccgcagactaatgacgaacagagtccactgtagggcgcttccgaaccccaagtgctcccctgctgtcccagcatgcagggtgagatgagagtgtgctgtttcagttgctcctggaataggttcagttgtacattgcaagtctaaaccgttgatggtgcgtgagtgtgcacacctgcgctgtgtgcttttgggttttatcttttttctttttttttttttggctttctcccccagttttcaacctgtaaatttgctctgcatggtggtgcttgtaaggccctctaattttcagtggtcttatgtgttgttgactgtgttttgccctgccaaaaccggcaaggtttaaccccagaaatgaaaggctgaactaagagtgcaacgatggttgctatgctac

SEQ ID NO: 26826 - DNA, 2150 bp, Oryza sativa
  ref <308>: DATABASE ACCESSION NUMBER: AK102268
  ref <309>: DATABASE ENTRY DATE: 2002-08-28
gtgcttgcatcgttaccaattccaccttcactcgaccactccaacaaaacatggacatctctcacctcctcctacgcttcttcctcctcctcctcctcctcctcctcgccttctcgctcgacgatgctccccatcaccattgcactgaagctgcagcaacaactcttcctccaccaccaccaccaccattctccttcaaattcgacttctccaacacctacacctaccgcctagaagacctccgattcgagggcacggccgccgtgcacggcgccaccgtcgacctcacctgcaacgtcgcccagtgcacgacggggcgcatgtcctacggccgcgctgtgccactctgggacagagccaccaacgaggtggccagcttcgccaccgagttcgccttcaagatcgtcaccccggacaacgtggccaggggagacggcatggccttcttcctctccagctacccctcacgcgtcccccccaaccccagcggccagagcttcggcctcatcgccggcgacgccgaccacgccggcgacggcccggaccggttcatcgccgtcgagttcgacacatacgatgacaccttcgaacggccgaggccggccggagaccacatcggcatcgatgtcagcagcgtcgccgactcgattaacacgacgagcttgaacttcagcaggaacggggccatgagggcgtccatcaccttcgacaatgtcaccaggatgctggtcgccaccgtgcagtttactgatcagactactgcttcgcgtgctgcccctgttcaggtgagtgcgaaacttggagatcccagggcgttgctgccatcggaggtggccgtgggattttctacggcgaacggcgcaacattccagctcgatcagatactgtcatggtcgttcaactccactcttgcgtctccacatcccgtaaccaaaggtcatcacaaaaagaaaggggcagcaggaaagtttgcgattgttggagctcccatatttttgcttctggtgtggtctatcctatcatggtggaaatggagaagctcaagccgcgacattgacaagagaactggaggtgttaggcagttcaagtacaacgagttggctgctgcaacgaatcagttctcctctgagaataggctgattggagctggtccgttcggtgaaggctacaagggtttcttcaaggaaatgggccgtcatgttgcgattaagaagatttcgaaggagagcagatcagaaggaagtaataaggacttctatgacgaagtgaaaaccatcagcagtgcaaagcacaagaatctcgttgaacttgtcggttggtgcgtgaagcgtagatggaacatgtttgattccatgtgctggtgtagggagaaggcccataccattttcttggtgtatgaatttgtggataacagtaacctccgtgttcacctgcacgagaaggaggctgtgcttccatggacaacgaggtataaaatagtgaaggacatttgcgcagctctggttcacctccaccatgaaagacgtccattcgtccttcacagaaatatcaaaccaaacaacatactcctggacaaagagttcaacgccaagctagcagacttcgggctgtccagaactgctgacaaggtaggcaaggccagatacctggatccagaatgcaaaaagacgggaaagttcaagcgcagctcggatgtctacagctttgggattgttctgctagagattgcgtgcaagaaggatgaaaatagctttgcgaaagtgtggagccggtatctagagaagtctctgatgcaggtagctgatgacaggttaagaggtgagtttgatgagaggcagatggagcgtgtcatcatcttggggttatggtgttgtcagcccaatattgacatgcggcctaccgtgcaacaagcaatggatttcctggagagtgatgggccattgcctgaattggctgaaccggagacctcctcaagtaaaattggtaactaagagtagtattagtcctgctctaccagcaggatcaggcgaagaactgctggacttagttaataaatgcttggattaatacgagcataattttttattgttgtgattcctgcaagttattgtatcttctacatccatttatgtttctaatcagttgtgtct

SEQ ID NO: 26827 - DNA, 1478 bp, Oryza sativa
  ref <308>: DATABASE ACCESSION NUMBER: AK102269
  ref <309>: DATABASE ENTRY DATE: 2002-08-28
gacgagaagatttccattaactccgccctcgtgtgttatctatccatccatccagccatccgtctcatcacccccacctcttcgctccgtcgcctcctctctctctctctcctcgccccgccgctttttagggtttttgttcgcgccgccccggtgagaggtagacgggtctccccggcgagatgggccacgtcgacgcatcggccgccgccgccgccgcgcgcgacgcgaagaagaagagggggaaccggtcgtcggcgaagctgaagcagtgcaagctcgacgcgcgccgcgagcagtggctttcgcaagtcaaggatggaaaggaggctaaggcatcgacttcgccgacaggtacagagccaaatgctgggtccatgaccgttccttcgccacaccctccgctccctcgccgtcgcttagatgtgaggtcgaagggaggggatccagaggaggacagggaggagaggggtgctgccaggcaggagttaggcagcagctatctggactctcctgtgcacagccctagctcggacaattctgggagcgttggcggcatgcacaggaagcattacaacaatggtggtggcctcaatctcagcagcagcagcagtgtatggtccagttcgagaagtgtgagcgaggccgaggatgatgatactggtggccctgaagaggagaatggggtcttggatgactgggaagctgttgctgatgcagatgcgcttacagttgatgattgtcattcccaccagagttcaggtcatgtggcgccaccagctgctccaaatgtttgtacagctcctgccaatcaaactggaaggcaagatcccattcagagaacaaaagcttgggcgcctgatgatatattccgtccacagagcttacccagcatctccaggcaggtcagcttcccagcaagcatcgggaatggctggatgggtgctgcacagcaggccaacctctctacgcctttgacatgtccaatatgctgcgaggatcttgacctgacagactcaagcttctgtccttgtccttgtaaattttgcctgtgtctcttctgccacaacaagatcctcgaagctgatggacgctgccctgggtgcaggaaggaatatgttgccgcgcggctatcccggtcttgtagcatgggtccaagatactaggttgtgccagggtttataatagctctctgtcgcaatttggtcctttgctgttgctgtcagatatgcgttttgtcttgtgttgtccctttttggtataaagaaatgtgaatattggataggtgctaaatccatatagaacgtctccagaaactcggtgtctgtttttagactgtttgcattgtatgtgatgcgtatgttgctggagaggactccttatcgttttgtgatatcatatatgatagctatataagatgacctttgcagctacttatctacccatttatgagcaatgaagtacattgatctttgcgt

SEQ ID NO: 26828 - DNA, 1916 bp, Oryza sativa
  ref <308>: DATABASE ACCESSION NUMBER: AK102270
  ref <309>: DATABASE ENTRY DATE: 2002-08-28
gattcaggcagcgaagcccccccaaagccgagctcgcgcgcggcggcgtcgtcgtcttcctcctcttccccccgagttggattcgtggccgcgcggcggatgggaggggaggagggaatggcggcggggaggaagaagcgggtggggaggtacgaggttgggcggaccatcgggcaggggacgttcgccaaggtcaagttcgccgtggacgccgacaccggcgccgccgtcgccatgaaggtgctcgacaaggacaccatcctcaaccaccgcatgctccaccagatcaaaagggagatatcaataatgaagattgtaagacaccccaatatagttagactaaacgaggttctagctggaaagacgaagatatacataatcttggagcttatcactggaggcgaattgttcgataaaatagctcgccaagggaagcttcgtgaaaatgaagcaaggaagtacttccagcagcttattgatgccatcaattattgccatagcaaaggagtatatcatagagatttgaagcctgaaaacctgcttcttgactcacgtggaaacttgaaagtttctgattttggacttagcactttggcccagaaaggagtaggccttcttcacacaacttgtggaacaccaaattatgttgctcctgaggtgcttagcaacaatggttatgatggatctgcagcagatgtttggtcatgtggtgttattctctatgttttgatggctggataccttccttttgaggaagatgatcttccaacactgtatgataagattactgcaggtcagttttcatgcccttattggttctctccaggtgctacatcgcttatccacagaatactcgacccaaatccaaaaactcgtatcactattgaacagataagggaagacacatggtttaagaagacttatgtagccattaaacgtggtgaagatgaaaatgttgatctggatgatgtacaggctgtttttgacaatattgaggacaagtacgtttctgagcaagtgactcataatgatggtggccctcttgtggtgaatgccttcgagatgattacattatctcaaggtttggatctttcagcattatttgatagacagcaggagtttgtcaaacgtcaaactcgtttggtctcaaggaaaccagcaaagactatagtagctacaattgaagttgttgctgagactatgggtcttaaggtccactctcagaattacaagttgcgtcttgaaggtgtatcttcaaacagaatgagcccgtttgctgttgttctacaggttttcgaagttgctccttctctgttcatggttgatgttcgaaaggttgctggtgacacactggaataccacaggttctacaagaacttgtgcaacaagatggaaagcataatctggagaccgattgaagtttcagcgaaatccgcactgctgaggacagccacatgctagcctggcgctaacgcagctgcaactcctgcatcagtgggattttcaggttttcaggttgtcaactcctagcccgtccaccgaagttgctcttgcaggcgctgcatgtaccacatagctgagtcagttcttcagtagatcagtgtaccattctagtttcatgcaccagatgttttggtagtattgttaatatagaactgtagatagtccatatagcggccaattgtgcagtctgtatgtaacatggatatagataggtttcttgtgtagtagtagtaaataagctggttattttgctgccatgaaactggaatgacttgtgaacgtcgaaatgctctcgtgtatgtcggatcttcttcacttagccgttctcaaggatgagagcaattaatcttgtgatataatcctatatgtatttccagggcagaaatggaaaagaaaagggaaacctgcctacc

SEQ ID NO: 26829 - DNA, 1591 bp, Oryza sativa
  ref <308>: DATABASE ACCESSION NUMBER: AK102271
  ref <309>: DATABASE ENTRY DATE: 2002-08-28
gcccacttggccttcctcgtctccggccttcctccaccgcgagctccgaccaccaccgacggcgacgatgcaggcggcggcggcgtggaggcgtcacctcctcgacggcaacatctcccccaccaccgcggcggcgatctccgccttcagatccgcctcccagccggcgctcgcaccccaaggattgggtggagcggatggcgcgaggtacatgtccgcgagggcgccggcggtcaaggggacggggcatctcgtccgcaagggaaccggagggaggtcgcctgtgagtggaatcatagctacggtgtttggagctactggatttcttggccgctaccttgtccaacaacttgcaaagatggggtctcaagtgcttgtaccattcagaggttctgaggattgtcaccgacacctgaagttgatgggtgacctgggtcagattgttcctatgaaatacaatccaagagatgtggattcaattaaggctgtcatggccaaatccaatgtggtcattaacctaataggacgcgagtatgaaacaagaaactatggatttgacgaagtaaatcatcatatggctgaacaacttgcaatgatttcaaaggagcatgggggtatcatgagatttatccaggtttcttccctaggagcatcggcctcttctccttctagaatgctgagggccaaggctgctggggaggaatctgtgttgaaagaatttcctgaggctacaattatgaggcctgcaactatgattggcacagaagatcggattttgaatagatgggcacagtttgccaaaaattggggtttcctccctcttgttgattctgggtctacaaagattcagcctgtttatgttgtggatgttgctgctgctattgtcaactccctcaaggatgacggcaccagcatgggaaagacctacgaacttggtggaccagagatttatactgttcatgagctggctgagctgatgtatgagacaatacgtgaatggccacggtacatcgatgttcctcttcctattgcaagggctatcgcatctccaagggaaatgctgctaaacaaagtgccctttccgttgccaaccccatcaattttcaacaaagatcagattaatgcattttctgtagacaccctagtgtctgataatgctctcaccttttcggacctcggaatcgtgcctcacaaattgaagggttacccggttgagtttcttgtgtgctaccggaagggcggtccagcttttggttctactgtcagtgagaagatacgaagttctgagctgtagtcttccactcctgaagacactgtagaattaatcttttagttgcagaaacgttgttgtgtttgttttcttactatctgctgctgctgctgccagccgcccaacagcgagcaggaccatattcgatgcatatgttggttcctgctcatgtttttcaccaataagacgcacaaaatctttgtcaattttttgagttgcaaatgcaagtgaggcgaatcgttgcagtcctacgacacaataacaaagatatgtttctttctttaccctatacatatatgctcgctggtttgcattgcttgc

SEQ ID NO: 26830 - DNA, 2283 bp, Oryza sativa
  ref <308>: DATABASE ACCESSION NUMBER: AK102272
  ref <309>: DATABASE ENTRY DATE: 2002-08-28
acaattcgttacacatggatctatatctatcactggactctggtacgaacgttcaccgcataaattttgactcgtgtaatgctaaattgctaacttctaaggctcgtgtagctcattcaaacagtagttttctgttttgtttttctgtaaataatggtgcgctggtacatcgaatgtagatttgataaataatgttaaccttcagtggtttaaattaaacactaagtgcttaggttaaattcataggttcagttcatggaaagtttctttccatcagcagcaattttctgtttaggttgattttgaagaaaccctctctgatttagtgtgattcctttacaagattggcctctgagagtccgtttgatgatttccatcaattatattagtgtatgctacattggtgctagggataagtaaaaaaataatttcagttaatatcagaattattgagctgtataaacctgggagttaaattagtgcaataggtctctatcattcttcttgaggtttaattctataagtttttggttggttccagacgcggttccagacgcgtatcaaactggttgattcactggtgtgtttttttcgttttcgtgtcgttttatgttactgtcagaaggatggctattcccatatatcacacatatttggagagttcagctgttggaaggttggaattgttttttttttctcatctggtgtatttctcaaaactgaccggtggttctgaatatttcaatgcctgatcaggatcaatttttgcatttctcgagttcttaacagaaaaggattttgctatacacactgaaaccagtgacattatttcattgtgagatgcagattacacttttcccatatatatatagtggttggcaaagggctcctggagtcctggttcttaaagatcgataacagctttcaccacaaagttctctgcaaattgcataagatcaaatacatgattcgttagtgcatccttgccatctgttttgatacttctatatgcaagtgatctggtgttctttggtgaattcatgtgtaaccactgctccttgaggcagttgaagggggtattggactagatccatcctacacataaccctcatgtgcaagggttctgcttggatatgtagtttttctacacaccattgacaactgataagtatatcagtaaccatgtttcctcctgcaatctaatatcgttctgtgttctgtcatttgttggttagtactgtttttttagtattgacctcaacttagtattatcattatccatgatttggtccctaggtggtttaaggagtaagtagcacatttacacctatccttgtacctgaatacattggttgtttcctcctcctgcaatctaatatcattaggtcatttgttggttagtactgtttatttagtattgacctcaacttagtattatcactatccatgatttggtccctaggtgatttaaggagtaagtagcacatttgcacctatccttgtacctgaatacattggttgcaaacttcgcagtggtaactcaatatagaagttagtttacctttgcatgttatagttttttgtgtctggatctcagttgacctctggttttctagtggagtttaggctactgcatcagtatcacttatttaactggtagtataattcaaccttttagttttatgtttgtacattctaggaatagtatgccttagtttttatgtttatacattctaggaatagtacgcacatagcgtaatttccacagtaccataagagaatcgtcgagaacgaaatcctcaacctagcatgtcataagtcattctctttcatgcacctgtaaatccttgtatgtatcgtgtggcaattatctgttgtcatatttttgacgtaatgccttactttgcttctcttgtaactgaattgtttgttataatgtactccctctgtcccaaaaaaacaaatctagtataagatgtgacgtcagttcaaattagtattactaggatgcgtcacatcctgtgtttgtttattttgggagttgttcatgtttttgttttgactcttgaacatacttgtttctggtcatttattgcactggatttgtcaagttaactagtgacgctgacatcaataatttttttgaagttttgatgaatttgttcattccctatccaacataatagatatttgtgagacccaacatatgtgaaaacgttactgttgtactgcaatttttttggatctacagcatatattcatccatttacttggtgatgtctg

SEQ ID NO: 26831 - DNA, 1381 bp, Oryza sativa
  ref <308>: DATABASE ACCESSION NUMBER: AK102273
  ref <309>: DATABASE ENTRY DATE: 2002-08-28
gagccgccgccgtcgttcgcgacaccgctctcctcgccgtcgccgcctccgccgccgccctcgcgaagcttctggtccaaccggcgcagccatgggggatggaggggagctggcggcggagaagcacgtccgctacatcgtcaccgtggagaagaggaaggactcgttcgagtcgctggtgatggagcacatccggctcaacggcgcgtactggggcctcaccacgctcgacctcctccacaagctccgcgccgtggaagccgacgaggtcatcgagtggatcatgtcctgctaccacccggaatccggtggattcgggggaaacgttgggcatgacgcgcatgtcctctacacgctcagcgccgtgcaggtcctgtgcctctttgatcggcttgacgctctcgatgtcgataaggttgctgattacattgctgggcttcaaaatgaagatggatcattttctggtgatatttggggtgaagtggacactagattctcatacattgcaatatgcaccctctctttgctgcatcggctggaaaaaattaatgtgcaaaaagctgttgattatattgtaagctgtaagaacttggatggtggatttggagctatgccaggaggtgaatcacacgctgggcagatattttgttgtgttggcgctctcgcaatcactggctcgttgcatcacattgatagagatctccttggatggtggctttgtgagcgtcagtgcaaagagggagggctcaatggacggcctgagaaacttgctgatgtgtgctactcctggtgggtgctctcaagcttgataatgattgatagagtgcactggattgacaaggacaaacttgcaaaattcatactaaattgccaggacaaggaaaatggtggaatttcagatagaccagataatgcggtagatatctaccacacatactttggagttgcagggctttcactgatggagtaccctggagtgaaacccatggaccctgcctacgcgctgccgctggatgttgtcaaccggattttcttgagaaaagaacattagcatctgcacgctccacagatcatgctgtgtaacatggacaggaacacgtggtttacttgaaaaatctgaaaatcatccccatggaagaacgaatgcagcatcaaattcaagtggtaactagaatatgttgtcagggtatcgcgaccaagctttcttgagagttgagagtcaacaccgacttcacactcaacagcatgcttgtactaactgaagttgtactgttctacgcaacggcaagcaatattttttttgtttattaattttgagaccgcgcggtaaacaattctcttgtagttgtatatttcaataaaatgtttttgctggagcatt

SEQ ID NO: 26832 - DNA, 1620 bp, Oryza sativa
  ref <308>: DATABASE ACCESSION NUMBER: AK102274
  ref <309>: DATABASE ENTRY DATE: 2002-08-28
ggctcagctcctctccccttctccctctccctctccaggcgctgctgctccgcgaaccctagccatggcgcgagtccaccacaagaacggtcgcggcggcggcggtggcggcggcggtggcaagggcaagggcaaaggcaagtggaagatgccggcgtcggtggcgcggaagcagcaggcagcgatggcgaacgtggaccaggtcactggcgacaagatccccaagagcttcgtcttctcccgcggcaagctgccctccacgctccgccatctccagcaggatctccgcaaggtcatgctcccctacaccgccctgaatctcaaggagaagaaacggaacaacctcaaggatttcgtcaacgtctccggcccgttgggcgtgacgcatttcttcatcctcacgaaccccaagagctcgccgcacttgcgcatggcgaagacgccgcagggtcctacctacacatttcagataaaggagtatgctctcgccgccgacattgcgaactcacagaagcgaccgaggtgtcccccagagatattcaagaattcacctctggtatatatatgccgtggctttgttttttcccccccttgtttgggaggtgttatgattgttattgttaggatgcttcttgggggcattgtgatagcatttgtgtggaatcatggtttggcagactgtactcagtggctttggcggtcttggcgagcctttcaagagtttggtcgaatattttcggcatatgacccctgctattgatccagtcactgttaagctgtcaacctgtcaaaggattctgttgatacatttcgacagagaaaaggaaatgatcaatttcaggcattactccatcaagctccagcctgttggggtcacccgcaagattagaaagctcatgcagaacaaccaagtgccagacctaagggacctgaacgacgttagcgattatgtgacaaaagctggatacggatcagaaagtgaagtggatgatgaagcagcaactgtaagtctagccagtgatgttgacaaattaaaccgagcatccagaaaaagcgccatcagactccaggagatcggaccaaggatgaaactgcacttggttaaagttgaagccgggctatgttcaggagatgtgctataccctcaacctgtaggcaaagaagggttggggaagaagggaaaagaagtcgaggaagagacagaaggacaagaagatgaggacttaatggagtcggatgatgaccccgaggatgaatcagaggagtaatctggaaggaattaaggaagcaatgaagcactaggcgaccaacctacggggatctccaacaatgtgaagcctccactgtcttgcaacactattaagcgcttggtttatccttgtggcaacacagctgaaggagaggatgcaaaagataaccctgtgtatgttttcttcgggtaaaacaataggcctttagagatgtaacatgctttcgttcatcccaattttgtgatatggtctgcagattaagcatagcgtacagatcacaagagttactaactactgttgtgagaatgaacataatttggccgtgatgtgtttcagggtcccagtaagatgaccaaagttcttttttgcc

SEQ ID NO: 26833 - DNA, 2086 bp, Oryza sativa
  ref <308>: DATABASE ACCESSION NUMBER: AK102275
  ref <309>: DATABASE ENTRY DATE: 2002-08-28
gtcaatctttccccatggcggagcccggggaggatgcggcagcggcagcggcggcggcgtcgaccaagtacgtgctcatcaccggcggcgtcgtcagcgggctcgggaagggggtcacggccagcagcgtcggcgtcgtcctcaaggcctgcggcctccgcgtcacctgcatcaagatcgatccatatttaaacacagatgctggtacaatgtctccttttgagcatggtgaggtctttgtgcttgacgatggtggagaggttgacttggatttagggaattatgagcgtttcttggatgttactctgacaagggataacaacattacaactggaaagatatatcagtctgtcattgagaaggagaggaagggtgactatcttggaaagacggtccaggttgttcctcatgtaactgatgaaattaaacagtggatacagtcagtatcttctgttcctgtggatgggcagactcgtccagctgatgtttgtgtcattgaattgggaggcactgtaggtgatattgaatcaatgccattcattgaagctctgcgccagttgtcattttctcttggtaaggacaatttctgcctcatacatgtgagccttgttccggtattgggtgtagttggtgagcagaaaactaagccaacacaacacagtgtacgagaactaagggccttgggtctgactcctgatcttctagcatgccgatccgcacagccactaataggatctgtcaaggagaaactttcacaattttgtcatgtaccggttgagaatatacttaacatccatgatgttccaaacttgtggcatgttccacttattcttagaaaccaaaaggttcacgaggctataatcaaacaacttaaccttggaaggtctgctggaccccctgagttacgagataggacacagatggctgagtcatatgatgacctcaaaaactctgttaaaatcgctttggttgggaaatatactaatctgaccgattcctacttatcagtggtgaaggctcttctacatgcgagtgttgcatgttcattgaaaccttctatccagtggattgcagcttcagatcttgaagatgcaactgcaacaagtgcaccagatgcccatgctaaagcttgggaaactcttaagggttcctcttgcattttgataccaggaggattcggggatcgtggaatatctgggatgatattggctgcaaaatatgctcgtgagaataaagttccataccttggcatttgcttgggaatgcagatatcagtgattgagatgtccagaaatgttcttggcctaaaggatgcagacagtgaagagttcaactcagaaacaccatttcgtgtggttatgtacatgcctgaggtttcaaaaacgcacatgggaaatacaatgaggttgggttgccgaagaacgttctttcgcaggacagattgtcttacatcaaaactatatgggagccctgagcatgtagatgagcgtcatcgtcacagatatgaggtgaacccttctttcgttgctatgcttgaaaacgctggccttcattttgttggttgcgatgaaagtggaaagaggatggaggttgtagagctacaagaccacccattttacataggtgttcaattccatccagaatttaagtcaaggcctcggagaccttcacctccatttactggtctaatattggcagcagctgaatacatgggaacacctgcaaataactcaaatggacatgttggaacatctgagtaatgccatccttaatctatcagatggaggtcattgatccctttttggtgttttgttgaggcatctgcttgttgctgctgagatgaggattctagtcattttggtcacatacataatcatgtaccggagataacacttaaagctggaagagaatttttgttatcccagagacctgtaattgcatagctgatcatggattcatgatacagtgtgcaacggattttagcgtggtaattttgttgggtgctcagagttttaacttctgatagtaattgtatcctgttaaacccgtgctccgttcaagttaaaatgaaaacttgcattatctt

SEQ ID NO: 26834 - DNA, 3823 bp, Oryza sativa
  ref <308>: DATABASE ACCESSION NUMBER: AK102276
  ref <309>: DATABASE ENTRY DATE: 2002-08-28
gttcctcgccggccaaactgcggcctccaacacgcgccggcgggcggaggctcgcggcagatgcgcccggcaggtcaggccgccgccgtagcccgtagatagggtgcgcgcaggacggagctgttcgtggaggccgtggggtatgcgctcttgagatgtctaatctatcagagccctcaaaagaagctgtgtcagctgacgattcaagtgctgtccagaaaactggagcatggagtaacacgttgaacattcttctgcaacaaacttcagtctatggtgtggctgctggttattgcctgtcagcatctctgctctccattatcaacaaatgggcagtcatgaaatttccttaccctggagcattgacagctttacagtacttcactagtgttgttggagttctcttatgtggacaactaaagcttattgagcatgatggccttaatttgaggaccatgtggaagttcttgcctgctgctgtgatgttctacatctccatcttcacaaacagtgaacttctactccatgccaatgtggacactttcatcgtgtttcgctctgctgtgccaatttttgtggccattggagagaccttttatcttcaccaaccatggccatcactcaagacatggctttcgctttcaactatacttggtggaagtgtgatctatgttttcacagacaaccagttcactgtgactgcttacacttgggcagtggcatatcttgcaagcatgtccattgactttgtctacatcaagcacgttgtcatgaccattggcctgaacacatggggccttgtgctttacaacaatctggaagctttcatgctcttccctcttgagatgcttctaacgggggagcttaatcagatgaagggcgacaatgctaaagtgacaaactggctttcatctgatgtcattcttcctgttgctctgtcgtgcttgttcgggctatctatatccttcttcgggttctcctgcagacgggctatctcggcaactggatttaccgtgctcggtatagtgaacaagctcctgactgttgtgattaatctccttatctgggacaagcatgcctcctttgtgggaacaattgggctcttgatctgcatgtccggtagtgttctctaccagcagtccaccacaaaaccaaaggcccccaaggctgagccaaaagaggagaatgatgaggagcagcagaagttgctggagatgcagcaagggcatgaaagcagctcaactcagaagcaaacatcatcttaagcctggtagaaaatttggcattgatatcttaagacagcttccctgaaccatttgggatgcttgggaaggatcatttggccaaaggatattcattcgttatatgagaaccttgaaatgccgttggcatgaaaaatcgcagagaaaacttaatgtcactttgcaattctttgtttagtagtataccgtatttatttgttagacctgtggtagggtatcaattatcaaagaatcccgaaacatagtcgaactggattcttcgtatacaatgtgctgtttcattgataatacagggtggttacccatttctatacaggacgcgcccggcagggcaggccgcaggcgatagcgtcggcgtgcaggaaacgagggtcacgtaccctgagtctcggactccgtgaggctgtgggctatatatgctcttgagataacagagctggacaatcgaggtatttgggtttgcctgcggtgttcatcttgctggtgatggagccactgaatcagccttgctagagccctttaaggtcattgtaggaaacgttgaattcggaaaggaagtgaaggttcaccattgctggagggattgcacctgtcagatggttgtatgacaggtctagaaccatcaggttcttgaggttgctgatcgattctgggatctctccatttaagttgttgaagctcaagttgagtgaaacaagttcttttaactcaccaatctccatggggatcacaccagtgaaattgttgttacctagattcaacatttcagggagagcagtagttgtatgatactgcaaacacaaacatgcacccgcataaaacgaaaatgtaaatgctctttgttctgagttatctgcaaccttgtctgactttagcattggcatctccattagtgccgctggtatttctcctgtaaggctattattggatacatccacatacttaaggaagttaaggctattgatccaggtatcttaccatacagtgcacaacgctctatggcaagaccctgaatattctcaaaaccatcaattgcttcatcctgtggcatagcttcattcttgaagttgctccccataaacaagacagtgaggttccttaagctcttgagtatgtgaagggtattagttatgtttgtaaaattgttgtaggaaatagataagaaggtgatcgacttaagatttcctatattttttgacaactggccatgaagcctattggcagataggcgcaaccaagtcaaattgctgcatgagtagatgctctctggaatggtgccgttgaaattattccaggaaaaatctaatgctttcagattgggcaggttggagaagttaactttggcaagctctcctgtggacttgttggtgctgaggttgatgattactagatttgtgcagtcgcccaaggatgctggaagctctccagataagttgttgctgctaatgtgaagctcctttagtctctttagctgaccaatagaatttgggattttgccactgaatctgttccagccaagatcaacaaaaacaagattactgagctttatgatgagtgaaccattaattgttccttgcaaaccgttgttagcaaaagagaggtactccaatgatgtggcatggaagagatcatccgggagggccccgctaatgttgttgttaccagcttttagcattctaagggcagtgcagttacctattcctggggggatgctgccactgaactgattgtagccaatgtcaataacagcaaaagatggcgagccgatgcagaaagaggaaggttgccgttgaggtggttgaagctgacatcaaggacaacgatgctaccagaggacatcagctctgccggaaggccaccggagagcgagttgtacgacaagttgaggcgcgacaagctggtgagctctcccagcgacggtgatgccttcccactcgcagcagtccatgccattccgccatgacatggcgatgccattgtcgtgtgatagcccagcaaggaaccggaggagagagctcttctcctgctcgaggcacgcaatggtggagacggccatggggagcaggaacagcagcagacataacgaggaagcagcgaggccagagaaaggcatcactaccctgcttctccacgcagaatggggtgccatcttcatggtctctcttatcacaggtctttggagttgaatttggcagctaatgttcgcgaaaattacattgttcgttgagcatatatgtacacaactgaatgcatatattatgtacttaactgaattattgtttcgtttgaagtccggagatattgattttgtgttcgcagccataggacttgtgagccatactgctacctgtcataccatttttattttctgtgcagccttactttgtcaactagagcatgtgatcctacctctgtgtggtccaagttgaatgtacagtttcttcttgataagtacattgcagaggtttcattctccctagtgtcggttgttctttctaagtagtattttgttgtctcttgtggagaatttcaacaaagtttgtgaaaatgttttatgttgc

SEQ ID NO: 26835 - DNA, 1772 bp, Oryza sativa
  ref <308>: DATABASE ACCESSION NUMBER: AK102277
  ref <309>: DATABASE ENTRY DATE: 2002-08-28
gccttttgctcctctcgccgttttggtcggggttttagcgagcgcgtgggaggccggaggcgacgacgacgaccgcgccgccgtcggagaagaaggccgcggaagcaccagtaccagcacccgtatatgtcttctagccccttctccgatctggtggtagtcgtgctcctcgtctgcgccgtcgtcgccgcagccgtcctcctccccctcgtctgcgcccgccgatctatgcaccagaggctccacggctggaacaagtccacgtcgatgctcagggacgggttcggggtcaagtattccgggttcctccacataaggccgtgtggtttctgtcgaggagattgacggattcgatcgattcgtgttcgtctccgtcaaatttttgcacaagagaaaaaaaagtttcccccttttagagtttttccccttcagttttgtcagttttggtgaggaattttagagttcttttccggcaagagttagaagaagagagaaatggccccttccaagcagcagcagatgctcctcaagaaggtgatggcgaagaagcccaagacgaagaggctatccgggtttggccttaaaccctctgctgctttctccaggccccatgtgccgtcggcggcggcctccctgcagccaagccgtcgcgtccgcgtcgtgttcgaggaccctgacgcgacggactccgactctgacgacgacgaggacgccggcgccgcctcaaagaagcgctactttgagctcttcattggcaagccagcttcgtcgacgaagcaggcctctccggcgtccaccgtcgctgcctacgccaacatcggcaaggttgggagcacctgctaccgtggtgtgcgcctccggaagtggggcaagtgggcggcggagatccgcaaccccttcaccggccatagggcgtggcttggcacctttgacactgctgatgcggcctccgccgcctaccagtctgcctcccgcaacttcgccgaagagaagcgccgccgtggtgtggcctcctctgcctcacctgctagttcggcgacccctactccgactgcgtcctcgtcgtcctcgacttctgccgcgccattcgcccacccttcgccgtcgtctgtgctcgaagccaccaagccagctccaaagccagagtcgccgccgctgccggagcaagctgcaactcccctcctggtggaggctaccaacgagaccgccgagctgccggatgacccagagttctacaaggatatactgcgcggtctacagctgccggacattgacccgatggatttccgagctgggctggatgctctggatatctccgatgtgccggcttacatgaatggcgaacaagacgtactcttcactgaggacatgctgcttggagacttcgctgaagaagatgacctcgacctcgacgacatcggtgatgacttctgcgaggatttcccagagatacccagcggctacgacttcggccgtggtgatatgttccggcaggtggatttctgcgtgtgaattaagagcttgctaaagttattcatgttggtgtgatgggcctgtgagtgtgggtgcttgggaggagatttcttgggttttttccccgagcaaaatcaatctgctcgtgcccttgagatttcagttccgcccataagaactccaacgcacatttagcattcggagagtaattttgttaggttaaaagtatggtaagttataggtggtatgttatgtttttctttttcttttctcaatgttatctggtacctaagtttgtc

SEQ ID NO: 26836 - DNA, 1559 bp, Oryza sativa
  ref <308>: DATABASE ACCESSION NUMBER: AK102278
  ref <309>: DATABASE ENTRY DATE: 2002-08-28
ggattttttccgttcgctctccctcctcctcctcctcgtctccgccgatcgaaggaaaacaaaaagctagggtttagctgcctctctcgctcgccatcgctcgcggcgactcgctgctagggtttttgggtctctctctctctctccaccggcgatggatgcggcggcgctcgacgacttgatccggcggctcctggacgcccgcggcggccgcacggcgcgccccgcgcagctcgccgacgcggagatccgcaagctctgcgccgccgccaaggacgtcttcctctcccagcccaacctcctcgagctcgaggcccccatcaaaatctgcggagatatccatggccagtattctgatcttcttcggttatttgagtatgggggcttcccaccagaggcaaactacttgtttctaggtgattatgttgaccgtgggaaacagagtatagaaactatatgtcttctccttgcgtataagattaagtacccagagaacttcttcctccttaggggaaaccatgagtgcgcatctatcaaccgaatctacggattctttgatgaatgcaaaaggaggtttaatgttcgtatttggaaggtttttactgattgtttcaactgcctccctgtggctgcacttattgatgacaagatcctatgcatgcatgggggtttatctcctgacctaaagaacatggaccagattcgcaacattgcccgcccagttgatgttccagaccatggtctcctgtgtgatctgttgtggtcagacccagataaagaaatcgaaggttggggtgagaatgacaggggtgtatcatacacttttggagctgataaggtcgctgagtttctccagacacatgatctagatctgatctgcagggctcaccaggttgtggaggatggctatgaattctttgctaagcgccagcttgtaaccatattctctgcacccaactattgtggcgagtttgacaatgcgggggcgatgatgagcattgatgattctcttacatgctcattccagatccttaagccttctgataagaaaggaaaagcaggaaccggaaatatgtcaaaacctggaactccaccaaggaagataaaaattaatattatttaggcagattcccactaatgtgaactgagaaattgtgatggagtactcctccaaacttgttattggaagatttttggtgcgcatgacactgttgaaaaatgtcgacctgcgtacctttgtgttttcactgtctgatgcaaatctgtcctgccgttattcctgctgaaaagaagatcatacttcggctgttcggcaaaaaccatacttggaagccttctttaacatggattacttatttcttcttgatctgctacataagtcagaaaccagaatatctgtcaatgggtaggcatagggaaactactagtctcatgtagattttgttcaatgctgtatgccattcacctgtaaagtgtgcctttgaaagggactgactgattagctgaagtcttttactgatgctgattgcatagaatggtaactttttacccagcagctg

SEQ ID NO: 26837 - DNA, 1972 bp, Oryza sativa
  ref <308>: DATABASE ACCESSION NUMBER: AK102279
  ref <309>: DATABASE ENTRY DATE: 2002-08-28
ggtggtaacattcggtgtggtagtgggcatactcgtcctcctcttcgtgctcgtcctcgtcgtcaccatcgagggcgtctgcaagcgccgctcctcctcctgattccgccgcggtcgctagccctaatgcgcgggggcctcctcgtcctgctcctcctcaccgcggccgtcgccggcggcggcggccacgagggctcctcctcctgccccttccacgcccacgacaagccccacgatgatcaccaccacggccacggccacggccacggccacagctgcggcggcggcggggacgactcccaccacgtgcaccatcatcaccatgggcatgggcatggccatgacggcgggatccagcggcggcttctccccgaggagctcgcggaggaggcggatctcgagctcgactccttcggcgatcaccaccaccaccaccaccatcaccatgaacaccaccaccacgaccaccaccatggccacggcgacttccaggccgagttatcacccttgggtatgtggctgagtgccatgggatgctcgcttctggtcagcatggcgtcgctcgtctgcctcgtcctgctcccagtaatcttcttccaggggaagccgtccaagaccatggtggattgccttgccatcttcggggcaggtgcgatgcttggggattcatttcttcatcaactgccacatgcctttggtggagggcattctcatacacatgatcatcagaatcataatcattctcatgagcattcacatgcacactctctggaagatctttctattggtttgtctgttctatttggcattgtgtttttctttattgttgagaagattgtgaggtatgtggaagacaattctcagaaaggggctcatggcttgggccaccatcatcaccatcataaacgacacgataggagcgacaaggccaagttgaatcacgcagaaaaggatcatgaggataaaggcgtaaatcaagcagaaaaggaaccttcgcatgatggtgcaattgagaaaacagatggtgtaactcgtgctgattcaaaatctgcaatccgtaagaggggcttatcttctggttccaattccgctgatagagagcctgtcaattctgaaagtgaccctgcccctaacaaagcattatcaagtgaagattcctctgtttccaattcgaatatggtgttcggctacctcaaccttttctcagatggtgttcataactttactgatgggatggccctagggagtgcttttctgctacatggttctgttggaggatggtcgagaactctatttctgcttgcacatgaacttcctcaagaggtcggagattttggtatcctggtgcgctcaggattcactgtaactaaagccctatttttcaattttctctctgcgttggttgctcttgctggaacagcactggcattgtctttgggaaaagatccagggcattcttctttgattgagggattcactgctggtggctttatttatattgctgttgctggagtcctcccagagatgaatgatcagaaaacaaccgtcaaaagctcgatgattcagttggtttccctgacaatgggaatgctggttgccctcggcatatctctagtagaatgatgacggaatttctggttgcagctttagggcctattgtacttaagccaagcggggaagatgattatatcttcggtttctgctccacggatgcactcagccacagagtaaggtaaggcattcgagacaatgtttaatcaggtagctcggcacagtggcaccatctctaaagatttcattgttctccaagttcgaatgatggcaagaataacaagcatcactactcactagtagatatgagtacctcttacaataaaacacatccctgttggcatcaacggtagatgtgagtatgtgacccatgacagaattagtggtaagcactgaatggaaccatggaagtgctgcgttc

SEQ ID NO: 26838 - DNA, 3744 bp, Oryza sativa
  ref <308>: DATABASE ACCESSION NUMBER: AK102280
  ref <309>: DATABASE ENTRY DATE: 2002-08-28
ggctccttgtgccgccgccaagacgaacaggggagggccgggcggcgagacgagcagagcagcggaggggaggggatcctgtcatggaaattaatactggtgatataaggggctatgcttatgttccctctcgcaaggccgccgggtcgccattatgccgacgccacgctccgcagggggcagtggcggctctcccaccacctccgcgccgcagccgcagccacaagcggtggtggtgcgcccgacgtgttcgatgcagtgcctgccctggacgaccgcatgcggtgcagcgcgctgctcagggagcgcgcagtgggaggggaccactacgggtgcacctccctcctccggtggatgctggcccggggacttcgccccaacaggctggcgctcgctgcggcggtcaaatcgtcgtccgcgctccccgactgccgcggcggcgcggcgctcgggaggtgcctccacgggctcgctgtcaaggtcgggtacgcggatggcgcggtggtggcaaaggcggtcatggacatgtacgggaggatcgggtctctcgcggacgcccacacggtgtttgatgagatgagctgctccgacgcggtatgtaggaacatcctgatcactgcctcctcccgtgctggactttacaacgatgtgttccatttgttccgtgcaatgcttgctagtggtgtagatgagagcatgccaactgcagtcacggtcgctgtcgtccttccggtgtgcgcaaagttgagggtgctgagggctggaaggagtatccacggctatgtcatcaagactggtttggagtttgacactctgtctggaaatgctttggtatcaatgtacgcaaaatgtggtgggagcatagctatggatgatgcgcatctagcattttctacaatttgttgcaaggatgtggtttcatggaactcaatcattgcgggatattctgagaatgggttgtttgaagaagcacttgcactgtttggtcagatgatctcagaggaatgccttccaaactattcaacattggctaatgttcttcccttctgttcacttgtggagtatgggaggcactatgggaaagaaattcatggttttgtggtccgacatggtttagaaatggatatatctgttagcaatgcgctgatggcacattattccaaggtttgtgaaatgagggctgtagaatcaatatttagaagttcaaaaatgggagatatcgttacatggaacactgtcattgcgggatatgtgatgaatcgttatccctcaagggcattgaaactgtttcaggggcttttgtttgccggaatggctcctgattctgtttctcttatcagcctacttactgcttgtgcccaagtaggcaatctcagagtgggcatcagggttcatggttatatttttcgacatcctgaacttcttcaagaaacatcattaatgaatgctcttgtcagcttttacagccagtgtgacaggtttgatgctgcttttcgatcttttatcactattcagaacaaagactcagtatcctggaacgcaattctctctgcttgtgcaaacagtgaacaccatattgaacagttctttagactccttggtgaaatgtggcatgacgtaactcagtgggactctgtcacgatcttgaatattatccgcatgagtacgttctgtgggattaagatggttcaagaatctcatggatattccttgcgagtcggttatactggtgattcttcagttgcgaatgctattctagacgcatatgcaaagtgtggctacctgcatgatgcagaaacactcttcagaagccttgcaggacggaacattgttactggcaatacagtgatttcttgctacctaaaaaataattgtgtggaggatgctgagatgaccttcaaccatatggctgagaaagatttaactacatggaatctgatgagccggttgtatgcacagaacgatttgtgtgatcaagctttttgcttgttccatcagttgcaatctgaaggactaaaccctgatactataagcattacaaatattctttcggcttgcatccatctgagctcagtgcaacttgtgaaacaatgccatggttacatgcttagagcatccctagaagatattcatctagaaggagcacttcttgatgcatactctaagtgtgggaacatagccaatgcatacaacctctttcaagttagcctgcataaggaccttgtcatattcacagccatgataggagcttatgcaatgcatggaatggcagaaaaggcggtagaactattctcaaaaatgcttacacttgacattaagccagaccatgtagttctgactgctcttctgtcagcctgcagtcatgcagggcttgtcgatgctggaattaagattttcaagtccatcagagagatctatggagttgaaccaacagaagagcactgtgcatgcatggttgaccttcttgcccgttctgggcgtctccaagatgcatacagttttgcgttggatatgcctcctcatgtggtcaatgccaatgcatggggctccttgctaggggcatgcaaggtccatggagaggtcaaaattggtcagcttgcagctgatcgcttgttctccatggaggctgaggacatcgggaactatgtgatcatgtcaaacatctttgcggctgatgataaatgggaaagtgttgagcatgtcaggaaactgatgaaatccaaggatatgaaaaaacctgcaggatgcagctggattgaggttgagaagacacggcatttgtttgtagccagtgatgttcagcaccaagataggttttctatctacgatgtgttgggaagtttgtatcagcaaatcagaggtacacagggagggatagaacatttagttgtgacttatgagctgtgacataaaacactcagtaaattacttggtgttctggccccgtcattgttttgggttgccaaagatctccatggaactgagtgacctttccatcacatcttccgtggacaacaaatggagacatctgcttacaaccgtgaaccggttggagtgtctttgtcagctcaaaaaaaagattggttcctggcgatgcattgttcttcctgaggggaacagctgacgcagcacagacgtccgaagctagcaaggcatcctcgtcctcacgtacgtccgatctgcccccttccacgccgtggttccgggagctgtgggtcaacgccgacaaatagttgcagccgtcgcctaaggtatgtcaaatcgagagaggagattggacgctgtggcgctgtgttctgtgtggttggtggtgcttcttgggtcatttgcaaacacctcctctaagatagcctgtctgcaaacaccactttcttaatcgagaaggtggtacttcttgattctaattgatgaatcaagaaagatggagtctagtatatacaaaatgtggtcatttgcaaagcagacagagaaaagggttgaagatctatattcagatgtgaaaaaggcgaagatgaacttgatgaaggaatctaaacattcagtagatccagaagctcccttgctcatagcatagacccttgaattttattgaatagttagtttatgaaactttcgttactgaatatatgccagggtgtgcccccaagaatcacgtatttttgggatttgaaatgaaatagtaccaaacaaatttggagagtgatgaacttttttctttagtgactaatgttttatatttttgtc

SEQ ID NO: 26839 - DNA, 1215 bp, Oryza sativa
  ref <308>: DATABASE ACCESSION NUMBER: AK102281
  ref <309>: DATABASE ENTRY DATE: 2002-08-28
tggcgttagaaagaaaaagaaaaaaaaaaagaaaaacccaactccgaaccctttcttttgctccaagcgcgcgcgccgccactggactaccgcaccaccaccaccggccgatcgagcgcggcggcggctgcggcgaggccggcggaggaggcgagatgaggaagcgggagagggagaacccctgcgagatctgcgggcactaccacaacagcgaggaaggggagcggtgcggggtctgcggccaccggtcggggccgatggccggggagcccccggcgacgctggacccggccttccccaccgaggtcctcaaggacttcctcttcctcggcagctacaacaacgcctcccgctccgaggtcctcaagacgctcagcatcacccacatcctcaacactgtgccagattgtcagaatctctaccggaattctttcacttatcactgcattcaggatgagaggagcttggattttgatggtgcaaacaggtttttagaacagtgtgaaagggagacatcacgtgttcttgtccattgcatgtctggaaaaaacaggtctgcagctattgtaataggctacttgatgaaatctaggggatggagactttcacagtcttaccaatgggtgaaagaccggcgaccacaggtgcaactgacagatgcttcacagaatcagctcgttgagtatgaacagaagcttttcggacccaatgttggcgcacctgctcaatcgtcggttccaactgaatcatttcgtcctcttggatttggtttcccaaaaccggcaggtgacatccaagcgcccgtattcaaccagcagcccgtgccgtccatcttcgagcgagtcaacccaagtaatattcctagtaattttacttttggagcaatggaggccaacactcctatggacgacaatggcgcgcccgcaccaacttcaggtgataacccgatggacagctcataacaagtcataactcataagaggacctgacatgttcaatctcctctgtagtgattagtgaatggatattactgccaggcatatctgatatgcaaaatgggatgttatttagatggtctctagaattgatgaatggttctggcaaatgatggcaattgatcagggttatatgcactgactgccaatcatggcaaatggacctgtgggtttatatgcaatagactaagttaatcatgatggcacgctttttcagtcc

SEQ ID NO: 26840 - DNA, 3435 bp, Oryza sativa
  ref <308>: DATABASE ACCESSION NUMBER: AK102282
  ref <309>: DATABASE ENTRY DATE: 2002-08-28
ctttccaaaccctatagtttgtgatggttcacttgcccaagattgcgatggtatacctccttttctgaaaaccgcaaggatagcacatggtctctacataaaaggagctaatggtggtggtgactctgccacccttacacctgttgagtttgtggatcttctgcagacaagtggatgcttgtgcatgtagcttttaataatgttatttgcacattgatgtttgtttcaaattacagatgattttcttcttggtattatataacaaattcgaagtttaaaatttataacatttttatttgaaataaattataattgatgggtatctagctagttctattagaaaactgcaactcaactggaaatgagatcgtttagcaagttggtctcaaacagggccaactcaggttggactttaatgtggtatagcatgtggttatgatggatgggcttgatacgtccggcaacccttctattcatggagttgcaagttatttattaaattctgcactagtattgcagttttttaatgccctgcaaaagtttctgatataacgacatatatcattgcaaactgtgatgattgacaaaataattgcaatttaatgctatttacccaattatttgtataagtaattatatattttttgtatgaacacattgaagttggtggcagcgaaatatcttctcgttttttttatcaagtggagttgcacaaaagttgcttaaaaaaatcaaattaatccattttgttaaaaaactagctaatacttaattaatcacgcgctaatggactgctccgttttccgtgcgtactattccggttgggaacaaggaatagcgaaataacagccttaatcacttatatttttttgtgtgtactcattcagttaagtggcaaggcaatacctagttggtttgtttgatcaagtggaaccttagtttcccaaattctaaaacaagttaaataagatagagctagatagtgtggtattccatacagtgctaagaaactttatcttcttcatcatgggttggttcagaagatgatatttagtatcttggaagcaacaatgtcacccgcagcattgcagtaataataagcatgcactgtttatctaacatgactaagggtttagcagtgtacaagtgatggatgccgtccaataatagtatgccattcaacagaaagtgcaacttgtaatgttttatggcaaatcagtaccaatcaacctaagtactttgtgatgtggactatagtacaaattatatctgaagacctttatgcactaccaaggacaatatgacatacatgcatacaagagctatgatccattttattgtcctttctggattttatgaactgcttgtgtctactcgttttattttcccttcaaagttgatcagttctctcatttgccctcatgaaatctgctccctctccttcattctcaaattttatcttttattttcccttcctccgtcaacataccattagtagatgagtgaaaaacatgattttgaccttgtgtatcattttctatgtaccaaaaaagcttgttgattttggtaaaaaaaaatcttgctggttaattataaataaattagtacattagattttcacggtaaaggttaagatgcatccaagacaaatgaaccaagtaaaagttattttagggctagacttttatacttcaatctagctgttcagaagccaaggttgaaaataaaaaaaaattgaaaatcaatctacaattaagttctaaaattcaaattctggctgtggcttgacaattaatgagcagccaatggcagttaatttcatgcaatatactaattgtaaaggattttgcataaaacttcattgctcaaagtataaaatacactattggtccttaaacatggagtgaggtgtcatgtagttccatgaacctcaaaaatgcaaatctagatccctaatcttggtttaatgtataactaaaggtctagagtgcaaatgacacagctcgggcactaatgtagtcatccacggagtcaagagttatgtatttatgtccctctgcaatagtatgcccccaaatagactcccactgcagccgtgggagaagaggcaaagagacgacgattagggtggggacgatcgtcagtgatcaaaggtcaccagggctgaaatagacgacgtgatagggaaagggcgattcaatgagtccgttgcagcattattgttgccgtgatccactgccttaatggtaacaatcacgcagccaggatcactttatcctatatcggccatggggacctatcgccaacaatcccagcccgcataatttctgtttctttgccttccttctcacgggcatggtgtagtgaaggggtctaaatgcaaaattctcgccaccatggatggccacgtcagcgcctgagctccgtcatctatagtttggatctcaagtgatacattaaaccaagattagggaagcagatgttcattatacatgtttaaggacgtagatgataccatggtccaacttgtaagcactgatgtattttattcttactaaaataacatttaggttcattagagatatatgaaccatcagtttagtataaaaattgctcctggcaacaaaaataaagtataaaaatagctgctgtgcataaaaagataagggcaaaactatcttttcacccacctaacagtaggttgacggagaactaacggaaagggcaaataaaggataaaagttaagaatgcggagcactagaaggagccaattttacgagggcaaacgatggaagcgatcaacttttaaggacaaataaagaattttctcgtaaggaaaatactctaatagatgttagctttgactgttttatgatggttttcataatgtgtataaattctcaatttcattccactaggtgagatcacccttgattaattacgtgtttcttaatatatagatattttgtaaagaatatttgaattcattaagagcagatgtgtggtgctttttttcttttgtcctactaactaacttctctgaatgtctagtgtcacgattattgttgcatatctgatgaagaagcatcaaatgagccttgagaacgcgttgtcgctagttagaagcaaacgacctcaagtggctcctaatgagggattcatgtctctggagaactttgagaaatccatgcaagtggagcaggagaggaaacttatgcaacctgtgcagaactaactataggcgtaaatgcatgtgttgagaatacactgctaatagcttgcggagcagtctagagatcaaggccgtagtgcaaaatgttatgaattctagctgcggtattattagcagtcgtctaattgatgctgtaagcttcaagtgaaattggtggtcaatgcaatgaaatactctgggatccagttctgtgagggtaacc

SEQ ID NO: 26841 - DNA, 2197 bp, Oryza sativa
  ref <308>: DATABASE ACCESSION NUMBER: AK102283
  ref <309>: DATABASE ENTRY DATE: 2002-08-28
gtggccaccacaaccacgcactcctcttttttttttccccttccccaccaccaccaccgcctctctcgccggcgaagagaagggggaagcgcggctgcggcggcggcggcggcgcgcggcggaggtagggcttgaggtcctgaggtctctcctccgtctcgatctgcctcctaaccccgaagcgagagggattttgcgcggggagggtgggggtccgtacagcccggccgccgtatcccggggtggcgctgaggctgccatcagcttgcctctatctgaatcttctggccctgaaaagaagctaaaattatttttctttgtcaagaccaaaaagtatttattcaaaccaaacactatgaccacacaagcttgtaagaagagaagagcagtttatataagcagtgaatcagaagactctggtacagactctgaggttgagggaagcaaactctccaaaaaagatggggtcacgtcagtctatacatgtggtcaccagccaacctctaagaataaggttgatccgatgaatactagcaagtcaaggcagtgtggaagtattctgaagaagctcatggatcacaaaagtggatggatttttaatacaccagttgatccagtggtatatggaattcctgattactttgatgttattcgcaatccgatggacttgggtactgttaaaaggaaactcacaagcaagcaatattccaacccttatgagtttgcagcagatgtgaggctaacattctcgaatgcgatgaagtataatcctccaggaaatgatgtccacggaatagctgatcaattgaacaaaatatttgattcggaatggaaattattggaaaggaaatggaaagacagaaatttggtacaagagcagccatcactgaaggtattaaaggctcagcctgctgttaccccaaaacctgtgctacctaagggggtgactgcaggcacaaattcagctgtgagcaagacactggcaactgcattatcctccaaagtaaaaattaaattttctgtgcgaggctctgagctgacctcttccaaagacacgcctttgcaagcagttggcagaagagacggcacaattaaccaatctctcccttgcaccaaggacaatgctaagacaccaaggatacaatcaagtgaggacagatctgaatcaactggaaatgaattgcggccttgcgatgatgcttctacttcacctcttgcttcttccagacaagaagaggaatatttgcctgaagaacctttatcaccaagcaaggctcttcgtgcagcaatgctcaagagtcgttttgctggtacaattgtcaaggcgcagcagaaagcacttctggatcatgggaagaaaatagaccctgcgaaattgcagttagaaaaggagaggctggaaaaaaggcagcaagaagagaaagcaagaattgaggcccaggtgaaggcggctgaagctgctgcacaattaaagctagacgaagaaatgaggatgaagagggagcaggaaagacgagcagcacgcctggcactacacatgatgaagaagactgttgatattgacaacagtgacttccttaaggacctggaaaacttaagcaaaaagtgggagctgaatccccctggcaaacttattgttgattttgtcgacgggatcgatctaccacctggcttagggagtccgctagagaggcttggccttttcatgaagaaggatcttgaggaagaggtcgaacatgaaatggaggacagtgtatcaccatctacggagatcgacgtggaggaaggagagatcagcttctgtcaatagcacggctctaaaatatccattgtttcttcctttttttctttccccccatcagactctgaagcaacatgctcgcatggcttataaaattgtgcgcgagtgctgtgttatttattctgcctcaagacaacatcataacataagccgagtaaaatgaagcgttggttcatctagtttgtgttgtctaaccagaaaacaaaaatgtcagctgaacactgaagtggagttatcggttgcgtggacttcgccccgattttgtcggttctgtgaaaccctgtatgttgtaggtgttccacgtatgcaattctgtaaaaaaaggaaaataaaaaaaaagttgtatgtaatgtgatgttagactgttagtatataataatattatagttactgatg

SEQ ID NO: 26842 - DNA, 3801 bp, Oryza sativa
  ref <308>: DATABASE ACCESSION NUMBER: AK102284
  ref <309>: DATABASE ENTRY DATE: 2002-08-28
ggagagagtttttccgattcggccgccgcgcggccgtcacgaaccagataaaatctccacgcagttcccctcaaaaagaaatttggttgattttgatttgatttgattcgtgtgctccccgccgccttcgatccctccaacggataatcgccgccgacgacgacgattcggaggagaagatagtattcaagtgggttcatcaagataatttgtttgcagtgtgctggagatagtgtggtctgaccaggcttgttggggattagtgaagctaagcatcgcagatatctgacaacagagagttgatgcccatgtttgctagcacaatatggatattattgacttgtgttcagacagtgaagagtacttcagcccgtactcagatacagaagacaatcttgattttgacgatcccaatgatggtgttaaccaggtggttttgcacaacacagcatttggcaataatagttcagaactactagtcgggctggatgacgataactggttaaacaacactcatgctttatcctctcatagacctgctgagaatagatcagacattattgaaagcagcagcggtgtcaacactgactgtcagaatagtgcttggcaatacaggactcttccacataccttcatgagcagcagttacaagtctcgtccactttctctaacaggaggtaacaatgttgaaagtacacaccccactgtgaagcctaacactgtgcactataatggaattgggttcccttcacctgctattgcaagtggctacaagccatatgttagttatggccagggtgtttcaattgatgatgatgacgatgatgtctatgaggttctgcatcaaccatttccgttcagtcattcgagtttaggtgacaagaagatcgaggaagaatccacttggaagtacaatggttttcaaacaagttctgcctatggaatcgagatgcctacatctgcaatgtcaacaggtggtgtctctgcatatggaggtctaaactcacataggatctttcctccatcagtgccatacaacaattctgttaacaattttggagtcaatggccttggcactcagagccacttaaatatagaaaagaggctttttggccgtgatgagagggtggtgtatgatgaagccctgaagcaaatcagtcaagaaacaacggaagaaaatttgcctgaaggtgttatgtcagtatcactccttaagcaccagagaatagcattagcttggatggtttccagggagaatagctcacattgttcaggtggaattttggcagacgatcagggtcttgggaagacaatatcaactattgcccttatacaaaaggagagggttgagcagtctaagttcatgtctgctgatgtgggcagcatgaaatctgtagctaaccttgatgaggatgatgaagtagtgatagtcatggacaagaagcaactgaagggtgaatctgtgaatatgctacaggattcaacactgtttccatcatcagaagcagcaagtgatgccgcagatctgaagccctgggctagtctaccggggtctgctgttgatagaatggtaaatgctgtcaaagttgaacccaagaagaaggctagagtgagaccatcgccttcgtcaactttgaggtctgctaatagatcaactgcgggaacactagtggtgtgtccagccagcgttcttagacagtgggctagtgagttggctgccaaggttactgaaagttctaaattgtctgttttggtttatcatggaggttcaaggactaaagatccaactgagttgacaaaatatgatgttgttgtcaccacatacactattgtagccaatgaggtacccaaacaaaactttgatgaggatatggaggaaaagaacagcgaaacatatgggttatgtccagcattttctattggcaataaaagaaagaaagacagcgaaccaaagaagaaaaagaaacccaaaaattcagatgctgaccttgatggtggaccacttgccagagtgcgatggttcagagttgtgcttgatgaagctcaaacaataaagaatcacaatactcaagtggctagagcctgttgtggactgagagcaaaacggagatggtgtttatcaggaactcctatacaaaatacaattgatgatctgtatagttatttccgtttcttgaagtatgaaccatattctgtgtatggttcctttcgctctatgataaaataccaaatttctagagatgcaactcgtggatataagaaactccaagctgtcttgaagatagttctgttgcggcgcacaaaagaaacactaatcgatggagaaccaatcataaaattgccaccaaaaacgattcagctgagcaaaatagacttctcaaaagaggagcgaactttctatatgatgcttgaagaaggttctagggaaaagttcaaggaatatgcttctgctgggacgataagagaaaattttgcaaacattcttgtattgctgctgcgacttcggcaggcttgtgaccatcctcttcttttgaagggaaaggaaaaagatttgattgatactggttctgtagaagtggcaaacaaacttcctaaggaaacagtgataaatttgcttggacagctggaaggagactatgcaatttgttccagatgcagtgacccacctgaggatgttgttgtagcaacatgtggtcatgttttctgttatcagtgtgtgcataagagcttaacaagtgatgagaatgtctgtccctccccttcttgtgggaagaaattaagcgctcaaacagttttttcacctggagtgttaaggttttgtatagctgataaattggagtctggtgcaacaactagtagttctgtagaagcagatggctctccatcaatctgtgaaagcagttacatatcttctaagatcagggcaaccactgacatacttaactcaatcgtgaatacacctgctctaacttggagtgatactatggaatcaagtccaagtgaagtagccccttctaaggcgatagtattctcccagtggactggcttgctggacttgctggagctttcgctggatagcagccgtataaaattcagaaggcttgatggtgcaatgtctctcaacttaagagaagcagcagtgagagaattcaacactgatccagaggtgagagtgatgctcatgtcacttaaggctggaaatcttggtctcaacatggtagctgcttgccatgtgattatgattgatccatggtggaacccttatgctgaggaccaggcagttgatagagcacacagaattggtcagacccgtcctgtaaccgtttcccgcttaactatcaaagacacagtggaagatcggattttagctctacaggagaagaagagaaagatggtccaatctgcttttggtgaggacaaacctggcggcagtgcaactcggctcaccatagatgatctccaatatctattcggaatatgagggcagctcatgatccttttgtggagctagctggtgaattttgtcgtagcaagactgacatagtcctatcagctatagctgatgacaaagccttagcaccattaatttatgcacccgatgttcctcaccatgggtgatgccatgtcttttgaattgctctgatcattggacagagagggttagttagcttttgtaattagattatgttcgccgtcgctggaatgggatgttaggaggtcttacatcagaagcagcctttttttgtgtgtatatatatatggcatgctaattttaatgttggttctctgatggaatgcatt

SEQ ID NO: 26843 - DNA, 2454 bp, Oryza sativa
  ref <308>: DATABASE ACCESSION NUMBER: AK102285
  ref <309>: DATABASE ENTRY DATE: 2002-08-28
ggtagtgtagcgaggagtgtgaacgatgtgatgccactgccagtatgccacacacaaccagtaaacctgggataatggttggtgtccggtgttcatgcattgactcgaatagcgagtcttctgttcagacatttgatgctgtgactcgaatagcggtgactacacatcatatgccctgtgctaattgcaactcccaaacggaagcaaatctcccgatgggtaatcaccgcttgctgctgctcctcctcctcctgctcgcggtcgttggctctgatcatgggggcgtgctcgccgccgacgagttcacctacaacggcttcggcggtgccaacctcacgctcgacggcatggccgccgtggcgcccaacggcctcctcgtgctcagcaacggcacgaaccagatggccgggcacgcgttccacccgacgccgatccgcctgcggggcggcgcggcgggcggcgccgtccagtccttctcggccgcgttcgtcttcgccatcgtgtccaacttcaccgtgctgagcgacaacggcatggcgttcgtggtcgcgcccagcacgcggctctccaccttcaacgccggccagtgcctcggcatcctcaacgtcaccgacaacggcaacgccgataacaacatcttcgccgtcgagctcgacaccatgctcaacccggagttccaggacatgaacagcaaccacatcggcgtcgacatcaacagcatgaagtccgtgcagaaccacagcgccggctactacgacgaagccacgggggccttcaacaatctgagcttgatcagccgccagccgatgcaggtgtgggtggactacgacggcgccaccacggtgctcaacgtgacgatggcgccgctcgacgttcccaagcccagtaagcccctcatctccgcgcccgtcaacctctcgtccgtcgtgaccgacacggcgtacgtcgggttctcggcggccacgggcgtcatctacacgcggcactacgttctcggctggagcttctcccagaacggcgccgctccttctctccacacctcaagcctcccggcgctgccgcggttcgggccgaagccccgttccaaggtgctggagatcgtgctcccgatcgccaccgcggcgttcgtcctcgcgctggtcatcgccgccttcctgttcgtccggaggcgggtgaggtacgccgaggtgcgggaggactgggaggtggagttcggaccgcaccgcttctcctacaaggagctctaccaggcgacaaaggggttcaagaacaagcagctgctcggcaccggcggattcggcagggtgtacaagggcgtgctcgcgaaatccaacctcgagatcgccgtgaagagggtgtcgcacgactcgaagcaagggatgaaggagttcatcgcggaggtcgtcagcatcggccacctccggcaccgcaacctcgtgcagctgctcggctactgccggcgcaagggcgagctcctgctggtgtacgactacatgtccaacggcagcctcgacaagtacttgtacgacaagaccaagcctgttcttgattgggggcagaggtttcagatcatcaagggcgtcgcctccggcctgctctacctccacgaggactgggagcaggtcgtcatccaccgggacatcaaggcgagcaacgtgctcctcgacggcgaggtgaacggcaggctgggcgacttcggcctcgcgaggctgtacgaccacggcgttgacccgcagacgacgcacgtcgtcggcaccatgggttacctcgccccggagctggtgcgcacgggcaaggcgacgccggtcaccgacgtgttcgcgttcggcgtgttcgtgctggaggtcacctgcgggcggcggccgctcggctgcatcgcgcccgacgaccagaacgtgctgctggactgggtgcaggagcacgagcgccggcacgcggccctcgacacggtggacgcgaggctgtgcggcaagtacgacgccgacgaggcgaggctggcgctcaagctggggctcatgtgcgcgcacccgttgcccgacgcgcgccccaccatgcgccaggtcacgcagtacctggacggcgacgcacccatgccggaggtggcgccgacgatggtgagctacgccatgctggcgctgatgcagaacgacgggttcgactcgttcgccatgtccttcccttccaccgtcacgtcgaccgccagccccatgtccgccgacgtctcggccgtgtccggcctctccggtggaaggtgaacaaacaaacaaaaaggccgccgcaaaataatggtcacaacaacccgttctcctggtgacttgtcatctatcgtgtaacatagtgtagagcactagtgactacgtagtagtgaggtcactgttcactgctgattaccacagtatatccccatattagtttaccaatcaagcagtaatacgtatattacagtgagtgtgc

SEQ ID NO: 26844 - DNA, 1772 bp, Oryza sativa
  ref <308>: DATABASE ACCESSION NUMBER: AK102286
  ref <309>: DATABASE ENTRY DATE: 2002-08-28
tgagggagacccaacccagcaagcaagcaaacccaaacccacccacctccgctccgcggccgtcttcttcttccctttcttccaccgcaagaagaagaagaaaccccacccgagccaagccccacacacaaagcgagcgactcggcggcggcggcgatggccacggtggcgatggacatctccaagccccctcccgcggcgggcggcgacgaggctgcggcggcgaaggggaggggcggcgccggaggaggaggtggggaggggctgcggcagtactacctgcagcacatccacgacctgcagctccagatccggcagaagacgcacaacctcaaccgcctcgaggcccagcgcaacgacctcaactcccgagttagaatgctcagggaagagctgcagttgcttcaagaacctggctcgtatgttggtgaggtggtgaaggtcatgggtaaatcaaaggttctagtgaaggtacatccagaaggcaaatatgtggtggatattgataaaagcattgatattacaaagatcacaccttcaacaagagttgctcttcgaaatgatagctatatgcttcatttgatcctgccaagcaaagttgatccgttggtcaatcttatgaaagttgagaaggttcctgattctacttatgatatgattggaggtcttgatcagcaaatcaaagagatcaaagaggtcattgaacttcctatcaaacatccagagctatttgagagtcttggaattgcccaaccaaagggtgtccttctctatggccctccaggcacaggaaaaacattgttggcacgtgcagttgctcatcacactgactgcaccttcatcagggtgtccggttccgagttagttcagaagtacattggtgagggttctcggatggtccgtgaactctttgttatggccagggaacatgcaccatccattattttcatggatgaaatagactccattggatctgctaggatggagtctggaactggcaacggtgacagtgaagtccagcgaaccatgcttgagcttctgaaccaacttgatggttttgaagcatcaaacaaaataaaggttctgatggcaacaaataggatagacatcttggatcaggcccttctgaggcctggtcgcatagacaggaaaattgaatttcctaatcctaatgaggattcacgctttgatatcttgaagattcattcaagaaaaatgaacttgatgcgtggtattgatctgaaaaagatcgctgaaaagatgaatggggcttcaggagccgagctcaaggcggtctgcacagaagctggaatgtttgctcttcgtgagagaagggtgcatgtaacacaagaggactttgagatggcagtggcgaaggtgatgaagaaagacacggaaaagaacatgtccctacggaagctctggaagtgaagctcacgtcttaatagcctaagctttcactgcatcgctgaagcagcggaagcatgtaactgcatgttgtggacttcttccatgtgctttagaatatgttgttccatggttaactttcagattttaagatgcacctatgataatatgatgttgaaaagtttaatttattgaattggctagatacacgatatgacattgctttcttgcaatgtacccctacgctgcctacttgggttgtttgcttgcctgttttgtgatctctcaagtcagaacatttgatttttcacccgctgtttcgccatgtgggtggttttgctgtgtcatgattgctgttgagatgt

SEQ ID NO: 26845 - DNA, 2371 bp, Oryza sativa
  ref <308>: DATABASE ACCESSION NUMBER: AK102287
  ref <309>: DATABASE ENTRY DATE: 2002-08-28
gggcgaaatattttccgcggcgccgcgcgtaccgttcgtccgtcgtcggtggagtggaggctgccgaactgtaaagctcacgggttgggcgaatctccactcctcactcgccccccactgaaatcgccaaaaacccaactgaaaaacccccccaccggaatcctcacgcacacacctcgccgcggaagctgtggcgtccgcgtaggagcagctgtttcttttttggatccaatccaatcggataagcagccatggctgtgaaggcgagttctgcagataacaggaccagaagcaccgtgtcactatgcatagtgattggcatgtgctgcttcttctacatccttggggcatggcagaagagcggatttggaaagggggacagcattgcgctggagatcacgaagcgaacggactgcacaatcttgcctaaccttagcttcgacacgcacctcgctaagcaggcaaggcctcgcgatctcgtttcgccggcgaagaagtttaagccgtgcccggatcgctacacggattataccccttgccaagatcagaacagagcgatgaagttccctcgggagaatatgaattacagggagcggcattgcccaccgcagaaagagaagctgcactgcctgataccgccacctaagggatatgttgctccattcccatggccgaaaagtcgggactatgttcctttcgcgaattgtccctataagagcttgacagtcgagaaagcgatccagaattgggttcagttcgaaggcaacgtcttcagattccctggtggaggaacacaattccctcaaggagctgataagtacatcgatcaacttgcatcagttgttccaatcgccaatggaactgtcaggactgcattggacactggctgtggggtggctagttggggagcttacttattaaagagaaatgtcttggcgatgtcatttgcgccaagagattcacacgaggcacaagtgcagtttgctctggagaggggtgtcccagctgttatcggtgttcttgggacgataaaactcccttacccatcaagagcctttgacatggcccattgttccaggtgtttgattccatggggagcaaatggtggaatatacatgatggaagttgatagggttctaagacctggtggatactgggtgctttcagggcctccgattaattggaaagtgaactacaagggttggcagcgtacaaagaaagatcttgaggcggagcagaatgaaatagaggaaattgctgaccttctttgttgggaaaaagtcaaagagattggtgagatggcaatatggaggaaaagattaaacactgagtcttgtccctctaggcaagatgaatcaagtgtgcagatgtgtgactcaacaaatgcagatgatgtctggtacaagaagatgaagccttgtgtgacacctattcctgatgtaaatgatccaagtgaagttgctggaggtgcaatcaagcccttcccaagcaggctcaatgcagttcctccaaggattgctaatggcctgattccaggtgtttcatctcaggcctaccagaaagacatcaaaatgtggaagaagcatgtcaaggcttatagcagtgtgaacaagtacctcctcactggaagatacagaaacattatggacatgaatgcaggttttggaggatttgctgctgccattgagtccccaaaatcttgggtgatgaatgccgtgcctacgatttcaaagatgtcaactctaggggctatttacgagcgaggattgattggcatataccacgactggtgcgaagctttctctacttacccaagaacgtatgatcttatccacgctagtggccttttcaccctgtacaaaaacaagtgcaacatggaagacatcctactggagatggaccgcgtcctgaggccagaaggcgccgtcataatgagggacgatgtcgatatcctgacgaaggtgaacaggctcgccctcggcatgaaatggaacacgaggctggtcgatcacgaggacggccccatggtgcgtgagaaggtgctgtatgctgtgaagcagtactgggtaggcggaaaccagactgcagcagctgcagcatgaagcaggcgtaaatcctaacacaaaagatggaagaactctgcaatccatcctgaactgacttccaggaaaggtaagatacgggagtcatttagtgagaggccaggtgatcttgtcggagtggcgatgaagaagcaacccgggctttcttggttgctctgatgatcggctggcgtatattgttgtaacaattttgtaatttcatttgtcactctctagtgttaactggttacgatgcttaattcaaggtttgcttgtcagttgtcacggtg

SEQ ID NO: 26846 - DNA, 962 bp, Oryza sativa
  ref <308>: DATABASE ACCESSION NUMBER: AK102288
  ref <309>: DATABASE ENTRY DATE: 2002-08-28
atccatgcttttcctggaaggagtacagaaaatccaaggcaaatatagttattacaacagattggaacatctgtgatttaagttgggaaacgaaatatctgaactattaaaaaattgaagtcatgaacatttaggaaatttctttactttttcaagacataaatattgaatctcctcagtaactcctatatgggatacagcagcaatgcacagtaataaaaaaaaccaaagctaaagtatttagaatgatattgagcatattaacctgtagtaaaattgttttatatattatagtaagctattgacccactaaagggatacaatgtttgctcagtctctgctgaaatgaatattgcagtgattcttgttattgaattgtgttgtttatgcaggctcgtgattatgtgttgtacttgtcgctgcttgatgtgctcagtcggaatgagcagatccctctggaagcttacagcgaggtaccagaactaaaaacccaccctttctctcatgagaaatttcatcatagatctgtagcttcttaatccatcataaatcacaatcactttgatccgttctgtttcgagtgcagctttcacttcttttccgggatcacgacgatctgctggaagagctagcgaagttcagaccccttcctaccccaagcacagtttatagccacagctcagtctggctgctcttcttcctaatgcccctccttgtcctaagcattctcctcaagtgcttccttcttcaacagccagttgcaagctgaaaaagatcaagcgtgcaatgtcatgtgatatctctgttaaaagccaaagcgtctttgtggcgatgtctcgctgtttatattggagatatctccgtgtactgatgcaaggaagtagcctcttagcttggaagagcgccaatacatggtaaaaacagtattgttttgacttgctgaaaaagaaaaatcactattc

SEQ ID NO: 26847 - DNA, 1517 bp, Oryza sativa
  ref <308>: DATABASE ACCESSION NUMBER: AK102289
  ref <309>: DATABASE ENTRY DATE: 2002-08-28
gtgcgagctagtgcgcagccttgtgccggcctcccggcggcggcgccggcggcgccgacggcgtgccggctgacagctccacttcctgcatcccggcatgccgcctacacttgcaaaccgcttcagcagcagcagcagcagcagcagtcagggccattccattttcagaagaattgaagctacagtaattttgtcttcgtgtgcacaggttcccttggcttcccattgatcggccaaagcatctccctacttcgtgccctccgcagtaatactgattaccagtggtaccaggacaggatcaagaagtatggtcctgtgtccaagatgtcagtgtttggctcaccaacagtgctgatggctggccctgcatccaatcactttgttttcagcaaccaggacctcattttcacccagacaaaggcgatcaacgtccttatcgggtgttccataatgacactctcaggtgacgagctaaagcaagtccgcagtgcactgcagggctatctgagtccggagatggtgacaaaatatgtctggaagatggatgaggaagtaaggaggcacattgacctgaattgggttggtcataagactatcaaggtcgcaccgttggcgaagaggctcacctttaatatcatctcctcagtcatgtttggacaaggggcagctcctttcagagaagcccttgcaatagattttgagaaagtggtgagggctgcgttgtcgattccagtgaatatacccttcaccaagttcaacaagggcttgagtgcgagccggaggattaggaagttgctcaggcagattgctcacgagagggaagcagcatttcagcaaggctattgcagttcagctgatgatttctttacatacatgcttgctttacgctccgaaggaaaacactctctcacagtggaggacattgtggacaatgcaatcttactcctgattgccggttatgagacgtcatctgttcttatcaccttcttgatccgacagctagccaatgagccggacatccttggcaagataactgatgaacaagaggagatcgctaggaacaaaggacctaacaagcctttgacctggaatgatgtttcaaggatgaagtacacttggaaggtggcaatggagacgctacggacagttcctgcacttctaggaagcttccgaacagctaccaaagacatcgagtaccggggctatcacattccaaaaggctggcaagtttttagtagtcacctcctcatgaaggactctgcagaaatcaacacagagattgcgtatcactttctcatttaacaccggaggaattgcattacaggccaaacaagtgctcttcttgtagtcaaaatgtttaaatcggcatcttttttatcttcctatctttgaaatgtagcacagaagttgtcactagatgccgaggtacacttgatcctgcccttctatgctctggagacaagttgagctcaggctgagtttcagtgacttgagtcaaaactacaacatatttgtcc

SEQ ID NO: 26848 - DNA, 1350 bp, Oryza sativa
  ref <308>: DATABASE ACCESSION NUMBER: AK102290
  ref <309>: DATABASE ENTRY DATE: 2002-08-28
tgggacccaggcagatctccccatctccgggacgggacccggcgcgcacgcgacccgacgcgacgacgcaagcagcagtggtgggtaagggtggactcgactccggccgtcgcgatggcggccgccggctggccgctctcctcctccgtcgccgacctcctccccgcctccctctcgctcaccctcctcctcgcctccctcgtggtcgtcgtggtgctggccgccgccgccttcttcttcgagcacatccgcaagatcggatgcacgcactcgctggagaggactgaagtctcggccgctttcttcgaggaccccaactcgctcaacaaggttcgttgcccttcaatttacgaccctgctgagaagtacatttcgttgatcatccccgcttataacgaggagcaccggcttcctgaggctctcacagaaacactcaactacctgaaacaacgttcagctgtcgagaagtcatttacttacgaggtcttgatcgttgatgatggaagtactgatcatacatcaaaagttgccttcgagtttgtaaggaaacataaaattgataatgttagagttcttctacttgggagaaaccatggtaaaggcgaagcagtcagaaaaggcatgctccattcacgtggtgaactgttactcatgcttgatgctgatggggcaactaaggttactgatttggaaaagcttgaagcccaggttcgcgcattggctaaaaaggctgagtccagcctagcaccatctagcagtccatctcagagactatctgatgctgaaattgctgtttttggttcacgtgctcatctggagaagcaggctcttgccacaaggaaatggtatcggaattttcttatgaaaggtttccacctggtagttttattgacagctggtcctgggatcagagacacacagtgtggtttcaagatgtttactcgagctgctgcaaggaaactttttacaaatatcagattgaagaggtggtgttttgatgttgagcttgtatacctatgcaagcatctcaggatcccaatggctgaagtatctgtaaactggactgaaatacctggatccaaagtgcgtatgacaagcatcctgcatatggtatttgagctcctgctgatcaaagtaggttatggactgagcatatggaaaatctattcatagaccatatgcacggtacgctgacaatcaccatagcttatcatcactggactgtataccaagcttagtctcacatgtaaaatttttccaagattttcacctagagagaatccatttgtggcgctgagtattccatcatagatttcaacaaagatatagatcacgtgtattgttcctgct

SEQ ID NO: 26849 - DNA, 2359 bp, Oryza sativa
  ref <308>: DATABASE ACCESSION NUMBER: AK102291
  ref <309>: DATABASE ENTRY DATE: 2002-08-28
gattcctcccagatccccaatcctccaattcaccacttcgattgatgcgccaatggtgcgcgagctccgcctcgactccttctacgcgcgcctccgcgccgccgccgccgcgtccgccgccgacgcatcctcgccgctcctgatcctcccctccgccgccgacgccgacgccctctgcgcgctcaaggtgctcacccacgtcctctccgccgactccatccgcttctccatctaccccgtcgcctccgccgccgccgccgcctccctcctcgcctccttctccgcctcccacccgctctgcctcctcctcatcaactggggcgcccaccgcgacctccgcgccgtgctgccccccgccgccaccgcgttcgtcgtggattcgcaccgccccatccacctccacaatctctcggcggccaacgaccgcgtcgtcgtgctcttcaccacggacgacgagcacaccgccgatctctcctacgacttcgacgtctcctccctcgccgacgcctccgacctctccgctcagggggaggccgacgaccacctccgcgtcgccgaggaggacgaagactccgatgcttccgactcggattccgatggcgagggtgggaggaggaagaggcggcggctctccgacgatgcggaggcgaatggcgacccggagaggctgttcgggaagctgaggagggagtactaccggctcggcaccttccacgggaagccgtcggggtgcctcatgtacgagctcgcccacgcgctgcggaagaacaccaacgagctcctatggctcgcctgcgtctccctcaccgaccagttcgtccacgagcgcatcaccaacgagcgctaccaggccgccgtcatggagctcgagcagcacatcaatggatctggcaatctcgacccatctggcgtcggcgctgtggtgacgctcaaggatggcaccaagatccgggcgccggaggcctcacgcatcgcttatgaagacgagccgcggctgatgctgctccgggagtggagtctgttcgactccatgctctgctcgtcgtatgtcgcgacgaagctcaagacctggagcgacaatggcctcaagaagctcaagttgcttctggcaaggatgggattcccgctcgccgattgccagaagaggttccagtacatgagcatggaggtcaagcggaagatgcgtgatgagtttgatcggttcttgcctgagtatgggctcaccgagttctattaccggagtttcttgagggtgcatggctaccgctccaaggtttctgctgcagatgttgtttatggcgtcacagctttgcttgaatcactaaatgccgagtccaaggactccaaggggtcttctgctgctgagcaattctgggttgcatactcggcgttgtcgctgagcaatgtcgatcagctgcggaaagggatgcagtctgcaattgagatacagagggcaatactgaggcaaggaagctcagcgattaccaagaccgggttcattcggagtgcaaagaagtttcggtgggtgaagcttgatgatccagtggatacggataagctatgccaacctcaggctcttaccaagttctgctttttccttatggacgcactgagagagcgaggagcaaggatgaagccacttatctgcgcttgcttagcaagggagcctgagaaagtgcttgttgtgggggtatgtgggaagccaaggctgggggctgttaaggggaatgcatttggtaatgcatttaggtcagctgccgaggagattggtgcagactatttccatgacatgtttgagtcatcatggattgttcttgacgttgttgctgtcagctctttcatgattcggttaacagagaagctatgatgacatgtgtttgtctagcgctaatgattcttttcagtccccaaagaagatgggagcttgaagctggattctctcccaaactctaaataaaggagcttgagggctggtggagtgatcgttcatggcatgctctattttttctgctaccacatgatcttcactaagttagagatagcagccgggcaatggcaagcattgcttgattttcaaagtctagtagttcaacggctgagttttatactatgttattgaagggaagattgtttcctcactgtaactgctccattattagaaaatgatagatcaatagattcagacacaaacctgattctgacacacaaggggcaaggtatatttgcttgctgattttctttactactagatgagcttgatgtttgtatttgtattcgcataagcttgcaatttctgttgtagaatagtgttgtaatcaattatgtatcattgcatttacttgatattctttttaagtgt

SEQ ID NO: 26850 - DNA, 2163 bp, Oryza sativa
  ref <308>: DATABASE ACCESSION NUMBER: AK102292
  ref <309>: DATABASE ENTRY DATE: 2002-08-28
ggcgtccgtactgagacccaaccacaaaaatctcacctcctcctcctcctccctctcccaccgcggcctcctcctgctacctgggagccacgcgcccccggcctccacctcgccgccctcctcgccggcggccgccacgcgcttatggtgagtgcacagtgagctgcaagttaccattatcagaatggatggtagtaatgagaatatccaattctcatgggggaagaagagagcaaaaggtggtattaagatggatacacagttttatgactccttcacatttgacaatgtgaagtactcactgtatgacaatgtatatctttttaagagtggtgagtctgaaccttacattggaaagataataaagatatggcagcaaaatcaggctaagaaagtaaagattctttggttttttctcccggatgagattcgaaaacatttaagtggccctgtaatggaaaaggagatatttcttgcttgtggtgaaggcgttggccttgctgatatcaacccactggaagctattggtgggaaatgcactgtgctttgcatttcaaaggatgagaggaatcgtcaaccttcccccagggaactagcaatggctgattatatcttctacaggttttttgatgttaacagttgcacactttctgaacaattacctgagaaaattgcaggggtggaaggaaatcttttgcttaattcaaaagttgagcaagtgacatcctgttcagaccaggaagtgcatggtgttgatcagaagatgcttaatgtcccagttccccttccccagtcaacggttatggaggatgaaagtccagttgctgcagtttcccttcccccgtcagtattcaaggaggaaaatgtggcttcagccattccctttccccagccagtggtcaaggaggaaagtgcggctgctgccattccccctccccatgtagcactgaaagaggagagtgtgtccaaatctacagagaacattaccaaacctgcacagaaagttctccctggggagaggccaccaaagagggtcaaattttctgaaaatgttacagtgcaaaatgtgccattagatgttcctgaaagaccaagtcgcactggacctttggaactagcaggtagacaagctgacagaagcaaatggttcaagattccatgggataccagactacgaaatgctgatgagcaggggacacttgtgtacattcaaaatcttgacatacagtttgcagctgctgacatagaggagcttatacgtgatgctttacaactaaattgtatcgctaagcctattaaccacccaacttatgatgatccaaacaatggaaaagcatatgctatattcaaaacaaaaagtgccgcagactctgctatttcaaaaattaattcaggcttggtggtcggtggaagacccctttattgcagcaaaggattgcttaaggttccaaaaccttcagaaactcttctcgggcacttaacaatcaacaatattagaatgggtataagacaacgagaagaacagaagaaggcagtttcaacctcgcattgttctcaacccaatacaatggagtatgatttggccttggattggatgcttgtccgagcaaagcaagaaacgaaatttaggacacttcacaagaagcataaagatgagaggaagacctttgcgagtaagatgggaaagtaagtggcttccatggatttggttaagcgatgggaactgtcctgttccgtgcttatcttggagtcctctactgagtactgactatcattcctcggagctttatgcactttttgcctgaagcaacacttatctgcgagtttttctgctgcgcaagaatgaaatgcaacgaccatttgagggggacaactaactgcaccacactgactctgctcatgttccgtagagcattatttttagaaaggaaagaattgtgccatagcttaagaaaccaaagtaacattggtagaagtagcccttgcagcaagttaggaaagccagaggctgttttaggttaccccgcacatcaatttgatctcacatggacacatcagttagatctgttgctccatgttagatagcaaatcaacgcgtgccgtcatgaaatgtgtatgtatatatttttaaattcatgacctggctattagttcattcatgtg

SEQ ID NO: 26851 - DNA, 1798 bp, Oryza sativa
  ref <308>: DATABASE ACCESSION NUMBER: AK102293
  ref <309>: DATABASE ENTRY DATE: 2002-08-28
ggatccagtcctactcttctctttgctgccgcttggagccggagaaggtgatggggagtgagtgtgttgagtgaagccatcggcatagccgtcgccgtcgacgccgctgcgttcgcggcccgagaaggcgagcccggagaagtagagagtcgtcgatcttggctgttgttctggtgtggtgcctgctggtgagtcgatttgagggaggaagaactgacttgacagtttcttcactcgctgctagagaaaatgatgagccgatccgcatctgcacttcaagtccttttggtttttgcaactgtttttgctgcgactcaatgggccacttcatctgccatgtactgcaacgacttgacagcaagcgtgcatcggccacacaataagggtggggcagagctctttgtgcctgctggaaggtggttgactgggagttttaatcttatcagtcatctcactgtgtcacttgacgccgatgcagtaataatcggatctcaagattcatctgactggccagttattgatcctctgccatcttatgggcgtggcagagaactccctggtaaaagacaccagagtcttatttttggatccaatcttactgatgtaataataactggtgctaatggcaccattgatggccaaggtgaactttggtggaactggtttcacaatcacacactaaattataccaggccccctcttcttgaactgatgtactctgacagggttgttatttccaatttaaccttcatgaatgcaccattttggaatattcatcctgtatactgcagccaagttcttgtccagcatctgacgatcctagcacctatcagttcaccaaacactgatggcattgatccagactcatcctcaaatgtgtgcatcgaagattgctacatcagaaacggcgatgacattgtcgtcatcaagagcggttgggacgagtatggtatctcttttgcccatcctagctccaacattagcatccgcaacatcactggacagacaaggaacagcgcaggaatagcctttggaagcgagatgtcaggtggtatatcagacgttcgagctgagggccttcgtttcatcaactcggtgcatggaatcagaatcaagactgccccagggcgcggtgggtatgtgaaaaacatatacatagctgatgtgagcatggacaatgtctcaatagccatcaggatcactggaaactatggggaacatcctgacgacaactatgacaagaatgcgcttccagtcattagcaacataacgataaaaaatgtggtgggggtaaacattggtactgcaggaatgttgctgggcatccagggggatatctttagcaacatttgcttatcaaatgtgtccctcagtagcaaatctgctgatccttggaattgttcgctcatcgaagggttctcaaattctgtagctcctgagatatgtgagcaactttggcccagccctgggccaggccaagtatgctatgatggtaatagctacccagtgccagcagcacagcagccatataagtcgggcgctacccggttacaaaatcctttcctcaagttcatttctctatacagttagacgccccaatcatcaactatgtccttgtagatttttatttttggtgcaagtgattgttgaagacttccaattttgccttaaggcttgccttgtgtagtcgtgtgtatagagctttgtggagataactgttggtgtgatgttattatttcaatgtcctgtattgtttggattcttactctaaataaaagcaacccatgtttataacttc

SEQ ID NO: 26852 - DNA, 1314 bp, Oryza sativa
  ref <308>: DATABASE ACCESSION NUMBER: AK102294
  ref <309>: DATABASE ENTRY DATE: 2002-08-28
gtcgctctcctccagctccgcctccgacgcgcgcacgcctctccctcccctcctcctccgcctcgcctcgcagtgtggaagaaaggaaggaaggctaaaaccctagcgagcgcgcgagcgagcgagggctctctgcttccttgcgatgacggcgccggcggacaaggggaagaaggccaagaccgacgccgacggcggcgccgccgaggagaacgagcagatcgacggcgccctcgtcctctccatcgagaagctccaggagatccaggacgagctcgagaaggtcaatgaggaagctagtgacaaggttttggaggtcgagcagaaatacagtgagattcgcagacctgtctatctccgaaggagtgacgttatccaaacaatccccgacttctggctgacagcgtttctgagtcatcctctacttagtgagcttttgaccgaagaggatcaaaagatgttcaagtacctggagtctgtcgacgtggatgattctaaagatgtcaagtcaggctactccataactcttaccttctccgagaacccgtactttgaagacaaagagctcacgaagacatatgccttcgctgatgacggaacaaccacgataaatgctactagcattaagtggaaagaaggaatggaaattgcaaatgggaatgccaagaagaaagggagcaagcgaccattggttgaggaaagtttcttcacctggtttactgatacagagcacaagagtcttgctgatggtgtgcaagatgaggtggctgagatcatcaaggaagacctgtggcccaatccattgaagtatttcaataatgaggctgaagagttaggagaggatgacgacgaagaggggtctgatgctgatgagggtgaagaggatgaggaggaggagaactgagtctaggatgtcagattgcgatggtgccgatcgtctgcattttgtggatgctgtcactctgaagggcgaagttgcgtgaccctcggttgcttctttcttttttctttttgatgacttagctggaacccttaggaactgtttaatgccttatggagtccgtcgtattttcgactcaaaggagacacctctatatcataatctgcgtataaccatggaagacattttaacctgctgatgtgtggttcattgcgctgcctctggtgctgtagggtgttcgttcctttgtgctctctgtcttttttttttttttttgtgtgtgtgtggtcgcgctggcattgttgccagtctgatgggctgttatttctccccctagaaagagtgaaaaacctggcttgtgatcattgtttacg

SEQ ID NO: 26853 - DNA, 2106 bp, Oryza sativa
  ref <308>: DATABASE ACCESSION NUMBER: AK102295
  ref <309>: DATABASE ENTRY DATE: 2002-08-28
gaacacaccacacacacccacactggcagcagctcatacacatagctagctcagctgagacacacacacacacagtgagtagttcagctcaaagctagcatcagcagcagagctaattaacaaacatggcgtccgggagcagcggcggcggctacgcggacgagaaggggccgggggcggcgacgatgcaggcgctggggctgcagcagcagcacggcggcggcggagaggtggaagaggagtcgtcggagatgggggagaagacggcggcgaggacgcggctgtcggggctgctgtggcacggggggtcggcgtacgacgcgtggttcagctgcgcgtcgaaccaggtggcgcaggtgctgctgacgctgccctactcgttcgcgcagctgggcatggccagcggcctcctcttccagctcttctacggcctcctcggcagctggaccgcctacctcatcagcatcctctacctcgagtaccgcacccgcaaggagcgcgacaaggtcgacttccgcaaccacgtcatccagtggtttgaggtgctggatgggctactggggaggcactggaggaatgtgggactggccttcaactgcacgtttttgctgttcgggtcggtgatccaactgatcgggtgtgccagcaacatctactacatcaacgaccatctggacaagcggacatggacgtacatcttcggcgcctgctgcgccaccaccgtcttcatcccgtcattccacaactaccgcatttggtccttcctcggcctcctcatgaccacctacaccgcctggtacatcgccgtcgcctccctcatccacggacaggtggagggtgtggcgcactctgggcccacaagcatcgtgctctacttcacgggggccaccaacatcctctacaccttcgggggccacgctgtcaccgtggagataatgcacgcgatgtggcggccgcagaagttcaaggcgatctacctgctggcgacggtgtacgtgctgacgctgacgctgccgtcggcgtcggcggcgtactgggcgttcggggacgcgctgctgacgcactcgaacgcgctggcgctgctgccgcggacgccgtggcgcgacgccgcggtggtgatcatgctcatccaccagttcatcaccttcggcttcgcctgcaccccgctctacttcgtctgggagaagctcgtcggcctccacggctgcccctccctctgcaagcgcgccgccgcccgcctccccgtcgtcctccccatctggttcctcgccatcatcttccccttcttcggccccatcaactccgccgtcggctccctcctcgtcagcttcaccgtctacatcatcccctccctcgcctacatggtcaccttccgctccccgcaatcccgccagaacgcggtggagcggccgccgaggttcgccggaggatggacgggggcgtacgtgataaactcgttcgtggtggcgtgggtgctggtggtcggcttcggcttcggcgggtgggcgagcatcaccaacttcgtccaccaggtcgacaccttcggcctcttcgccaagtgctaccagtgcccgcctcaccccgccgccgccgccctctcgccgccgggtgccatcgctccggcgccggcctcgatgctgccgccgttcaactccaccgccgccggcatctttgccgctccggtgccgtctcctgctccggctccggcaccgatgcatttcgtccttggtcaccaccaccatcaccggcaccaccgccacggcctctagctaattaatcgagatcaatcaagatcatgattatcagaggttgggtttgcattattgcactagtttttagcgagctactagctagttgatcatcactgcaagattgttaattagcgctagtaattagtaaaagtaagcctcttttcctaatcctattgtatgctttgcttctttcttcttcttctggttactgagagagagtgagagtgagaatgtttggtggtggggtatgcatgtcagagacacgtttcaagtctctcgtcttgtaatgtgtcctttttgtgtggagctgcttttgagaaagaaagaagagagatcaaatttaaaaaaaaaatgg

SEQ ID NO: 26854 - DNA, 1237 bp, Oryza sativa
  ref <308>: DATABASE ACCESSION NUMBER: AK102296
  ref <309>: DATABASE ENTRY DATE: 2002-08-28
ggctctttcctttccccgaatgttaatcttcaggagctagctgcacggacaaagaactacagtggagcagagctggaaggtgtcgtcaaaagtgcagtctcatatgctttgaacaggcagataagcatggatgaccttaccaagcctttggatgaagaaagcattaaggttactatggatgattttgtgaatgcacttcatgaaattacccctgcatttggtgcttccactgatgaccttgaaagatgcaggctaaggggtatggttgattgtggcaaggcacataggcacttgtatgagagaggtatgcttcttgttgagcaagttaaagttagcaaaggtagtccacttgtgacatgcctcttggaaggtcctgctggaagtggtaaatcggctttggctgctactgttggcattgacagtgattttgcttacgtcaaaattatatcagcagagacaatgattggtttcagtgaaagcagcaaatgtgcacagatttgcaaggtttttgaggatgcatacaaatctcagtttggcatcataattctagatgacatcgaaaggttactggaatatgttgccattggaccacgcttttcaaacataatctcacaaactctactagtccttctcaagagggttcctcctaagggcaagaacttgcttgttattggaacaacaagtgaagtaggctttctagaatccattggtatgtgcgacgtgttctccgtgacataccatgtccccaaactgaaaaaggaggatgctacaaaggtgttgcggcatctcaatgtgttcgatgaagcggacattgatgcggctgcagaagcactggacgatatgccaatcaagaagctgtacacactcgttgagatggctgcacaagggccatcaggaggaagcgcggaagcagtctatggtggagaggaaaagatagatatcaaccacttctttagcatcttgagtgatattatccgctattaactacacggcgtcggaatgaaccctaggtgacaccataggaatttaattgcacatttcttcttacttcaagttctcccttttgccaccgtcgccagggtatagggttgtttgatctttgaggttcgtgtctccttgttgtgccgctttgagcttttgttggaatgttgttatgattcggacagaggttataccttacacgatgtagcatgtttcaaccgtatgtttcgatactttcccagcacagagttgcacg

SEQ ID NO: 26855 - DNA, 1686 bp, Oryza sativa
  ref <308>: DATABASE ACCESSION NUMBER: AK102297
  ref <309>: DATABASE ENTRY DATE: 2002-08-28
gactcgtcttcctcctccctccaccttaaacctcgaggagtcaagaatgggggtggacgctgctccggatcgcatggacgcggcctcttcttggatgaatcctccggttgaggtctcctctccggtggccggcggcggcggaggagaggatggggcagcgaccaagctgcagaaggtgtaccggagctaccggacccggcgcaagctcgccgactccgccgtcgtcgtcgaggagctctggtggcaagcgttggatttcgcgcggctgagccacagcaccgtctccttcttcgacgacccgaaaccggagaccgtagcgtcgcgatggaaccgcgtcagcctcaatgcctccaaggtgggtcagggtttatccagagacggcaaggctctgaagctggcattccagcactggatcgaggctattgacccacggcatagatatggtcacaatctgcatttctactatgatgtttggtgccaaagccaggccggccagccattcttctactggcttgatattggggaaggaaaagatgttgaccttcctgagtgtcccagagctcgcctgaagaagcaatgcataaaatatcttggtccgcaagagcgtgagctctatgaatacatagttacagaagggaagattatccataagcactctggagaaccacttgatacaagccagggtcctaaagggacaaaatggatttttgttatgagcacaacaaagaaactttatgctggcaagaaagagagaggtgtattccagcactcaagctttttagcaggaggtgctaccatagctgctgggaggtttacagcagaaaatggagttatcaagtccatctgggcctatagtggtcactataaaccaagtgcagagaacctcgccaacttcatgaacttccttgaagagaatggagttgatctgaaagaagttgaggtgcgctcatccaccaacgaagactattatgaagatccagtgcctaataaacagaaccctcttgctaccgtcatggaatccaatcctccacaattgattctccctcagaacatgatagaagaagataaggcatctgagccgttttcgcaagctgaaggtgccgaaagcgataacgttcctaaagtgcaaacaaagccaacctaccaaagaaccctctcaggtggtctgaaaagccctagagctgctgatgtcccgcgggaagcaattctcgagagggtgaaatcgaagggagagtcgaaatcctatcagctcgggcacaggctctccctgaaatggagcactggggttggtccaaggattggatgtgtgaaggactacccaatggagctcagaatgcaagcactggagatggtaaacctgtcaccaagggcgtcgactccatcgccgtcatggaggctgccagcatgcctctcacctacacccaacttaccatcatctcctcttggaccaatccagacttcactgccccagccaagttagaatagcatatgagtatgtaactagtatgtgcagcagcgagacaccattgcagaattgcagttaagctcttggtgtagaatgcattggccagagtcagatgctagaggttaatgcctgctgcttttcaaaggttatgtggatctatttgtgccatgaatgaatcaataagattagtaatataaatcctccatgtttgaattttgttt

SEQ ID NO: 26856 - DNA, 1941 bp, Oryza sativa
  ref <308>: DATABASE ACCESSION NUMBER: AK102298
  ref <309>: DATABASE ENTRY DATE: 2002-08-28
gaccaccacttgttctttccttcccctcctcttcctcctcctcctccgatccccatgcctcctccgcctccgcctccctcccccgccggccaccgctagctgccgccggcgccacccccgagcggttgcgcctagggttcttgattttgagcttcggagcgaggcgaggcggagatgtcgttccgcagcattgtccgcgacgtgcgcgacgggttcgggagcctgtccaggcgagggttcgaggtgaggctggtggggcaccggagggggaggtctcacagcgcggtgcacgagctgcgtgacggccacgcggccgccgccgccgccaacgtggtccagagcagctgctgggctaacctgccgccggagttgctccgggacgtgatcgagcggctggaggccagcgaggcggcgtggccgtccaggaagaacgtcgtcgcgtgcgccgccgtatgccggacatggagggacatgtgtagagagatcgtcaagaaccccgagttttgcgggaagatcacttttcctgtttccctcaagcagcctgggccccggaatggagccatccagtgcttcattaaaagggataaatctacccaaacttacaacctatatctatgtcttagctcagctgtgctcgttgaaagtggcaagttccttttatcggcgaaaagatactcccgtgcaacctgtacagaatatacaatatttatgagtgctgacaatacatctaggtcaagcaacatgtacattggaaaattgaggtcaaatcttctcggaacaaagtttgtaatatatgatacccaacctccatgcaacacagccaatgtttcacagtcagggaaaacaagccgtaggttctactccaggaaggtgtcgccaaagaacccttccagcacctacagcatagctcaagtttcatatgaactgaatgtcttggggactcggggtcctaggcggatgaactgtgtgatgcactcaatccctgcctcatcgcttgaggctggtggcactgtcccatgccagccagacagtgtgcttgcacgctctcttgatgagtcatttggcagcatctccttttccaagtcatccattatggaccgctctatccgtttcagcagtagcagatattctgacatctcagtaggtggccccatggtcggaggccaggcattgggtgacagtgatgagtccaaggagaggccattgattctccgtaacaaggccccaagatggcacgagcagttgcagtgctggtgcctcaacttcaagggcagggtaaccgtcgcgtctgtgaagaacttccagcttgttgctgcaacacagcctgctgctggagccccgacgccatcgcaacctgccccgccgcctccacctgatcatgacaaggtcatactacaatttggtaaggttgcgaaggatatgttcacaatggactatcgttaccccctttcggccttccaggcctttgcaatctgcttgagtagtttcgacaccaagctggcctgcgaatgaaatcatcggtgcgaaagcatggttatcgattattgtaacaaattgggccccctccaaatttagctgggggctctatcctgttgtttgctatttatgccctattaacttgtagtcattagaaaaccaatgttttttttctagacatgttccctgatttgtagatgctgttgtgttgtatctgtatccctacattctccttttcttttgttttttttaacaggttgctctgtagaagcatatttgctctgcctgtaactgtaataattagctgactgaattgttatgttcatgcttggcttgtgcctagagtttcaaatcttgagttgtatcaaaatttcgtaatggctgcctgttgtgggagatgtgcaatgtatttttgatgaactttgttgagttgcaataaagcaacaatcagttccatgtgcttcc

SEQ ID NO: 26857 - DNA, 2450 bp, Oryza sativa
  ref <308>: DATABASE ACCESSION NUMBER: AK102299
  ref <309>: DATABASE ENTRY DATE: 2002-08-28
gagagttttcaggcagcttgttgtttctctgcctcgagagaaaagaaaaaaaaagagaaatcttgggagtgccaaagcggaggagaaaggctcgtactttgaaggggagggaggagcgcaatgcagcgcggatctctcggcgtgctgcggctgcggctgtggctgtggctgctcgcggtctccgcatcaaccgctgttcttgcggcggatcctagcaaagagccattcaccatccgcataagctgtgggagttttgatgatatccggacagctcctaccaacacattgtggtacagagactttggttatactggtggcagatttgcaaatgctacacggccgagcttcataattcctccgctgaaaacgctccggcatttccctctgtctgatggtcctgaaaattgctactacatcaacaatgttcccaatgggcactatcaagttaggcttttctttgctcttgtggctgatcctaatcttgacagcgagccgattttcgatgtttccgtcgagggtactctatttagttctttgctgttgggttggagcagtgaggatgagaagacatttgcagaagctttggtttttgtccaggactcaagcctgtcaatttgcttccacagcactggtcatggtgatccatcgatactttctatcgaagttctccaaatagatgacaatgcctataaatttggtccttcatgggggaaaggtacaatacttagaactgccaaaaggttgacatgtggttctggcaaaccagcattcgacgaagatctaaatggtattcactggggtggggacagattctggttaggggtgaaaactttgtcttccagttctgacgaccagccgatatcaactgagaacgttatagcagaaacattacttgcaccaaatttttatcctcaaagcatctaccagtctgctattgtgggtactgacaggcaaccaagcctatcctttgaaatggatgttactccaaacaggaattattctgtgtggcttcactttgcagagattgagaatggaataactgcggaagaggaaagggtgtttgatgtacttatcaatggggatactgcattcaaggatattgatataattcgcatggcaggagaacgttttactgcccttgttctgaataaaactattgttgtcactgggacaacactaacaattgtcttgcagcctcttaaaggaacacgtgccactattagtgctattgaggtctttgagatcattctggccgaaaagaaaactttaactcaagaagtgagcgcattgcgtactgtgaagggttcgcttggtcttcctcttcgattgggctggaacggtgacccctgtgttcctcaacaacatccatggagtggagttgaatgccagtttgatgatatcaaaggccattgggtcattgatgggctaggtcttgacaaccaaggtttgagaggatttataccttctgacatatctaagctacaacatctacaaagcataaacttgagtggtaatagcataaagggcaacattcctgtcaccttgggtactatatcagggctgcaagtgctagatctgtcgtacaacgaacttaatggttctattccagatagccttggtcagctggcatcgttacagatactgaatctgaatggcaattatctttctggaagggtaccagccagccttggaggaagacctctacacagagctagatttaacttcacggacaatgctggactttgtggaattcccggtttacatgaatgcggcccgcatttatctgtggctgcaaagattggtatggcttttggggtactggtagctatcctatttctagttgtatttgcggcatgctggtggaagagaagacagaacattcgccgtgcgcagaaattagctgcagcaagggaagctccttatgcaaagtctcgaacacaatttacacgggacatgcaaatggcgaagcatcaccgcccacatgaaagctctcggagcggcaacgatgaaagcactccacatttgcttccttcctagttaattgttagctatggtgatttgttgtttgctcagttgattctgctatcaggttgagttgcaaaacaaattgtacatactaggtcatgtatggtgtatagacactcgtttttggctccaacgtttatggtacaggagcattatcagttgagagaaaggaatgatccagatcaggttgtcctattgcttctgaattctgatggaccaggtggtgtactgactgaattgcaacatcttatgcttgtgcaaattagcagccagattatctcctgtactacttttaagtttgccaaatgtaaattcaggggagcacctatttactgttatataaacctgaaatctcacctggtctgtcaatctgtaaatgttgtttttttttagtttcaattgacagtaatttatttcgagtggct

SEQ ID NO: 26858 - DNA, 2679 bp, Oryza sativa
  ref <308>: DATABASE ACCESSION NUMBER: AK102300
  ref <309>: DATABASE ENTRY DATE: 2002-08-28
agaccgcgacaccgctttctcctccgcggcgccagctgagctctccctccctccccccaccatgcggcagcgtcatggcctattgggcaccggatctgcccgaggacggaggtcgccggcgccacatcccacggcgacacgcgacagatggaggcgccgaggcagtgagctccggggagatgggagggtggccgagggccgcggcggaggcggaggcggaggcggagggtgggggtgagacgaaggagaggcggatctggcggctgggattcctgggccgacgacgcacatgatggggaccactagccgagcggcggtggacgaatctggcgacagcgccctcgacctgcatctcggctggtgtccgagcgagattgagctcgattcactcaaggctggctgaaccagacgtccctgtttgtcaacgatttggcgatccgcatcgtggtgctctgcagcttcgccgcccacctcgtcctcacgctgtttgccggaatccgtcggcgtaaagccaccggcgtgcgggcacttgtcctatggctggcgtaccagcttggcggctgggctgggacgtatgctctcggcagcatgtcgctcggccgcacaacgcagcagcagcaacagcagctggcattctgggcaccgttcctgctcctgcatcttgctggccccgacaacatcaccgcctactcccttgaggacacggttctcgccgggagacaggtgctcaccgtcacagtacagatcttgggagcatcatatgtcctgtacaagcagatatacaaccgtgacggcggcggtagcgccttgctgtgggtctctgtcgtcatgttcgccatcggcattgccaagtacgtggagagggccgtggcgattaggcaggccaacctgggaaagatgagaagctcaaacaagaagagcaagttaggaaaacgaagcttcggagatgttaaagaggtgggtaacgagagaaccttgctggttgctcatggcctgctccatatcacaagggtgccttcatcgatcattcagacgacgagaatcccctgaaaagtgatgcggcacgatcacaaatatttggtcatggatgggaggagatgtgcagggtggtggagatggagctgtccctcatgtacgacatcctctacaccaaggtagctgtggtgcacacatggttcggctacatcatccgtttggcgtcgccggtcgtcagtgccaccgcgttcctgctgttctggttccaaggtaaagatgagcagaggagggcagatgtgctcatcacctacatcttgatggtcggcaccatcatcctggatgtcagatggcttctcagggcgatggtgtctacatggacctattcgttcctgaacaataggccagattgctggtttcatgccgcatgcttgagctccgggaggtggcgcctgctccgtcgtcttgtcctctgtctggatccatgccggctgctcggcaaggaaccaactaggtacaggatgtggtcaggaaccgttgggcagtacaacttattgcatgagtgcactcatggcacgatcggcatgtttggctcgctgctgaagaaggttgtatcagatgacagttggatggagtaccaataccatgacgcaaggggtcttgcaatttcatcggaggtaagggaattgttgttccaacagatatgggagcaactcaagacagcatatccagctgcgactgttgagaagactaatttactctcttgcagcagtctgggatatgccgggagtgcatggaagaaccgggagcttgatgaagctatgaactttgctcatgcattccaagagacaatccttatctggcacatcgccacggacatcttcctcttggtcagtcgtcaatttgcatcaccgtccaactccaagcaagtacaggtgatcatggcgctgtcgaattacatggcgttcctcgtagcggtccgcccaagcatgctaccaggccttaagctacgcagcctgtacaaagaaactcacaaggctcttgtggaaatattgctcaaagaaggatattctggtagcttgatagagagaaaggagaagctggccgacaggctaatagaaatggagaaggagaagcaggtccaaatctcaaacgctccaaagaaggtaagcaactggaggccaggttatagtaatcacaagtcaaggccagcaaaggcaagtgttctttatgacgagaatataattctgtctgatggagctaaattcgccgaggtgctgctaagtagagcttgggtagacagcccacatataaccgcacatatcgaaattagccctgagagatatgaaaggattaaagagatgattcctaaattggaagaacaggttgcgtttgatatctcggtaatgctggactatatcttcaaggcatgggttcgtattctgatgtatgcgtccgtccgatgcacaagggattctcatgccaagcagctcgcctgtggaggcgagctcacaacaattgtctggatactcaacgaacacgctggcatatttcgcatccccggtgatgccagagatgaaactggcgagcttggaacctaatgcctagtaacacagcctatcgttaacccgtgtgttacacggcctattgtttgttatttgtattatgaagactataaattaaaaatgtttaaatagatcggttacc

SEQ ID NO: 26859 - DNA, 2914 bp, Oryza sativa
  ref <308>: DATABASE ACCESSION NUMBER: AK102301
  ref <309>: DATABASE ENTRY DATE: 2002-08-28
gagtagctgttgttggttgttccctccctccttcccatccattctcgccgagccacccattccgccacctccacccctcccccgcattaaccctcctcctccgctcgccgcgccgcgccaccgatcgatcgctgcgctccgtgcgtctcaccaccttgctaggaggacgaacgccggcggcggggaggggatggaggggaagcacgtggtgatgtcggcggtggggatcgggataggcgtcggggtggggctggggctggcgtccgcgccgtgggcaggcggcggcgggcagggggcgagggtcggggttacggtggagagggtggagcaggagctccgccgcctcgtcgtcgacggcgccgacagcagggtcaccttcgacgggttcccctactacctcagcgagcaaacgcgtgtattgctgacaagcgcggcgtatgttcacttgaagcaagcagacatctcacaatacaccaggaatcttgcaccagctagccgtgcgattctattgtcaggccctgcagaactttaccagcaaatgcttgccaaagcgcttgcccactattttgaagcaaaattgctgttgctagatcctacagattttctcataaagatccatagcaaatatggtggtggtagcagcacagactcgtctttcaaaagatccatatctgagacgacccttgaaaaggtgtctggattacttggatctctttcgattctaccacaaaaggagaaacccaaaggaactattcgtagacaaagcagcatgacggacatgaaattaaggagctctgaaagtacgagcagcttcccgaagcttaaaaggaatgcctcaacttcatctgatatgagtagtctggcatcacaaggccctccaaataatccagcttctctcagacgtgctagcagctggacttttgatgagaagattttggtgcaagcagtatacaaggtactgcattcagtatctaagaagaacccaattgttctctacataagagatgttgagaagtttcttcacaagtccaaaaaaatgtatgtcatgtttgaaaaactactgaataaacttgaagggccagtgctagtccttggctcaagaattgtggatatggactttgatgaagagttggatgaaagactaactgctttatttccatacaacatcgaaatcaagccaccagaaaatgagaaccaccttgtgagctggaactcccaattagaagaagatatgaagatgattcagttccaggataaccggaaccatattacggaagtccttgccgaaaacgaccttgagtgtgatgatttaggctcgatatgcctatctgatactatggttctaggtaggtacattgaggagattgtggtttcagcagtttcttatcacctgatgaataagaaagatccggagtaccgaaacggaaaattacttctatctgcaaagagcttgtcccatgcactggaaatttttcaagagaacaagatgtatgataaggatagcatgaagttggaagcaaagcgtgatgcttcaaaggtggctgacaggggaattgctccatttgctgcaaaatcagaaacaaaacctgcaactttgctaccaccagtacctcctacagctgctgctgcccctcctgttgagagcaaagcagaaccagagaaattcgagaagaaggataatccatctccagctgcaaaagcacctgaaatgccgccagacaatgagtttgaaaagcgcatcagacctgaagtgatacctgctaatgaaatcggtgtcacatttgatgatatcggtgcattaagtgatatcaaagaatcccttcaagaacttgtcatgctccctctcagaagaccagatctcttcaaagggggtcttcttaaaccttgcagaggtatattactttttggtcctcctggaactggcaagacgatgctagccaaggctattgcaaatgaagctcaagcgagtttcataaatgtttcaatgtcgactatcacatcgaaatggtttggtgaagatgaaaagaatgttagagcattgttcacattagctgccaaagtatcaccgacgatcatttttgtcgatgaggtcgacagcatgcttggtcagcggaacagagctggagagcacgaggcaatgaggaagataaaaaatgagttcatgacacactgggatggcctcttgtcaagacccagatcaaaaaattcttgtccttgctgcgaccaaccgaccctttgatcttgatgaagctatcattcgaaggtttgagcgcaggatcatggtcggcctgccatcattggaaagtcgggaattgattttgaggagccttctgtcgaaggagaaagttgatggcggtctagactataaggaactagccaccatgactgaaggatatagtggcagtgatctaaagaacctgtgcacaacagcagcgtatcgtccagtgagggaactgatccaaaaggaaagaaagaaggaactggagaagaagcgggaacaaggaggcaatgcttcagatgcttcgaagatgaaagagaaggacgagacgatcatactaaggccactaaacatgaaagatttgaaagaagcaaaaaaccaggtggcggcaagctttgctgctgaaggaacaataatgggtgagctgaagcaatggaatgagttgtacggtgaaggaggctccagaaagaaacaacagttgacatactttctctgaactatctaaatatccagagtgtatgaacataatttgaaaactagaatagacggaaaacaaccatgtgaaaatagtccagtgttttaagttccaccagttaagaatgtttgggaccaaaggagcctggttatgaaaccggtttttttttgttgtaaaacttgatagagaacttccatacacagggactatgttttgcctgc

SEQ ID NO: 26860 - DNA, 1625 bp, Oryza sativa
  ref <308>: DATABASE ACCESSION NUMBER: AK102302
  ref <309>: DATABASE ENTRY DATE: 2002-08-28
gaccaaagcgagtccctccccctcccgtctcgagcgccggtaaactccacgcctccaatcggccaatcgccaattcgcaatccattccccccgaaaccctaaccggcgcctctcctccacgcgccgcgccgcctcccgctcctccctcccagcagcgccgccgtcgtcgtccctctcaccggcgggtggcggcgatggcctcctcggcgtcgtcatccaggcaccaggtcaccatcaccctcggccgcagcggtcaggttgtcaaaaggcgagctgtatctgacattgataatgatgatggtgtgcacttaggaagaaaacgatctgtgagggacagactaggaaataatatggttggttctgagtcgtatgatggccagcagcgtaacaaaagacgacagatagaaaccaatggtttgcagcatggagataatgattgccaggtcggtagggatgatttgagattgaagcttatgaagaaaggcttgtctagcaatggtggtgcagaacagaatggagtggatctccgtgaaaagctttccaggaaacctaagaatatacggaggtatgatgcaagaggacatgttccagaatcaaggtctagatatgacggaagagataaaattccagaattaaggtcaagatatggcatgagagagaggctccctgagccaaggacatctgctcttcctagtcgaattccttctgcaagaagcatggatgatctgttgaagttggactcttcaagagaagcttattcctcgtggtctggtaatttgaggcacaggtcccctgaaaaacttaaaagtgctcgcagagatatgtctccctcaagaacatatgatcatattcgttccatgccacccattagatctgctggtacctcaaggacttcaggtctcatcactagagacgctcctgatgcattaagaactcaaccttatgctggcaagtctaccatttctattgatacaactcagccagcaaatggagttgcttcatctgctacagtgatgcctacagctcctgtgatgccagaagtaccgctaacagttactgggttgctgaattcactaggacttgagaagtatgtcttcctcttccatgctgaagaggtggatatggctgcattgagtcagatgggagacagtgacctgaaggaaataggggtaccaatgggtcctagaaagaagattctccaggcagtggcaccttattcaaaacggcgtagatgaacagcatgctcaggaacttggggcgttcgtgggcaatgacaatttattggtgtaagctgcttcattgcagatcttgtatatcccaatggtctagtgctctagtcaatccgtttcattgctgatagatcaacgcatcgcttttcttggcatgcataatcttatctgtcagctgatgatcccaatcctgttattcacgacctgccccttgtgtagcaggatctgaaacatggatatgtagctttgctacactaaccagtcagttttttcttcctctttgggaattgggaacatcgatgacctgtaatcgaaatcccatgctttatgaccttgggagcgttggcaattgagtttactggaacatactagtgttaagattgtgtacagaatgcg

SEQ ID NO: 26861 - DNA, 1821 bp, Oryza sativa
  ref <308>: DATABASE ACCESSION NUMBER: AK102303
  ref <309>: DATABASE ENTRY DATE: 2002-08-28
gacttgatcccgatcgccatttctccacctgcacatctgcgcgcgcgcgcgggagagcagaggcggcgagagagatccgggtcgggaggggtgatggacttctccggcgacgtcaagccggcgatccaccggccctctgtcgcggcggcacgcgggggagggaacggtggggcgatcccgctcctgcgtgggtggcaggcgttccggaggagcggcgcgccggcgaggctcctctgcttcgagggcggcgcgtgggcggacgtcgcgggcgaggtggtggggctgctgcggcgggcgttcatggaggggaaggccgtttgcgaggccgcctgcggtgggagggtgttcctgttcgacttcatgcggatggttcggatcgatgaggccaccgccgaggaggccgcgctggggtggatcgacgaccgcggcgcgtgcttcttcccggctcccgagggcgggaggaagaggaagagggagagggacgcggggtcggaggtgaagggggaggatcggcggcggcggcagccggcggcggaggaggaggacggggacgaggcgtcgtccggcgtggaggagcggtccggggagagccgccccgaggcggatgagcccgacaggaagaaggcgcgcgggacgttgtgggggaaggcggtgaggctggacgaggcggacaagttctacaaggtggtggagaagctcttcgtcagccggatggctcccgtggcggcggcccgcggcgtggcgatcacggcggtgcacaaggtcgcgcaggggccccgggcaagagccttccatctgcagggacagctccttgccgctgctcgcggcgtcggcgatggcagcaacgccaagttcgcgtggtacggcgcgccggcggcggatgtggccgcggcggtggagcacggcttcgggaggacgaacgggcagtttctcggcgggcgcgcacacggcgacggcgttcacctttcgccgccgcagtaccctcacgctagtgcgatgctgaccaagccagacgagaatggcgaggcacacatcgtgctgtgccgcgtcctgatgggccgtccagaggccgtccctgccagctcaccccaattccaccccagcagcgacgaatacgacagcgccgtcgacaaccttgagaatccgcggtggtacgttgtatggagcacagacatgaacaccaggatcctcccagagtacgtggtcagcttcaggtggcccaacctgccgcagatggaaggatcatcggggttgggatcgaagctgaagaagccatcaccagcagctactcgcgacatgttccctatgcttctgacggagatccagcggttcgttccatccccgaagctgcagactttgcagaggacgtacaactgcttcaagagaggacagatgaagaaggaccagttcatccggttcttgcgctcccacatcggcgacaatgtgttgaccaccgtggccaagaaactccgagggtactagtgcaaggtgcaaatttgtctccactccgtggctgaattcgactaactccgtagaatcgaacagtgcgtgtcgtgtaccaatcctgacagggtttattctcttctgatgctgctttagtttttccggtgctcaaatgtttattgtcatgaacatagagggggtttactgtgatcttccaattaaccaacacaaaagggtatatgtgatatgatgcaaattatgcaattcttgagttcggtcatagttttacttattttcagcaacttgtaatttgtacagactcgattctgttgagcttttgattcaggaaacaatcaattcagtttcgggagtttacgg

SEQ ID NO: 26862 - DNA, 1610 bp, Oryza sativa
  ref <308>: DATABASE ACCESSION NUMBER: AK102304
  ref <309>: DATABASE ENTRY DATE: 2002-08-28
ggaggcccccgtcccctcctcgtcgactcccgtctcgtctcctcgcgagttcacctgccgtctgcgccgatctccgattctctatccggcgagcagggggacgccgccgtcctgctgtttccgccgcatcctggtttgggaggttcaactgagcccccatgtcgcaggagaggagccagtcgcagagcccccggtcgccggcgtcggcggctggggtgccgttcctgtcgatctccgtcacagatcctgtgaagatgggtaccggagtccaggcctacatctcctatcgcgtcatcaccaagaccaacctgcctgactttgaggggcaagagaaaattgttatccggcgctatagtgactttgagtggttgcatgatcgtcttgctgagaagtacaaaggcatttttatacctccccttccagagaagaatgctgttgaaaaattccggtttagcaaagagttcattgaattacggcgtcaagccctggatctatttgtcaatagaatagcttcacatcctgaactcaagcaaagtggagatttgaagatatttttgcaggcagatgaagagaaaatggatagagaaaggtcttatgaaactggtatattcaagaagccttctgatttcttacagatgtttaaggatgtacaatcaaaagtcagtgatgttgttctgggaaaagaaaagcctgtggaggaatctagtcctgaatatgaaaagcttaaaaattacatatttgagctagaaaaccatttagcagaggcacagaaacaagcattccgtcttgtgaaaagacaccgagaacttgggcaatctttggcggactttggtaaggctattaagcttttaggtgcttgcgaaggggactccttggaaaaagttttttcagaagttggatcaaagtcagagatgttatcagtaaagctgcaaagagaggcagacaaccttctctttaactttgaagagcctttgaaagattatgtacgtgctgtgcagtcaataaaagcaactatggtggatcgagccaatgctttcaggcagcatcatgatttatttcagcagaaggaatataaaggggttaatctcgaaaaattgaagttcgtgaaccctgataaattttctgaactagaagctgaggtccgagagttgacagcagacagtgaggaggctacaaagaggtttgagcacatagttgcagtaatgaatgaagagcttgcacgtttccaagagcagaaaacagctgatattggattcgcattccatgaatttgccaaaggccaagcaaagttagctaaagatattgctgatgcatggcgaggcgtcctcccaaagctcgaagcctgttccacttcataaatgctccgtgttagcttatgttgtttggtttagtggttgacaatcggcgagttttaggctgttttttccccaggccaccttgacaccgcgtcctgtatacttcaactgactctgaaaaagggctagtttttagatacaattgacatcatttcctgcctgctctgtgtgtatccttctttttacgaccaatcaatattgctactggaatatctcaagaatgatgcagtaaagggaaaataaactttaatttgg

SEQ ID NO: 26863 - DNA, 1066 bp, Oryza sativa
  ref <308>: DATABASE ACCESSION NUMBER: AK102305
  ref <309>: DATABASE ENTRY DATE: 2002-08-28
gagcttgcctcctcgtctcgccggcgcaggcggcgcctgcatctatccatccatccacccacccacgccaccctcccgttccgattcggcgcacgcggctgctagacaccgcgttcctgacccgccgcgaatgtcggggacgcctcttcccccaccggcgctcccgcccccgccgggcacggacatgaccgggatctgcttccgcgaccagctctggctcaacacctacccgctcgaccgcaacctcgtcttcgactacttcgcgctctcccccttctacgacctcacctgcaacaacgagtccctccgctcgcgccaaatccaccccctcgacatgtcccacctcacgaagatgacggggatggagtacgtgctcagcgacgtgatggagccgcacctgttcgtgatccggaagcagaggcgggagagccccgtgaagtccaacgccatgctcgcctactacatcctcgatggctccatctaccaggcgccccagctctgcagcgtcttcgcgtcccgcatcagtagggctatgcatcacatctgaaaagcttttactacggcatgttcaaagttggagaaaattgggcatgtggaaacagagcctgacacagcagcttctgaatcaaagacgcagaaggaagcaattgatttgaaggagttgaagcgggtcgaccatatcctaatgtcgttgcaaaggaagctgcaacctgctcctccccctccaccttttccagagggctatgtaccatcagaacaagagaaagcatcagatgatctgttggcctcagaggcactgcctccccaggttgatcctatcattgatcaaggccctgcaaaaaggcctagattccaatgagagaggttgcattgataagttaaatttgactaacaccacaattacctgtgttgtaagttgatgattagattctttcagttccacagctcggaagttaaatataagttgtggtttcagtcgtaatggttattttgaaggataaattcaagggagcataaatctgattaggtggtactggctgtttgtcaggcctgtttctactgtgct

SEQ ID NO: 26864 - DNA, 2070 bp, Oryza sativa
  ref <308>: DATABASE ACCESSION NUMBER: AK102306
  ref <309>: DATABASE ENTRY DATE: 2002-08-28
gactctgcacacgtccccatctcccccgtctctcctgcgttctcttcgcctaccttacgataaacttggccacgtctcaatctctctctctcgcgctctcctctccttctataatactcggcctccccctcgcttctcgctctgtttctccgagaattaggggggaggttggagctgtgcaagatggtgattgcgcgcggccttctccgatcgaatgcctcttcttcctcctctcaggcaatcaacttattgaagtatgtaactagcactggaagtctgcaagggcacacgcaaaatttgtgtgatgcatcaaccagacatttcagttcagtaccatcgccccagtacaactcaactgaagagaatgggttcaaggggcatggcatgttggcaccattcacagctggttggcagagcaccgatgttcatccgttagtcattgaaagatctgagggttcgtatgtatatgatatcgacggaaagaagtatctagattctcttgcgggactatggtgtacagctttaggtggtagtgaacctcgattagtcaaagctgcaactgagcaattacacaagttgcccttctatcactccttttggaaccgtacgaccaaaccatctctggatcttgcaaaggaactgcttagcatgttcactgcaagggaaatgggaaaagtgttcttcacaaatagtggttcagaagcaaatgattctcaggtaaaactggtctggtattataacaatgcactgggaaggccagacaagaagaaatttattgcacgatcaaaatcataccatggatcaacactaatatcagctagtctatccggtcttcctgcactgcatcagaagtttgatctgcctgcaccttttgttctgcacacggactgccctcactactggcgcttccatcttcctggtgaaacagaagaagaatttgcaactagacttgccaataatttagaggaacttatcctcaaagaaggaccagaaacaattgctgcattcattgcagagcctgtgatgggtgctggtggtgtcatacctcctccaaagacctattttgaaaaggtccaagcgatcgttaagaagtatgacatccttttcatagcagatgaggtcattactgcatttggaaggttgggaaccatgtttggaagtgatatgtataacatcaagccagatctagtctccatggccaaggcgctttcatctgcctatgtgcccattggagcaattatggttagcccagaaatatcagatgttattcattctcagagcaataagctcggttcatttgctcatggatttacatactctggccatccagttgcatgtgctgtcgccatagaagccctgaaaatttatcaggaaaggaacattcctgatcatgtgaagcaaatttctccaaggttccaggagggagtcaaggcctttgcaggaagtccgattgttggagagatacgtggtgtagggttgatacttggaactgaattcgcagacaacaaatcgccaaatgatccattccctgctgaatggggcgtcggcgcgatctttggagcggagtgccagaagcgcggcatgctggttagagttgctggagacaacatcatgatgtcaccaccattgataatgacccctgatgaagtcgaggagctggtgagcatctatggagatgcactcaaggccaccgaggagagggtggctgagctgaaatccaagaagaacaattagaccgagttgacaactcctcatcttgcaactgcacgagacgacgatgacgatgataatgctggcagcgatgatgatgatggtgatggtgttcttggtggatgtacagagtaataatccctcgtctgtcagaaaactctactcagagaacagtaataacgctgttcttagcgtgcaaaaaataatcaaaacagcgatcatgcattcacccagaaccggtgaatcttcaccagatttcagtcttacgcacgggattagctgccgtggtgaactggtggtgactgtcatcttgtagaccaaatcaggttggaataaatcaaatttacatgaagtcgcatg

SEQ ID NO: 26865 - DNA, 1487 bp, Oryza sativa
  ref <308>: DATABASE ACCESSION NUMBER: AK102307
  ref <309>: DATABASE ENTRY DATE: 2002-08-28
gttcttgataatgtgctggcttgagcaatcaagccacaatcctagaccaacatactatgcacgtagtaggagtatacattatattccacttttccacaagatagggtccagtccagtatatatatagggcatggagagatggaccatttgcaggaggcagaggtcgagctgagagtgatcgatctttgttagctagagtgttgagcaatggcgtccaagctgggtatggttgtgctactgatctcgggcctctttgctgcccgttgcgcggccgtggtgaccaccggcgaacccgtcgtcgccggcctctcctgggggttctatgacacgtcgtgcccgtcggtggagggcatcgtgaggtggcacgtcaccgaggccctccgccgcgacatcggcatcgccgccggcctcgtccgcatcttcttccacgactgcttcccgcaggggtgcgacgcgtcggtcctcctgacgggttcccaaagcgagctgggtgagatacccaaccagacgctgcggccgtcggcgctgaagctcatcgaggacatccgcgccgccgtacactccgcctgcggcgccaaggtgtcctgcgccgacatcaccacgctcgccacgcgtgacgccatcgtcgcctccggcgggccctacttcgacgtgcctctggggcggcgcgacgggctggcaccggcgtcgagcgacaaggtgggcctcctgccggcgcccttcttcgacgtgcccacgctcatccaggcgttcaaggaccgaaacctggacaagacggacctggtggcgctgtccggcgcgcacaccatcggactaggccactgcggcagcttcaacgaccgcttcgatggctccaagcccatcatggaccctgtgctggtgaagaagctgcaggccaagtgcgccaaggacgtgccggtgaactcggtcacgcaggagctggacgtccgcacgcccaacgccttcgacaacaagtactacttcgacctcatcgccaagcaggggatcttcaagtccgaccagggcctcatcgaggacgcgcagaccaaccgcaccgccgtccgcttcgccctcaaccaggccgccttcttcgaccagttcgcacgctccatggtcaagatgagccagatggacgtcctcaccggcaacgccggcgagatccgcaacaactgcgccgctcccaaccgccgctcctccgacctcctcaacgctgccgacgacgaccaaggcttcgccgccgacgcctaattaacttatggagtaattagtgatcgttttatgtttatgttttgtgctagtaataataattaagaggatgccatctgcgcgtggtgtttggtttccatgcattctctgcttagttagaatggttttgcttcataaaaagtaaagttactactcgattcctcggtcgggacagagtaactgcatgtcaaatgtatcatcatcatcagttagtgctacatcatcacaactgtctttgtcac

SEQ ID NO: 26866 - DNA, 2524 bp, Oryza sativa
  ref <308>: DATABASE ACCESSION NUMBER: AK102308
  ref <309>: DATABASE ENTRY DATE: 2002-08-28
gatagatacgacctggctgccctcacaaaaatacttcaccaaaccaccctcctcctcctccccctttaccatttccaagttccaacccccaaaaaaaatccaaccaaaaagcggagattttccaactcttatcatctcctcctcctcctcctcgtcatcgtcatcaccagcacacacccgagagaaaaaaatcctataaagaaatggattgagccatcacccaacgccgccaagatcctgtcctcttgtgtgcgcaacctgtagctccacctccacgcaggatcaacacccaaatccccccatcttcttttctttttcgtttcgtttctgcaagatttgcatcttcttcttcttcctccgaggagtgagtgacacctgagatagcgagagcgagattttcttcggtttttttgttcctctttttggccataaacctcccataaagctcggtttcttggttcgttttttctttctttcttcctctccttcgagaatcgcccgagtgtgaaatccaagatcccggattccgtgtcttcttcttcttccgtagaaatcccggggtgggcaaagcggtgggatttctggagagggggagagcgctacaaggcaagaagcttgggtgtccgtagtccgtacggttcttgatctggggtcgccgccaatgcagccggacccgagcgggagcggcggcgacgacaacgccaatgcgaaggcgaagctggcgccgccgccggtgacggcggcgggaggtcggccggtgtcggtgctgccgcacaagacggcgaacgtgcgcgaccactaccgcatcgggaagaagctcgggcaggggcagttcgggacgacgtacctgtgcgtggacaaggcgagcggcggcgagttcgcgtgcaagtccatccccaagcggaagctgctgtgccgggaggactacgaggacgtgtggcgcgagatccagatcatgcaccacctctccgagcaccccaacgtcgtccgcatccgcggcgcctacgaggacgcgctgttcgtccacatcgtcatggagctctgcgccggcggcgagctcttcgaccgcatcgtcgccaagggccactacaccgagcgcgccgccgcgcagctcatccgcaccatcgtcgccgtcgtcgagggatgccactcgctcggcgtcatgcaccgggacctcaagcccgagaacttcctcttcgccagcgccgccgaggacgcccccctcaaggccactgatttcggcctctccatgttctacaagcctggtgataagttctctgatgttgttgggagcccctattatgttgcacctgaggtacttcagaaatgctatggtccagaatctgatgtctggagtgctggggtaattctttacattttgctatgtggtgttccaccattttgggcagaaactgaagctggaattttcaggcagattctacgaggcaaacttgattttgaatctgaaccctggcctagcatctctgacagtgctaaagatctagtccgtaatatgctttgccgggatcctacaaagagacttacagcccatgaggttctctgtcatccatggattgttgatgatgctgtggcacctgacaagcctattgattctgctgttttgtcaagactggagcacttttcggcaatgaacaagctcaagaagatggcattgagggttattgctgaaagcctgtctgaggaagagattggaggactaaaggagctattcaaaatgattgatactgacgatagtggaactataacttttgatgagctgaaagagggcttgaaaagggtgggttcagaattaacagaacatgaaatccaggctttaatggaagcggctgatatcgacaacagtggaaccatcgactatggtgaattcattgctgctactctccacatgaataagctagagagggaggaaaacttagtatcagcattctcatttttcgacaaagatggaagtggtttcataactattgatgagctgtcacaagcatgccgcgaatttggccttgatgatcttcaccttgaggatatgattaaagatgttgatcaaaacaatgacggacaaattgactacagcgagttcacggcgatgatgagaaagggcaatgctggtggagctggaaggagaaccatgaggaacagcttgcagttgaatcttggtgagatcttgaaccccagcaacagctaaactcctacaggaaggccatggctgttacatgccatcattgtctgaatctctgcacgcctcatcagctggactaatctctaagagggcaaagccgttgagtgaattgtgctttggcgttacatgagacgctgaagaattttcgtagcagtaatagctacagctactagagtgtaagagaaattggcgttatgtgatcgtaatatcctatcagtgtaactgatcttagatgatgctggagatgatagtacaatgaacagcttatatgtattcctgtccttgtagactgaacattgttgatagttggggaatgctcttggcatc

SEQ ID NO: 26867 - DNA, 3486 bp, Oryza sativa
  ref <308>: DATABASE ACCESSION NUMBER: AK102309
  ref <309>: DATABASE ENTRY DATE: 2002-08-28
gaatgaacatgcatgccactcaatgcatgcagtgcagtagaggaggagtactgacactgctcagcgtccctctccctgcacatttactcgtatgcacagcacaacacacactcctctcctctcctatctccaggctcacagatgagctgtgagctgtgtgtgtgacacagtctactgctctctctgtacaaagggagagggtgagaggaaattaacagaggaaggagggagaagaaatgcgagaaatgctggcgtctctctcttcttcgtcccgtgcggccatctcctgcatcccgttgtgtctcctcttcctgaccttggcgagcagcaatggcgtgtttgccgcagcaccacccaaggttgggtccgggtacaagcttgtgtccctggtcgagcaccccgagggaggagctctcgttggatacctgcaggtgaagcagcgcacctccacctacggcccggacatccctctcctcaggctctatgtcaagcacgagaccaaggacaggatacgagtccagatcacggacgcagacaagccgaggtgggaggtcccctacaaccttctccagagggagccagccccgcccgtcaccggcgggaggatcaccggcgtgcccttcgccgccggcgagtacccgggtgaggagctcgtgttcacctacggccgcgacccgttctggttcgcggtgcaccggaagtccagccgcgaggcgctcttcaacaccagctgcggcgcgctggtgttcaaggaccagtacatcgaggcgtcgacgtcgctgcccagggacgcggcgctgtacggcctcggcgagaacacgcagccgggcggcatccggctgcgccccaacgacccgtacaccatctacaccacggacatctcggcgatcaacctcaacaccgacctctacggctcgcacccggtgtacgtggacctcaggagccgtggcggccatggcgtcgcgcacgccgtgctgctgctgaacagcaacggcatggacgtgttctacagggggacgtcgctgacgtacaaggtcatcggtggcctcctcgatttctacctcttctccgggccgacgccgttggccgtggtggatcagtacacgtccatgatcggacgaccagccccaatgccgtactgggcatttgggttccaccaatgcagatggggatacaagaacttgtcagtggtcgagggcgtcgtggagggctaccggaacgcgcaaatccccctcgacgtgatctggaacgacgacgatcacatggacgccgcgaaggatttcacccttgatcccgtgaactacccgcgtcccaagctgctggaattccttgacaagatccatgcacagggcatgaagtacattgtcctcatcgaccccggcatcgccgtgaacaacacctatggcgtgtaccagcgcggcatgcagggcgacgtcttcatcaagctggacgggaagccatacctggcgcaggtgtggcccggccccgtctacttcccggacttcctcaaccccaatggcgtctcgtggtggatcgacgaggtgaggaggtttcatgaccttgtgcccgtggatggcctctggatcgacatgaacgaggcatccaacttctgcaccgggaaatgcgagatcccgacgacgcacctgtgccctctgcccaacacgacgacgccatgggtgtgctgcttggactgcaagaacctgacgaacaccaggtgggacgagccgccgtacaagatcaacgcctccggccagacggcgcggctcggcttcaacaccatcgccaccagcgcgacgcactacaatggcatcctggagtacaatgcgcacagcctgtatggattctcgcaggccatcgcgacgcaccaggcgctgcaggggctccagggcaagcggccgttcatcctgacgcgctctacgttcgtcgggtcgggcgcctacgccgcgcactggaccggcgacaacaagggcacctgggagaatctccgctactccatctccaccatgctcaacttcggcatcttcggcatgccgatggtcggcgccgacatctgcgggttctacccgcagccgacggaggagctctgcaaccggtggatcgagctcggcgcgttctacccgttctccagggaccatgccaacttcgcgtcgccgaggcaggagctgtatgtgtgggagtccgtggccaagtcggctcggaacgcgctcggcatgcggtacaggctgctcccttacctgtacacgctcaactaccaggcgcatctcaccggcgctccggtggcgcggccggtgttcttctcgttcccggacttcacgccgtgctacgggctgagcacgcagtacctgctcggcgcgagcgtcatggtgtcgccggtgctcgagcagggcgccacctcggtgagcgccatgttcccgccggggagctggtacaacctgttcgacacgaccaaggtggtggtgtccaggggcgagggcgccgtgaagctggacgcgccgctcaacgagatcaacgtgcacgtgttccagaacacgatcctcccgatgcagcgcggcgggacgatctccaaggaggcccgcgcgacgccgttcacgctggtggtcgcgttcccgttcggcgccaccgaggcggaggccgagggcgccgtgtacgtcgacgacgacgagcggccggagatggtgctcgcggaggggcaggcgacgtacgtccgcttctacgcgacggtgcgcggcaaggcggtgacggtgaggtcggaggtggagctaggcagctacagcttgcagaaggggctcctcatcgagaagctgtccgtgctcggactggagggaacaggcagggacctcgccgtccatgtcgatggcgcgaacgccaccgccattgcaacgtcgaggccgtactttgcaggtgccgaggcggagctgcacgggcaccgcgacgtggagggacacaagaagagcgtgatggtggaggtgggagggctggcattgccgctgggcaagagcttcaccatgacttggaacatgcagatcgaagcatagatcgaagctttcttatgctttcatctgcatttctccattctgtctctctgattattttaggttctagatcagcaaggttatgtcaacgtgttcaacgacacaccaccatctctgattctcttctgcatttgaatccttgtggaaataaaacatgattctaaacatatatccttctttctgactcttacatgtgcgcacaagggagacagtcgaaagaacatcggctagattgcggatttgcggtacgaatgccctcacgaatacttgagagagtggtactaacttgagagagagtagataatactagaaaatctgtcacataatgtataggcagtccctagtagaaatatattacatctcccgtctctttactctttccaaaggaggaagtcgaaagtaacaaagtttgaatttaattcggattatgcttggacagcttagactgtccatc

SEQ ID NO: 26868 - DNA, 1630 bp, Oryza sativa
  ref <308>: DATABASE ACCESSION NUMBER: AK102310
  ref <309>: DATABASE ENTRY DATE: 2002-08-28
gagtgcggcgcggcctactatggcttcgcgggggccgcctcggtttctgcccgttgcctcgccaactccgccgtcgtcaaggatatggccgtgtttgttggcgcgtccaaggaatccccgttcgcgggccggccattgccgaggtttccggtacagcgtgtgccgctgcactcgacgacgagctttgcggtcttgggtagggagagcgggatgagccatgtcccggaatggctcccggcctttccggaacctcacacgtatgtgaggagcgagttgtggagtgaggaggtggctaaggctggggcggatgaggtggagcgggcgcggcagcggaggaaagctgagaagtcgctgctcagcctgcaacggcgtcttgctcttgcaggtgccgacgggttccgaccaggaatgctggtcgatgatgcagtcaaagcgaacggactagatgtggttgagagcaaggcgaatccgtttcatgagcgagctttgccttatggggagaaggcggtgtccgaggttaccatgcctggtgtggggaagacattctctgttgttgaggccttcgcacccgcatttgaagaatcaaaaggtggagaatttgatgagggtatggatcagggccaaaatgatagtcagactcagaagagggttgttccaaaagagaggccaccggtgtattttagaattgggattgataagaagtcaatggtgatggcactgaattcgagagctctggttgaactgaaggatccctggttcttcaaggaggataaggagcagagggcagagttgatactaagggaagcaatggataatccacatgaacttactcagctttaacgttcctgtatgtttgcagtacccacagagctgcatggtgaattttggactggctaaactagggacttttcaaattcatgttggagcagcatttgccaagatcttgagatatgctattgctatactgatgaatccatgatgcaaccttctctcagttggagtgacctgctctgagtggcgtgttgatggattgatttgtgatgaacaccagtccaaactgtggcaccatcttgcttgtcaaaccttcttatacaagttaaaattcccattcttgttctccggtgctttacttgatcacagaaatggcatatcaaaaggaactggtgctggtcagctccatctgtaactctatttctcctagcaagcagcgatgttcatacttcaaccaggctgactctactaactaaaagctcacaaatataccggaagaaccttgcagtaacaagcctttgctgtactctggtcattggttaactattgtgtctcattagtttgctttgtggatatatgtcagcggtttgacagatctcctgatgctctgtggtggttggcagtctccagctacatggccactttattggccatcagttatatattaattgttgttaaattgctgcgttagttgcttggttgcaacaacattgtagtagatttgtaccatatgattgatgattcatttggtactgggtgaccctgtagattatcccggcccttctgaattgcaaatcataccttttctgtaaactgtaaaaagcaaacagtgacagttgtgaagaacagttatcctcgc

SEQ ID NO: 26869 - DNA, 4082 bp, Oryza sativa
  ref <308>: DATABASE ACCESSION NUMBER: AK102311
  ref <309>: DATABASE ENTRY DATE: 2002-08-28
gacttgcgccgccgccaagacgagtcgcggttgagcatgtgaggggcggcgatctccatccggcgagcagagcaggggagaggagaggatcctggtgaggggcggcgatctccatccggcgatcttctcgggcgctcgcgctcccggtccccccggcggcgatggcggccgcggcggttggggtggcgagcagagcacgccggagttctggctcgaggggagtggcattctgccgatggacgaacggcctcctccacccgcgcttcgtcttccccgaggccgccgcggtggcgggctctggggctggctccgctcaaggtgcgttttgcgtgaagcgggttttaaggatggttctaaacaaggtgctcgagctgttttgtgtgaagaagaaggattccaagaagaaagttgccgctccacaccccactgcaaatgtcagcacaaacaacagccttttggatcccttttcaactgggaatggtactgtgctatctgtgcaaaaacatgagcctgaatgttcaagtgttatatcatcaatgacaaggacagaatatggatttgaaagtgatggttgcaatttgtttagccattttgatgttgttcaagatttttctgaccattactatgcaaagaattcaccaggacctccaaagattgggtgaagacaatccaaaatgaatggaggcttctacagaaagatctacctgaatctatctatgttagagtttatgaggataggattgatctgctgagggctgccattgttgggccagctgaaactccatatcatgatggtctgttcttctttgatgtttgctttccttctgaatacccacaatcccaccgcttgacgcatgtgcacatcccttctttgatgagctacgagagcccaatgcacgcctgccatggcaaatggtcgtccattccctcctctgttcaacttcaagcatgaactaactggcgcctctccagaactcgtccacagactcataccggatcatatcagacggcaacatggcctcaacttgcgcatgctgggagttagaatggcaccgtaacgctcaccgttttgttcgtttatttttccatgagctggacattgcaatcctagatgactccattgtctggacttgggactccatctcagattgcaccatccatgattcttccatgatctatccatccgtcaagccatttccgcaaggactcagtaccagagaagtacaattatgtaaaatatctagccatgggagaaatgcgtgctgctgctgctggtgttaagtacgtgacagggcatgctggttgagtagtagggaaggactgcaaggagaagcaccctaacgtcaagcaggtatcttgtggcgcgtttgtgttgctctgctgcattaactgctacaatgtgtgttctgacttggttgatttggtggtgacaagtgcaagtccatgtctgatgctgttttggcacttgacaaatgctttgttgacccacgttgtttattaaatcccacacaagaagtaatgaagagggcattataccattaacagatgctattcccaatattccaatcagagcatggaggccaagttcacgggtactgcaaggttgcacatcacaaaacagaaaagggaggacaaccaaaggaagaagaaccagtccaaatggaatatttggttaatacattcggtccaaagtgaaaagaaacgctcatgcctggtccaagccacaacattggtaagtaatggtggtccaatgtgaaatttactcaaaaaaatttctatgattcgctttagcaattttccagtagtttcttttagatgatttgttttgcaggttcctactaacatgatatctgccggaggtgcagaaaagatcccctacgagtaactgggcttctggggtgctatctttttttttaatagataatggattttcattaatccggcctctatatccacgagggatatacacagccaaatgatacaagagcacttagactcacacctcgttaaagaggagaacacgcacaaaaaaaacctacgatctcaacacatccctgcttcttgacattctcatatgaaacggccatatttgacgagtggaggtcgtctagttatcaccgcccctagtgcattgtagctacaaaactccggtggtgtcatcttcatccgcttcaagtgagttgatgccacgctccgccggtaagcccaccttcatccatcatcgtccaatcagaactaaccgaccagacgcaagccgaaagtatccgcttccacttcaccggattcctaggcctccgcctccaacgtcggaatccacctctgcctctcagactcctaggcctctgccgccgacgggatctgccttcgccttatgtgcctcctactcgtcaagatccttgcactggcactcaggccgccgtcgtctcgggccattggccacctgatgtgaccatggctattacggatacatccgttactcacatcatggatgaacaacaagatatcaagttcaagtcctccaagtgctggaatccgattcggccatctactacacgactgacttcaaacggctgccgaatctccatacgacctccgttttcggcccgtgagtacttgatggaaagctctcggagtcctctttccaatgcatcaagcctcattgccaaattccatctcagtcggcagcaactaaagaaacaaggtgctgcgacacctgtaaaaggcctatgggcttgtaacttcgtctgggaccccggcctaagtggggcccatgtggggtgtgccccaatcaagtggaggacgacctagggtcctcctatctccataaatagcttggtaccccttcagggtatctcgggttttgtttagatgaaagtttagccattgctacttccttgcagcgcgcgtgtcggctagaccgtccgtctgcttgtattcgaaaccccaacttatcatttgtgctcaattcctatttgcaattcatattgcttttatcttgttcttgcttgtttcttcgatttgcttgcaggaataaggttaatctgcaccggcaagatcaacaacccacggagaggtgtatcgatcgctaaggcgcaacacaacgtctagtacggttgtagtcggatcgtcaacgtttcttccaaattgtagttatcacaactcaccgaaagattgggccaacaacagccttgagtttcgagaggaattcagggtttatcaggtggtatcagagctttcgttgctcggtgagtttttatctacctataaccagaaaatttcccaacaaaaaaaattgtatcctatacctagccatctttgtgcctttgcattgttcttttcagtttttgcgttgttgagttttgtgttgcattgtcgagtcgtgttgctggtattagcgtctagttcatttagagtttcgagttctggtcacgttttggaccatagtcgtcgccgcccccgtgtctctgttgtcgtcgggatctacgaaaacggaatcggctcgctgccacggttcttttttcgtagttttcagaagtttctgtcggttagtttttgagttcttgagttgcatagcttctgtttggtggctgtgccgtgatggtgcgcttgtgcatgtgcgcgtgagaaagatggaaggagaatattagattagattgactggtttggtttctatttagtgtcgagtatgtttctatttatcacctggtacctttccaaaccgaggccgagtgggattccttcccttgcgtcatctcgtggccgagacttgtgagtccgattcacactccctcatgattgtttctgtctgggttggttaaacacttcggtgaaattttattttggtgtcggattcaagatccgtttgcaaaaacggaaccgacataacttgagcattccatttttgtataatttttaattttggtttggacttttacagttgagtccctgtaattttcatatttacatttgagtccctttgaccttacattgaggtccttgagtcggtttttggtaaaaaaaatcaaaaaaaataaaaaaaaaggcagaaaggtgctaaaaaaagagaaaacaaaagccgcacc

SEQ ID NO: 26870 - DNA, 2458 bp, Oryza sativa
  ref <308>: DATABASE ACCESSION NUMBER: AK102312
  ref <309>: DATABASE ENTRY DATE: 2002-08-28
gggggcagggcgtgttcgtcggccccgacggcgccacgtaccggggcgcgtgggcggcggaccggcggcacggcgtgggcgccaagagctacgccaacggggactactacgaggggcagtggcgccgcaacctgcaggacggccacggccgctacgtgtgggccaacggcaaccagtacgtcggggagtggcgcgccggggtgatctccggccgtggcgtgctgatctgggccaacgggagccgctacgacggcgtgtgggagaacggcgtcccgaggggcaccggggtgttcacctggcccgacgggagccgctacgtgggttcctggccgaggagctgcgtcgacatgccggccattagcggcacgttcttcccgccggtcggcgccggtggcggaggcgcggtgaggaagaggtcctccgtcgagggagtaggtgacaaggcgtccgccgtccctcggatctgcatctgggagtccgagggcgaggcgggggacatcacctgcgacatcgtggacgcgctcgaggcgtccatgctctaccgggaggccacgacggttggaggtggtgtgccgtacgttcgcacacagcggagcacccggcgagtagccagcggaggcacgtgctgggcgccatcggcggctgctacaccggagggcaaaaggccagggcagacaatctccaaggggcataagaactacgagcttatgctgcagctgcaattggggataaggcactcagtggggaagtctgcggcagtgccaatgcgggagctttcgcctgcagattttgatcccaaggagaagttctggacacgattcccacctgagggatcaaaggtcacaccaccacattcctcttcagatttccggtggaaggactactgccctatggtgttcaggcacttgaggaagttgttctcagttgatccagcagattacatgatcgcgatctgcgggaatgatgcattgagagagctgtcttcacctggaaaaagtgggagcttcttttaccttacccaggatgatcgtttcatgattaagacagtgaagaaatcagaagtgaagttgctaattcggatgttacctagctattaccaacatgtaagtcaatatcgtgactctctaattacaaggttctacggtgtccactgtgtgaagcctcttaatggacagaaggtccgatttattgttatgggtaatttattctgctcagaatatcggattcatcgccgttttgatctaaaaggttcatcctatggacggacagcagacaaatttgatgacgagattgatgagacaaccactctcaaggacttggatctcaactttgtttttcgattgcaacgaacttggtttagagatctccatgagcaactcaggcgggattgtgaatttttggaatcagaagggatcatggactacagtttcttagtgggagttcacttttgtgatgacctctctgcctcaaagacaggcttatctacttttacagcttctcctaagttttcaatgaagagggagtcgttccaaggtggtggtggcatgccagagctgtgcttctcagatagtgattttgataggatacctgattgccggaaaccattgattagactgggggcacacatgccagcacgggcagagcaagcatccagaaggagtgagtttgacccatttctccttaatggtgggggattcttggccccgaatcagactggtgaagtgtatgatgtgattctatattttgggataatagacattctccaggattatgacatcacgaaaaggctagagcatgcatacaagtcattacagaccgaccccaattcgatttctgctgtggatccaaagctctattcgaaaagatttcaagatttcattggcagaatttttgtggaagatggctagaaatggatcaaaggtgcactgtaaattccattcaaaggccagagcaccggcaatgatttgaagatggttttggtaggtttctgtgcacggtaaagaatatccattatcacgaacgatcatcttcatctactgggatccgttaaagcggctcatcggccaccggtaaagcctcaacccaggagcacaggtaatcgggtttgcaaagcggtttgatgcaaattcgttgcaagaactggaatggctggattttcagaggcagccacgacagaggcatctgtaaattttgtgatttggtgggtgacagattggtacttccagttccctagtagttctttctttcttttctttttttttccttttgttagggattccttacggcttcagttttcccccttttatatatctgttggatgtagaaggggacagggaaatttttgtttccagaaagaggatttaaggctgtagcaagcagtgaataatgaagatcatgtacagatacacttcgatccagagaatgggtggattataatttaattcagcatcttcattcc

SEQ ID NO: 26871 - DNA, 3458 bp, Oryza sativa
  ref <308>: DATABASE ACCESSION NUMBER: AK102313
  ref <309>: DATABASE ENTRY DATE: 2002-08-28
ggatgacaacaattagtgacggtttttcttttgtgacacatatagtgtaggtttacttccagcttcgtcgattaccagacggcaccggcgtcgcgcgagcgagcttgatcttgcgccttgtgcctgctagctgcttcggcggcggcggttatcttcttccgatctgtaacagccccgatcaagaaaggatccaacccacctaggaggactaacctgaacgtgctaatgagttcaaagctagtaacatcacctctgaaatccatggagcagggccatctagagcaacctctgcgcgatccgcaggcgccggcggagcagcatgacatggggttatctcccctgacgctcctcggcttcgccttcctgaccttcaactcgggaatggcagtgtacagatcagatagagacttggcaaccatcttcttcgtggtcttctcctacgttgacctcgtatcgctcttctacttcctccgattatttgagaagacgccgccggagtcgcctcgccgccaccacatcaagacggcggtgtggctcctgacgacgatgctcaccgccgtgttttcatataaagtggcggccatcatgcctttcccggttcaggtgctggtttgggccatggccgcagcaactgtgcttggagggttctacgcattcttcctccactccgatgaaaaaaagcctattgaggtaacgtaacataagtattattactccaaattgaagtttaaccatcatcatgatgtatgtatatatagggactgacagaatgaaagtttaagaacttcatcatgagatgtgatcgatcactggaagaatatttcacagaaaccaaacgaaagggacctattgattgattaccttgtgccaattctgctctaatggctctgaaacagatgtgcccacggaactgcataaatttcaagagtggtctatgaaaattggagaatgggaggaattgcacacatgaactgtcttgccagagtggagatgctatggtaatgatatactggaactcctttttatgggctccataatggccgcacttggcatccgactatctgagcacggaaattttcagtggcaaaaccttactgcgaatagaagcaaagcactgcaaaatctagagctttgcatgggtcaagtactcaagtttatgacctttttcagacaagggatacaatctggcttggcccaaagaacacattacagagacagagacaatgggctccataatcttccattgaaaagaaaaataagaaactggagctggagtgggagatgtttcaagaagaattgagccatcaatctctctctctctggtttcctactggccctggagcctccatatgcaaacattcttttaataaatatgcaaattttctgcactaaaatccgccacacatcaataaaaagggcagtccttttgatgataaaacagcgccattatattaaaacaaaacctttaatataatatcgatatattaagggcatattcggtaagctgggactgcagctgcagctgctacagcccctgctatcttggagctagtccagccgaacagccctaagaagcaaaaagagtgtgtcgagagtcgaacacggtttgttgggacttgggagcacaatgacagccctacccactcaaacatatataaatttgacgataactagtatttgtaccaaacaaagttactcgaatgagaaaactggaacagagctcaaccaatcaaacgaaagtgacaacaccccattcaacatgctggtacagcagctaggatcatactagtgacttgagcaaatgcacattccatctcctccctttgtaccttaatttcttctttagatgatttgcagtttaaattaccttgttctcggttttgtcgatatataggtcatctctcctgtggcagtctaattaaccctggtttgttgttcaattgtgcagggataggcaaaatacttgatagggctttctggctgtttggcatttgtcagacgccctgtgtgtggtaacatctcgatcaaattggaggtcgaaattaaatatatccggtgagaagagatcacgagatcgatcgctacctatatatcacagatagaaatcagagtcctatcgatattttcgccgagcatatataagtagtgctgtcgatggcgagcccaattcgtgctttataaaaacagaacaaaaaaaaaagaatatgagtttgtgtgcgtatcattttttctgggttaattgtattttgatcaatcagcatgtacctgtaaaatgaggtcgtgtagatcatgtgctaccgtactgtgtcctgtttttagtttttcctttttttcttcttccactgtttacatttctacttgtctgcgtctagtcactgtgtgctgttcacccagcacaaagtgagcaagcatgacactgtacccctcttttttttcattcttgaaccctaataagcaccggacacacatatttgcttgtaccacagtattgctagcaagatagatttgccaaatagccaatgtaccttgtgcacaccctttgtgtaaataaggaataattaactatttgccactcttacgagtggtgctaaattatttgctactagacccatatgtcatagacacatgagggcccacatgtcatagacagcgagttaaatgtccctgtaaataaagtctcatgtgtcacagtgtgtgcctattttcagaattggtaaatgctagcatggcctgaaatttttatatgagatttctcttccaaaagaaaaaataaaaaatatatgagatgaggcgggaccctggatggataaatgtacggtataataactaaatcattgctacaatcaacatggacggaatattatgtaatctgtctttttaaagatgaaagtattagtgtattatggcattctgattatgttgacactttctctgaacttgttgacagagtgcacccgggatactgctaatactgcctttcatcgaattgaagtagggatgcacactaccctgcattcgcctctggagcagcaacgtgagacagacagaggaagacgcaagacacagcggcattgctgaacttgtgcacacagattacgagaattgggaagcgtcgtttacaagaacaaagaagaagtaatttagcaagaatcaaaggaagcggccagattagttgcattgcaatgtcagctaatgagacaatcctctggccatgtgcaaagagcttgagacaaggtgctcgacgacttgagagaggtcgatgtttacatgttaaaacttgaaggcgaaaacaagggttccaatctccccgtcgttttttgtaggtacaatttttgtgctccaggcttagagaagaccaggacgcagtcaagtcaaatgtacaaaattaagatttttaaagatttcgtcagcaatgacatttcctggatttgttcgaccaatccaatgaaatttacatc

SEQ ID NO: 26872 - DNA, 1446 bp, Oryza sativa
  ref <308>: DATABASE ACCESSION NUMBER: AK102314
  ref <309>: DATABASE ENTRY DATE: 2002-08-28
ggtagcggcagtaacacacactctctcccttccgatcgtcgccggcggccatcggcggcgctagggttcatcgggttacgcaggacaaactgcgtaggcgaggcgcgggggaatctcgcgatggaggcggccgtcgcttccaccggctccggcctgcgctgctcgcccaatccgatgcctaagcagcagcacgagcggcgaagtgctcgggtgggcttcgtctcccagccgcgacctcgcgctgtccgctgcgagcggtcgccccatccggatgctcgagcctacgcggcggtggcggtgggggtggtggcgaaggggcgtgaggttgggggcgtcggggtggagagaaggaggctcgcggtgttcgtttccggtgggggatccaacttccgggcgatccacgacgccgctctgggtggggaggtgaatggtgatgtggttgcgttggttaccgataaaccaggctgtggaggagcggagcatgcgaggggtaatgggataccggtggttgtgttcccgaagtcgaagtctgctccagagggggtttctattgatgagttgttgaatgctctgagggaactcagggtagacttcattctacttgctggttacctgaaacttatacctgttgagctagttcaggaatatccaaaatccattttgaatattcacccttcactactcccagcatttggaggcaaaggttattatggtttgaaggtgcataaagcagtcatcgcatcaggggccaggtattcgggtccaactgtgcactttgtggatgagcactatgacacaggaaggactctagcccaaagggttgtacctgtgctagccaatgatactccagagcaattggctgcaagagtccttcatgaggaacatcaggtttatgttgaggcagttgctgccctatgtgatgaccgaattgtgtggagagaagatggtgttccacttattagaagtcatacaaaccctgacgagtacacttaactcatagtactacctcaaggattgctgcgcagcatgcacgtaatgaggcttctagaatgcctgcattgttttttcccaaggcatgaaggtcactcgtactaattgagataaataacttgtctggtgctgttactgaaacaaaatatcttgtgccgttcaactcaccgcttgttgtgtgactttgctccaacaatgacatgcgcataggccgatacttagaaacctcagtgtttgctggtgtgacttgcggaagcatactggttgctgcatgcaccaagttttttttttttttgtgtgtgtgacagagcggggtggggggggggggagggggtccattgtaccctttagtcttggaattgttgtaatcggctgaagtcaagtcgatcaaagagggagtaaaaactggtcagatcacacaggttttcaatgtgtaatctgattaccatgcttccc

SEQ ID NO: 26873 - DNA, 1809 bp, Oryza sativa
  ref <308>: DATABASE ACCESSION NUMBER: AK102315
  ref <309>: DATABASE ENTRY DATE: 2002-08-28
tcacttcctctcctcttcctcccctctcaatccccaattcctcctcctcccgaggcaatccgcgaggctgcgcgtcctcctatccatcccggtctccgccatgagctcctcgtcgtcgtcgtcgtcgcggggcgcgctggcggcggcggcggtgccttccctctccgccgacgaggccggcgcggcggcggacgaggcgttcttgaggtacacctcgccgagcatgcggcggagcggcggcggcggggttgccatcgtgtggttcaggaacgacctccgggtgctcgacaacgaggcggtggtgcgcgcgtgggccgcctccgatgccgtcctccccgtctactgcgtcgatccccggatctccgcggggagcacccactacttcggtttccccaagactggagcattgagggcgcaattcctgatagagtgcttggaggatttgaagcgcaacctgacgaaacaaggtctcgacctgctcatccgccatgggaaacctgaagacatcctcccttcaattgcaaaggctgtcactgcacatacggtctatgctcataaggaaacctgcagcgaggaactcctggttgaacaccttgtgcgcaaaggcttggagcaagttgtgattcctcagggaggagcatctaaccagaagaagcctcgaaatcccaagttgcagctcatctggggagcgacattgtaccatgtcgatgatcttccattctccgtgaacaatttgcctgacgtatatacacagttcagaaaggctgttgaatctaagtcctcagttcggaattgtagcaagttgccaccgtcactcgggccgcctcctggttctggcctggatgaaattggaggttggggaacagtaccaacactggagtcactaggcctaagcatgacaaagtcagagaagggaatgcatttcgtgggaggggagagtgcagctctgggaagagttcatgagtacttctggaagaaagaccagctgaaagtctacaaagagaccaggaatggcatgctaggtccagactactccaccaagttctccccttggcttgcttctggcagtctttcgcctcgttatatttgtgaagaggtaaagagatatgagaagcagagaatagcaaatgattctacatactgggttttatttgagttgatatggagagattacttccggttcatatcagcaaaatatgggaactccatttttcacctagggggtccaaggaacgtagagtccaagtggagccaggatcaggcactgtttgaatcttggagagatggtcgaactgggtaccctcttattgacgccaacatgaaggagcttttagcgacaggtttcatgtccaaccgtggccgtcagattgtctgctcatttctggtccgagatatgggtattgattggcgaatgggagctgaatggtttgaaacatgcctattggattatgacccagcttcaaattatggtaattggacatatggagcaggagttggcaatgatccaagagaagaccgatacttcagtatacctaagcaagccaagacatatgatcctgatggagagtatgttgcctactggttgccagagctccgatcaattgcaaaggaaagaaggaatttcccaggagcttcatacatcaagcaggttgtcccactgaaatttgatggtggacatcagaagagagatcagcagttcaacaggcagagaaggccaggccacatgtatagaagacaaaaataataagatgcatatatgtatttattataatttacaccatatatcaatacgaagtgaagcagatttac

SEQ ID NO: 26874 - DNA, 1071 bp, Oryza sativa
  ref <308>: DATABASE ACCESSION NUMBER: AK102316
  ref <309>: DATABASE ENTRY DATE: 2002-08-28
ggtcaaacacttgacctgcacttgctcggagcggtggcgtcccaatccaatccattcccaatgcgacttctcaggaggatcccgctgctcttgtgttttattgtaggttgacaggatcatgacatgcaactggaaaatgcttgattatgtttgatagtacgaggattgtccgagtttctgagattattgccttcaatggaggttgaagctgcttgtggtgatggagtagtcagttcaagcaatgagatgcaggaattgtggccactaggtgaagtagaccaaaagggaaccaggttcccttgttgcattgtttggacacctctgccagtggtttcttggctggctccctacataggtcatgtcgggattgcccgggaggatggaactgtcatggactttgcaggttcaaattttgtgagtgtagatgaccttgcatatggttctgctgcgaggtacctccagctcgacaggagaaagtgctgcttccctgccaacctcgcggcgcatgtgtgcgcgaggtcctacgagcactcggaggccgggacggcgatctcgtgggacgacgcgctgcagtccggcgcgaggcggttcgagcacaagtgctacaacctcttcacctgcaacagccactccttcgtggcgagctgcctgaaccgcctcgcctacggcggctccgtcggctggaacgtcctcaacctggccgccctcgtgtggctgcgcggccggtggctgggcaagatggccgtcgtccggtcgctcctccccttcgccgccgtggcctgcgtcggcgtcctcatggccggctggtccttcctcatcagcatggcggcattctcctccctcctcctcggctggttcgtcctcggcgtctactgcttcaagggcttggtctgctgatcgatctgaaggccattttgttgaaattcgaccagaatatgcatcttttttcagttacgcaacgcgcactttcagtaaattatagacagtttttacagtgaaatcagagagttgtacacttgtagtcatctttgaagtttcatggaactataatctcatggatgatgatgaagg

SEQ ID NO: 26875 - DNA, 1833 bp, Oryza sativa
  ref <308>: DATABASE ACCESSION NUMBER: AK102317
  ref <309>: DATABASE ENTRY DATE: 2002-08-28
gggaggccggaaaactctttcgccgaccttccccacacggcttcaccctaagccagtgagcccaggcggcggcggcggcggggcggaatggcggagccggactggatcctggagagggagcggaggcaggtggagcagatcctggagcttgacatggaggagctccaggtcgaggaggtcgacgacgccggctcatcctcctcctccgaagtcgacacctttctcagaaacactcatggggatggaggatctagaacttctgaagcacttgcattcaatacgtctgtggtttcgctgcccacctgtgatggtgaggttcatgatgccccaggcagatttgctttcttggatggtggtgtggttctctgtttaccaatgttttatcttcaaggtgttgttttgtttcctgaagctatcctgcctattagagtagttcagcctagatctttgacagctgttgacaaggctgtcaatcatgttgacgctccatgcatgataggtgtggttcatgtttatcaacacactaatgatggacaccatgctattgcttcagttgggacaacagcggagatacatcacattaaacaacttgatgatggctcatcaaatgttgtcacacgtggtcagaaccgttttcgccttagacgccgttggatcgatgctgatgacgttcaatggggtgaagtacaaattatcgaagaagatacacctcagagaactccaagagatgcatttggccagttagctacaaattatattttcaaccagtgtggcacatcgttactcagtttgggtacatcttgtttcagacaagatgatcatgtgaactctgatcaagattgggattctctatcatccactagtacttcaagtgaacattcagtaacagatgcaagaacatactgttcctcaaatgaagatgaagatctcatgcttgaacagtcttggcagaagtatgattctgtgaaaagaaatgctgaattagagaatccagtcaagcatagcaacacaagaggcaagggtgaaccttgctttcaatccccaaaatctttaccaacaaaaaacaaaggtgctgaacaacgcaggcggttctgtgctgcttatagttcaaagctggcattgcaggctccattgtcattttggcctcgctgggcttatgaaatgtacgattcatattcccttgctcgcagagtggcagatttgtggagacaaatagttgtaaatccaagcatggatgattatgtgagaaaaccagatattttgtcatatcacattggaagcaaacttcccatgtcatgttctgtgagacaagaattgcttgagatcgatggtatctcatatcggctacagaaagagatccagctactcaaggcctttaacatcataagatgcagaaattgcctggctcttatctcaagacgtagtgatggccctgtcggtgcttatgtcaagcagttcagctgtgggcaagagatgatgacagtgtacaatgcaactggtcttgcactccgtggcgctccttccaaagctcacagtttgtttccaggttatacgtggacgattgctctctgtgctgcctgtgagtccaacataggctggctgttcagggcggagaagacaaatctgcttccaaaatccttctggggattacgcagctcccaagtttcagatgacacacaatcaggacataactgaaccttaacagtaagtcagggccccattttgtaattcgtataggtctgcctttaatttccttataagattcttttttttttcaccgggaaggccgaaggaggccaaccgaatatattaacaagaaataaaagttacaag

SEQ ID NO: 26876 - DNA, 771 bp, Oryza sativa
  ref <308>: DATABASE ACCESSION NUMBER: AK102318
  ref <309>: DATABASE ENTRY DATE: 2002-08-28
ggggagcaaagcggagcgcaatggcggggtcgtcggagccgacgcgggtgatggtcgcggtgaacgagtcctcgatcaagggctacccgcacccctccatcagctgccgcgccgccttcgactggatgctctccaagctcgtccgctccaacgccgcaggcttccacctcctcttcctccacgtccaggtccccgacgaggacggatttgatgatatggatagcatctatgcatctccaccagactttcagagaatgaaacagagagacaagataagagggcttcacttgctcgagcactttgtgaatcaatgccatcaactggagataaaatgtgaagcatggattaaacaaggggatccaaaggaagtcatctgcagcgaggtgaagagagttcaaccagatcttctagttgtgggaagtaggggccttggaccatttcagagggttttcgtgggcacagtgagcgagttctgtgttaagcatgccgactgtccagtcatcaccatcaaacggaaggccgatgaagcaccgcaggaccctgttgatgattgatcccttcaatgtcatacttgagaatgagatattcttcactgctcaatgggtttaatgtacaaaatacaatatggtagtagtgcttggaactagtacaaatctttgcccagtccaccccaaaactagagtgaagatgaagaacactattgcgacaagaggttgtatcctatatgagatacatccaagtttgttatgaacctaagctaccttgatgatg

SEQ ID NO: 26877 - DNA, 1451 bp, Oryza sativa
  ref <308>: DATABASE ACCESSION NUMBER: AK102319
  ref <309>: DATABASE ENTRY DATE: 2002-08-28
ggatcgcttcgtctcgctcccatccctccctcccccgcgtccagctcagagatgagctctcccacctgtacgcgcgaatctagaaccttctagatcctctccccttcccgatccgcccgcctcgcctcgtctcccgccccaccccgatccgatcccccgaaggtctcggggttgggggggggggggggcgaatcctgatggcggcgcacggcggtggcggcgtggaggaggatcaggcggggtcgagctcgctgtgcccacctgctgcggaggcagaggcggcggctgcggcggcggcgatagcgagggcggcgcggcctccgaggccgggcagggacaagaggctcggcgtgcggcacccgctgaagcaccggaggttccgcgcggggggcaaggcggcggtggcggccggcgctagggaggtcggggaggcgaccaccgtggcggaggcgacggcgacggggcctccgaaggggagcgacgaggatgacgaggctaggtacatttgcggcggatggacgagtgatgatggaagaatgagttgtggatactcaagctttagagggagaagagcaaacatggaagacttctatgacataaaatcatcaaaagttgatgataaccaaataaacctctttggaatatttgatggtcatggtggttcacatgctgctgagcatttaaagaagcactttgaaaatcttctgaaacatccgtcattcatcactgatacaaaatcagcaataagtatgatgtgagacctacagaaaaactgactctgatttcttggatgctgagactaatattaatagagaggatgggtcaactgcatcaacagcaattttcgttggtaaccatatctatgtggcaaatgttggtgactcacgaactgtgatgtcaaaggctggcaaagctattgcactctctagtgatcacaaaccaaatagaaaagatgagcggaaacggattgagaatgctggaggggttgtgacatggtctgggacatggagggttggtggtgtactagcaatgtctcgggcttttggtaatcgtttcttgaagcgattcgttgttgctgagcctgaggtccaggaacaagaaatagatgatgatttggagtttctgattttggctagtgatgggctgtgggatgtggtgtccaatgagcatgccgttgcatttgtaaaggcggaggagggccctgaggccgcagcccggaagctggcagagattgcttttgcccgtggaagcaccgacaatataacatgcatcgttgtaaaatttctccatgctaagatggccgtagatgctgcctcgtctagtgagcgaagttgatttcttctgttctatttctcttgttcattttatcatcttaatctggagtgctggcatcaatcacggtgcaaccttaactattgggcgtttatatatttgtttgttcattgaccttg

SEQ ID NO: 26878 - DNA, 2748 bp, Oryza sativa
  ref <308>: DATABASE ACCESSION NUMBER: AK102320
  ref <309>: DATABASE ENTRY DATE: 2002-08-28
ggcgggctgaggtgaaaaggtggagagggtttcccgcgtctcgcgacgagggtttaggcccagccaccgccgccgccgccgcggtgccagagccagctcgccgcgggcaacagagaggaacttggagcttcaatgggggaacctagtgttgcacgttccaaagactgtgatatggagtatgatgatagttcttctagacaaagtggcgagcctttgtgggaacatgcggaaggtgtggaacgatctgtcgattattcagatggcttgccccctacaagcaagggtatgtttcagtcaaataaaagaaagagcaaagctgcagatgaggatcttcatatgaaacttcgaactcgattggatgctgaagttgctagaatgttctattcttcaggattatccttaaaggccgcgacggacccattctttaagagcgcattctctcgtgccacctccatgcctggtttcacggctgaagaggatgagcatcaagatgaccagccttccctagttacacaaatgttcttttccataggtttgtcccccactattacaaggaacccatattatcggggttcattcgctatggtcgcgttgttccagattcctggatatgttcctcctggggtcgaccagctgaagacaactctcttgcagaaagaaagggctgacattgaaaacatgctgcagaccataaaaaacacgtggaggaaagcaggtgtgacgattgtttctgatgggtggtcagattttaaaaggcgacctatcatcaatatcatagctgtcaatgaagctgggccagtttttttgcaagcaattaacaatgaagatgggtggatgtggatgatggatgactacattgcagagaagctcattgctgcaattgaagacgttggatcagaaaatgttgtccaagtgatcacagacaatgatcctttttgcagagctgctggggtgctgattgaacagaagtacagtcacatccaatggacgccaagtgttgctcattctttaagtcttgccttggagaatatttgtgctgctaagaatgccgaaaatgttgtcttcaaagactgccactggatttcagaagttataggggatgcaaaaatgataaatgattttataagtaatcattctatggtactatccatgatcagcgagttcagtaagctgaagatacttggcattgctcacacaagatttgcttcagatattgtcatgctaaagaggtttcggtttgactaagcaatctcttatagggattgtcatcagtgacaagtggtccgtttacagtaaagatgacgaggggaaagcaaagcttgtgatgaaaaaaacttactgatgaattgtggtgggatcaagttgattacattcttgctttcacagaaccgatatattcaatgatacgcatcacggacactgaaaagcaatgcattcatttgatctatggaatgtggaatgatatgacagagaaggtaaaggctattatttataaacatgaaggcaagggggctgatgaagaatcaactttttactctgctgtaaatggcatttagtagattggtggggcaagaccagaactccactccactgtttagcacatgcactaaatccaagatgagtcctggtttaagttactaaatgatttcttttttaagccatgtaatatcactatcttttggtctgttctgtaggtgttacgccgatagttggattgatgaaggcgctaatcgtcaacccccacatagtgatgctgagattaatgaaatggcgaatgactgcttgaagaaattatttcctgctgcagatgacttgacggcgattaaagcagagtatgcaaagttttctcttttgagcacggagtttgcttcctcaggtacaggatgctttaacttgaattccatcactgatagggatgttcttgacccaaaaacatggtgggtgacccatggcagtccaacacctaagttgcaggagctagccctcacgattcttggccatcctgcctcggcatcctgctgtgagagaaactggaccacatataaattgattcgcgcagccatgaagattgagagccgtcctaaatgggttgatgatttggtgtttgtccacaccagtttgcggctttggacaagaaccacagttttactatagtgatccagagtcaatgttttgggacattgggggtaacgccgatattcttgcaagcttagtccctgctgatttacttgagtttgctgacttctcactcgacgaacctgagttcgagcttgccattcttgaagggctggaaggtgatgatttggcatgaagatggaggtggattggtggaaaactttctagaatcctagctcaatctgtgaatggcctgatgccacctttcctatcaggctgtcactcgggtctaccttgtcttttggggaaagtggtgtgttttggttatgtacttatgtggccactctggtagtatgcaaaactttgcagtatgcaatgctactacctccgtcccaaaatataaccacttttagctacgaatctggacacggttgtctagattcatagctaaaaatgcttacattttgagacggagggagtatatagtagtggtagtgatggactggtggtagactggaagtatgcatgcaaagctatgcaatggcaggtagaggtaatggtattatgcaaagctatgtgataagactttgctattatatatgcaaatctgtggaaactggacggtttgctttt

SEQ ID NO: 26879 - DNA, 3161 bp, Oryza sativa
  ref <308>: DATABASE ACCESSION NUMBER: AK102321
  ref <309>: DATABASE ENTRY DATE: 2002-08-28
gatcttcatattgctggttgatgtgcttgagcctgggtgaatgtcgtgctgcctctgcgcctctgaagacgccatcgacgaagcaaggtgttcatcctgtggaaaccaagatatggcttccaatcatcattcgcaatcaattttctcggccgtgctttgcagcttcggcaactgtttgcaactgaatattgcgtatgctttcaaacctgaagaggttcttgtcaagctcactgaattcaatagaaggttggaggctaggagtgatgacataaaactaatgatcagtatggctgggagcaaacaacaaacctgtaagcatgaagtgctagattggcttcaaacagttgagctggcccgaactgaagttgatgcaatactgcaagattatagcaaaagatccaaacacctgatctcaaatttcaacatcagcaggagagcctctgacaaactggaggaattggttgacctgtatgacagaggttcttttgaagttgtatctgttgatggacctctaccttccattgaggagaagcctatcagggaaaaattggttggaatgcatttaaatgtgatgaaagttctgagctatctacttgatgccaaaatcaggttaattggcatatggggcatggggggagtaggaaagacaatcttcttgaaggtcatcaataaccagtttcttggtgttgttgacaatatgccctttgatcatattatgtgtgttgcagcagccaggggttgcgtcctggaaaatcttcagatgaacatagcagagaagctgggattgctctcgaagcagggagatagcatagaatctcgtgccgcaaccatcttcaaccatctgaagaacaagaactttttgctgctcctggatgacctttgggagcacgttgatcttctagaggttggcattccacctccaaatgaatcgaagatccagaaagtagtctttgctactcgctctgaggaaatttgttgtgtgatggaagccgataaaagaatcaaactggaatgtttgcagcctgatgaggcatgggagctgttcaaatacagtgctacagaagaaacaatatgtgcagatatgccgatagaaaatgtcgcgaaaagagtttgtgcaaaatgccgtggtttgcctttggcactaatcactgttgggaggtccatgcgtgcaaagagaacgtggcgcgagtgggagaatgccctgtcaacttttgatgagagcactcagcttttggaagcttcagagatgaaggtcattaaccctattctgagcaccctgaggatttcctatgacaatttggagaatgatcagctgaaagaatgttttctggtttgcttgctatggcctgaaggctattcaatttggacagttgatcttgtgaattgttggattggtttgggtctcgtccctgtcggtagaacaatcaatgatagccataacattgggttatcacgaattgagaagttgaaaagattgtgcttactggaggaaggtgatatcaaacaatcagaggtacgactccatgatattatccgtgatatggccctctggattgcctcggactataagggcaagaaggatagctggctactgaaggctgggcaccgattaagaaatgtgttaagctgtgaagttgatttcaagagatggaagggtgccacaagaatatcactgatgtgcaacttcttagattctctgccatcagagccgatcagttctgacctatctgtgttagttctgcagcaaaatttccatttaaaggatatcccaccatccctttgtgcaagcatggctgctctcaggtatttggaccttagctggacacagattgaacagctgcccagagaagtttgttcattagtaaaccttcagtgcttaaaccttgctgattcacacatagcatgtctgccggaaaatttcggtgacctgaagaacttacggttcttgaacctcagctacactaaccatcttaggaacatacccagtggtgttatatctagtctgtccatgctgaaaatattgtacttataccagagtaagtactcaggctttgaattggagttgagcaaaaacattacgggcagaaatgatgaattcagtttaggagagctgagatgctttcacacagggctatccctgggtattactgtgagaagtgttggtgctcttcgcacactatcgctgcttcctgatgcctacgtacaccttcttggcgtagaacaactggaaggggagtccactgtgagcctgaagctgcagagtaccgtcacggtggtaaacttcaggatgtgcctcggtgtagaagaattgtcaatcgaacttgacaatggccaagatccagagaaatccattccgcagttggagtacctcaccttctggcgcttgcccaagttgtcttccgtgaagattggtgtggagctcctctacatccgaatgctatgtatcgttgagaacaatgggcttggcgacatcacctgggtgctcaaacttccgcagctggagcatcttgatctgtcattctgcagcaagcttaactcggtcttagccaacgcagaaaatggagagagaagagatgccagcagagtccattgcctgtcaagactcaggatattacagttaaaccacctgccgagcttggaatcaatctgcacatttaagctggtctgcccttgtttggaatacatagatgtgtttggctgcccattgctgaaggagctcccgttccagttccagccagacaacggtggctttgctcggttgaagcagatccgtggagaagaacaatggtggaacagtctgcggtgggacggtgatgccacccgtaatatgttgttgccattttacaaggtgtttgacaagagcctagagacttttgagccagctcttggcaccaatccgttcgtccaagcttcagggtcattcttcgcacatcgcaaaccaatgatgaggacggctattcagttctcgtcatatctctcgctgctctttggagcacaggtggcatcgaccaattaacaggtctgtcggttttttatttaagaatcgaatcaaatacatcgtctggctaaatttctaataactcctcctcttgaaatggtggaccagcacccacttgaatgtatttccaatgtactactattgctagaattgcaaatatcct

SEQ ID NO: 26880 - DNA, 944 bp, Oryza sativa
  ref <308>: DATABASE ACCESSION NUMBER: AK102322
  ref <309>: DATABASE ENTRY DATE: 2002-08-28
gagaaaaaaactggctcagctgttctggtcttgagctcttcttcctcaacatatatcacagtcgtctgaagtcttaacagctcttgaactacaggagaagttcagagaaaacttacaatgggggcatcgccgtcgcgagaagaggcgcattccaactcttctttctctgggaacggcaaagccatggcggtggcaagcagcgcttccagttctggtagcaaccaggcccaatcaaagagagcaccagctcttcacatgttccaagagattgttgccgagaaggattttactgcatcttcactggaagatcagatctacaccggcatcttcttggcagggaaaacaaagaagtactgggtggatgagagaactaggaacaactgcttcatgctgtttcccagaggcttgtctatcacttggagtgaagaccccagattctggacttggaaacctctgaaagaaggaagcagtgatgctgacactgacacccagatcgaagtgccgtcgctgcagaacgtctgctggttagagatccatgggaagcttgaacggtcctatcttacaccaggagtcacctatgaggttctctttgaagtaatgcttattgatcctgcatacgggtggtctgtcccagtgaaccttcagctcaagttccctgatggaacagtccagcagcgtaaagagaatcttgaggagaagatcaggatgaaatggctggagctcaaggtcgggggggtgaaaacccagcaggggcagaagggagagattgagatatccatgttttgagtatgatggtgggctgtggaagagagggctactaatcaagggaatcaagattctcccaaaacaatgatgtgttactcttcgatgatcattgatcattagctatattttgtcagttatgttaagatccacacaaagtatcagaataatgtgcttgctgc

SEQ ID NO: 26881 - DNA, 1291 bp, Oryza sativa
  ref <308>: DATABASE ACCESSION NUMBER: AK102323
  ref <309>: DATABASE ENTRY DATE: 2002-08-28
ggccgctctccaaaaccctagctaacccctcctcctccaggtcccttctcctcgccgcccccctctcccgcggcgccaccccactgcccctcctgcggcgcgatgtctccgcggcctacggcgacgacgacatggacgacgacttcggggacttcgacctcgacgacggggacggcgtgggggacgacgaagacctcgacaacgagcaggactacgacgtcgactacgaccgcctgctcgcccccgtcaaggcgccgccgcgcccgctgtcgggggagggcgacgaggaggaggagggggacatcgccatggtcgccgcccagagcttcgtctccacgcaggactccgcctccgacaccgtggtcgactactccgtcaacgaggacgaattccacaagattcgcctactgcactgcgatttttttatccgcaaggtgcctgaccccgacgacgacgtcttcgacttccgggagatgtatgtcacgccgcctgacactgacatctattccatcccaagggttcttgctccgatgccgcaaaagtatttgaggtgcacgaagaaaaattttggtcgttaccatgttagtgagccgcctgttgagcatttgcgtgatcccctatacaagacagaaagggagatcatgaaggttttcttaacaaaacattacaggaataggcggtgtaacgacccagattttttccttgattttgaagagatatatgttattgactcaaaagcaaggtcaatcacgagagcaaaagttgtggttagtgtccctgaaggaaagaagagggacaggagaaatgacttgctactcatacgagatggaggggaatcattcagaataatcgacaagaccaaaagggatgatgcgaccactgtgatccaaagagaggagtgggcaaagtcgaggcaagatgtggagaagcactttaggaagctccgcgactttgactactcaaattggttctgaagaaatagtagctggagtcattcagcagagaaattattttgctaattttgcagctgcttatattagaggaagcgaccatggaccatggtgctcaagggagaatcgccatcttcgagtaggctaattatgtgtactttaggtttttgtagcaggtagaaggcatgccacttagcgagcctatctgtagaaaactgaaatgtttgatgcttgtgaatgcactaccttgttgagtagccaacgaatatgtggtccttggattcagaatgcacgtgttttttatagtatcggatatctatacttggattcagaatttcctg

SEQ ID NO: 26882 - DNA, 3505 bp, Oryza sativa
  ref <308>: DATABASE ACCESSION NUMBER: AK102324
  ref <309>: DATABASE ENTRY DATE: 2002-08-28
gatgtagaactagaacccatctcagctcacccgcagtcgcgcgacactgggaaaaaagggccacccatcagtgccttctcctctcctctctcttctcttctctctctccgatccggatcttcctacccactccggcgagccctcgccgcgtcgcctccacgcgactcgctcccgtatatcggcgcttcccttagccgctgccgccgcccgcctataccaccagctatatccgattgcctcctccccctttcgcgcctctgtcccgcgccccaccaaaccctaggcgcgccgcccatggacatagagaccgacggtcgcttcggcaacaagcgcgtgcaccaccgcctcggcccggccaacggcgccgcctcctcgtccacctccgggaaggtctgcatccactggcgcgccggccgatgcaatcgcttcccctgcccttacctccacagcgagctccccgaggcgacagccaagcgcccgagccaaagcggcggcggcgggaacgtctggaggaatccccactcaggaggtggagggggccgcggcgccggcggcgccgggggcccgaacaaatgggggaggggccccggaggtgcggatggtggcccgaggcacaaggtgcccgatcggccctgcaggtacttcctcgccggcgactgcagctacggggagaagtgccgataccctcactcctactccatgagcgatagcatcacgatgcttactccgctccagggccacgagaaggttgtgacagggattgcactgccggctgggtcagacaagctgtattctgggagtaaggacggaactgtgcgcatgtgggattgccaaactgggcagtgtgctggtgtcatcaatatgggacgtgagatcgggtgcatgatcagtgaggggccatggttatttgttgggattccagatgctgtgaaggtttggaatatgcaaacacaagcggaaatgaaccttactgggccaacggggcaagtctatgcactcgctgttggaaatgagctactctttgccgcaacacaagatggacggattttggcctggagattcagcgctgcaacaaatggttttgaaccagctgcctctcttgttgggcaccagcttgctgtcgtttcattagtagtaggagccatgaggctttactctgcttcaatggacaaaacaattagagtgtgggatttggcaacactgcagtgcatacagactctttctgatcatacaggtgttgttatgtctgtattgtgttgggatcaattcctattatcatgttccttggatcaaacaataaaagttagtctctgtccttgactttatgttgtttaataattatgcagatatgtcttcacattccatatcttacccttttcattgcatttcacactcgttcattttgttcctgttcttctaacatcatatctgtaatcacgttttatcctttcagtgcattcatacttctacgctgtgtttctcttcaggtttgggcagctacagaaagtggaagcttggaagtaacatatacacacaaagaggagcatgtatgtgactcgatactcaatactcttaataagcgattgcacaggggttatgttctgttacaccctgatgtactaaatccttattatatttaatttgttcattttcacaaaaacatgttaccctttctggcgaacttctagacagtaccattttatggttttatgtaatgggtgtcatctcccgccctgtttattatggaatataaataatactgatcagtgatcctgtttatactcctttgaacttaccgttaggatttcctttacacttccccatgctaaatgttttacatacagattagcaatttgtctactattaagacagctattactccctccatctcaaaatataactattagagctggaccattgagcgaattggatcagttcactggttttgccagcacttcaacaacaattaaactggcaatttaatcatttcaacatttagatgtttatttgcatgctttatctagcttctatacaagttagtgcccttattacacaagagccgcaagctaccaaagttaatgaaggcactaggcactagttgggccactgaggtgcaatgagcacctagcctgcatgtcatggtatgactggtggcagagccagaagcgtaaaaaaatatttattggagggggctgataatactagttatgatatttcataaaagcaaaaataattagtgtgaattattagaaattgagggaggccgaatccctgcttgccctttcctgtctctgccccctgcgtatgacatcagaacttgatttgtgagttttctaatggctttgcctgccaccctttcctgctacagagccaatatttctgtagtgattcacatagccaatattcatgtagtgatttgcaggatacttcatgtaactgcctaaaatataaatgtgtttacaagcatcatctattagtaaaaatacatgttccttattatttgtaacacaagtaagtctggcgatgtatgccagattgaatgctttaaatggaagttaataaatccaatgaaatctgtacacaggtaaaatgacatgttatacgagtcatgtactataactacactaataccacattggtgtgctggcattttgaattttgaataatcacttctgttccgtcagtactagttccataagagtgtgtcctttcatggtcacacacttttgcctttgagaaaccaatcctttccattattaatatagtatggcatctgccttgcacaaaatttggaaacacgcatgccctttacttctgtcaaatttcttcatttcaatttccaatgctctgatggctttgttttatctgtagggagcacttgccctaagtggcatgcctgatgcacaatcaaaacctgtgctactatgttcactaaatgacaacactgtccgactatatgacctgccatcgttcagtgataggggcaggatattctcaaaacaggaaataagggcaatacaagttggtcctagtggtttattttttactggggatggaactggtgagctgaaggtgtggcaatgggttattgatggatcccagaccaaatgaatatagtgtactctagattagtttcccccctttatttggtgagggataaagaacacatgcataatgatttgagatgtggttggcggccagttctgtccttgcatgtcctaaatttattctccgagggtatgagattcaattggatcgccttgcagttagattacaagctaagtctcaccatggacgagagtttctgtcctggaatgagtttcacgtgagggcaataatttcttgtaatatgtaaagcactggaagtctggaaccaacaagtacatctgatcactgttacgatgtgctggtagttcagaggatgtatcaatataaaggttttgctcggctgcatttgtattaaggaactcaaattttcacagcaatacaattgtttgttgttctc

SEQ ID NO: 26883 - DNA, 1098 bp, Oryza sativa
  ref <308>: DATABASE ACCESSION NUMBER: AK102325
  ref <309>: DATABASE ENTRY DATE: 2002-08-28
ggggagtgggaaaccccaaaacccccacgtcctcctcctccgccgccgccgccgccaccgtcgccgtcgacgagccatgccgccgcggaagcgcccgccgccgccggccaaggcgccggaagccccaccggaaaccaagcccaagatctctccgcccgctaaacccatcgccgcggcgccgccgccgccgaaggcggtcctctcggacaccgtcctcgccgccttgtcgcagcacgagcgccccatctacaagctcgtgttcgccggcggggacaagggcatgtcgcagacggagatccggatcaagaccgggatgccgacgagcaccctcaccaagcacctccgcggcctcacctccaagggcgtcctcaaggtggtcaacagcgtccacaagcgcgccgagaagatctacatggacgtccgcatcgacccgtcgccggagatcaccgggggaacctggtaccgcaacggccagctcgactccgacgccgtcgcctccgcgcggcgcaggtgcctcgaccagatcgacaagctcggcgtcgccacggcggagtccatccacgagggcatcagcagggaatgctccaacctagcctactcgaccgagcaggtcagggacatcctgcgcaccatggcgctcgacagggaggtcgaggaggtgaggagcaccggggcgggggagttcggcgacctcagggcagggagggtgtgctaccggaggggcggcccggtgcagggcggcatgatggagaggatcccgtgtggagtttgccccaggatcgatgagtgctcgccggatggcgttatctcgccgagcacctgcgtctactacaagaagtggctgcagatggacttctaggtggtgagctctcttccgcgccgctgtttatggtgcgatcgcacgcacaattcagcttccaattgctcaattggcatttgatctatgctatggaattgccacagttcatacattgcggcatgtgatcccggataggcccatgagatagacatactagatgatatcatctgattatcttatgtttgtatttaaattagtaagatttgtttctataatcattattacttagccttttcccc

SEQ ID NO: 26884 - DNA, 1405 bp, Oryza sativa
  ref <308>: DATABASE ACCESSION NUMBER: AK102326
  ref <309>: DATABASE ENTRY DATE: 2002-08-28
gggaggaggcgttgcgacttgcgagtggcggaggactaggaagtcgcctccgcctccgctgcagacacactggcgatggcttcctccttcgccgccgtcttcttcagcagcgccttcgctgcctgcttcgctgaggtgtgcaccattcctctcgacacagccaaagtgcggcttcagctgcaaaagaaagcagccctagctacaggcggaggaggagggaccactggaggaatgctgggcacaataatgtgcatcgcaagggaggaaggggtggccgcgctttggaacggcatcatccctggccttcaccgccagtgcgtctatggcggactccgcatcgccttgtatgagcctgtgaaagccttctttatccgagacggagatactgttgctggtggtgtcagtttatttgctaagatccttgctgctcttatgacagccaaccagtttacatccaaatttcatgtgttaaggacttaaggtaggtgcactatgcacaagtaaatatactcttatattaattaccgttctatatattcataggtgtcatagcaattgttgtggcaaatccaactgatcttgtcaaagtgagattgcaagctgatggaaaggccaccactgtcaagaggcactattctggagccctcaatgcgtatgctaccataatcagacaggaaggtattggagctttgtggactggcctcggtccaaacatagcacgcaatgctataattaatgctaccgagttggccagctacgaccaactcaaacagctggacttggtgctggattttttgctgtttgcattggctctccagtggatgtggtgaaatcaagaatgatgggtgacgcaacgtacaagagtacactagactgttttgcaaagacattaaagaatgatggacttcctgctttttataaagggttcattgcaaacttttgccgcattgggtcatggaatgtgataatgtttttaacactggagcaggtaagaagatcaattctgtaagtctgctgcactgcactgcaagccaaggatctatcatgcaagtgaacagcaggagcaggactgaatcgatgcttgatttagctgtagctcctgagtccactttatagtgctgtttgctgaaggccacatatgtctaggattagatttgttttgtacaggacaatgcgttctaattaaacccatcaattcagcagaggacaacatcaacagagtcatttgtgcagagatgattggccataacatgtcattgtactgtctgagcaattttttaattttaccaaaaatgaaactcacaaaatctaatgcaaatataggttactcttggtagtaatttcatgtatccgaggtttgtaaacaatatgaaaggaagttgtgacttaaacttgcttttgcatc

SEQ ID NO: 26885 - DNA, 1245 bp, Oryza sativa
  ref <308>: DATABASE ACCESSION NUMBER: AK102327
  ref <309>: DATABASE ENTRY DATE: 2002-08-28
gtgaccgttgataacttgatactctcccgatttgacgaacgcaaagcacgcacacgatgaggctcacgacgaaatcgaaaagccgctgcttagactgaacacaccacacacgagcacgagcacggagaagtcgagagagagagaagagagatggtcctccccgtcctcgcgcccctcgccggcgccaccgccgtcgccttcctcctcttcaagttcgccaccgtcgatggggatttcacgctggtctcgcgcggggcgccgcggcgggagaaggtggacgggaaggttgtgtggatcactggagccagccgcgggataggggaagttcttgcaatgcaatttgctagtttaggagcaaagctgatactatctgctcggaacaaggaggagcttgagagagtgaaacataacatcatcaacaagcatccaaatagcagagttgaagtattacccatggatttatcatcgggtgaagagtctctgaaagagcatgtacatgaagcagagtcactcttctccaatgcaggcgttgactatatgatccataatgcagcatttgagcgtccaaaaaggagggctctggaagaaactgaacaaggtcttaaggctacttttgatgtcaatgtctttggtactattactctaactcgccttcttgcaccctcaatgatggatagagggatgggccattttgttgtgatgagtagtgcagctggaaaggttccatcacctggccaggctctttattcagcctccaaacatgccctcaatggctatttttcttctctgcgctctgagttatgtacaaaaggcattaaggttactgttgtctgtcctgggccgatcgaagcaccccaatcttctggtgcaacctcttcatcacaaaaaccatcttctgagaaacgtgttccagttgaaagatgcgctgaactgacaattgttgcagcaactcacggactaaaagaagcatggatatcatatcagcctgtgctaggggttatgtacttggtgcaatacatgccgacggttggtctctggcttatggacaaggttggtgcaaagcggctggatgtagcagcaaagaaaggcaatgcgtacggttggaatctccttttcggtggcaagaagtcagcatgatgaagttgtccaataataggggagtcaaaatggctgtataaatttgtggattctgaacatacggattttggtatttacttttactactgttacagtagcaccttacct

SEQ ID NO: 26886 - DNA, 1654 bp, Oryza sativa
  ref <308>: DATABASE ACCESSION NUMBER: AK102328
  ref <309>: DATABASE ENTRY DATE: 2002-08-28
gggagacactcgcaggcagcggagagccgagccagttcactctctcacactccacactctgccactgccactctccagctgcagcgcagcagtgcgtgtctcctccccccgatggcctcgcggatcttgctccccatcctcctcttcctcctctgctcgcgtggcggcagcggggcgccggcggcgaggcggggaatgcgcgtgccgccgttgggtggggacccggtcaagttcgacttctccccgttcttgatcgagtacaagagcggcagggtgaagcggctcatgggcaccgacgtggtggcggcgtcggcggacgtgctcaccggcgtgtcgtccagggacgtcgccattgatccggccaacgatgtccgcgcgcggctctacctccccagcttccgcgccaccgccaaggtcccggttctgctttacttccacggcggcgcgttcgtcgtcgagtcggcgttcacgcccatctaccacgcctacctcaacacgctcgcggccaaggcgggcgtcctggccgtgtcggtgaactaccgcctcgcgccggagcacccgctcccggcagcgtacgacgactcgtgggcggcgctcaagtgggtgctggcgaacgcggcgcccgggacggaccagtgggtctcccagtacggcgacctgtcccgcctcttcctcgccggtgacagcgccggcggaaacatcgcgcacaacctcgcattgcgcgccggcgaggagggcctcgacggcggggccaggatcaagggcgtggcgctgctcgacccgtacttccagggtcggagtccgatgggcgccgacgccatggacccggcctacctccagtcggcggcgcgcacctggagcttcatctgcgccggcaagtacccgatcgaccacccgtacgcgaacccgctcgcgctcccggcgtcgtcgtggcagcgcctcggctgctcccgcgtgctggtcaccgtgtcggagcaggaccgcctgagcccatggcagcgcgcctactacgccacgctccggagcagcggctggccggggcaggccgagctctacgagacccccggcgagggccacgtctacttcctcaccaagctcagcacgccgcaggcgcaagccgagatggccacgctcgtcgccttcatcaaccgcaactagcacgcacgcacgcacgcagtaactcgaattctaccgtactattacagtgagtaattagccactagtgaggattgatgaggtgattacatttttcttttttacctttctttggagtagtacggcgagattccatcgtccatcgctacggccacgagtacgttaattggttcctccgccacaaaccggcaggacggagaggggccgggaccgtgctcgatcccatccatcgctcgcgtctcgtttcattaactgcagcctgcctactgttaccgtgttattacagctacggccagcgttgtgcaacggtgacgacgcatccagtggttggccgctgcgtgcagttactagtaatagtgagtactaccagtatacacgtgtcatagccagtgtcactctgtttctactacctacggggtcgcaatctgtaataatttttttttgtactgctagtctgctactactacggtggtgattaatcgaagtggaaaattttgtc

SEQ ID NO: 26887 - DNA, 1982 bp, Oryza sativa
  ref <308>: DATABASE ACCESSION NUMBER: AK102329
  ref <309>: DATABASE ENTRY DATE: 2002-08-28
gtgtcacacagtggaattcgactatcctcagtctgccacggcgccaaacaggactagagatggcgctcactcatcacctcctccgcgttctcttagccaccgcattaccgttgctctttctctcccatgcagatgcgggcgagttgggcgtgtgctacgggagggacgcggacaatctgatggacccgcaatccgtggtgagccttctcagggcgaacggcatcacgatggtgaggatcttcgacgccgacccggcggtgctgagggcgctggcgaacaccggcatcaaggtgatggtggcgctacccaacaccgatctgggctccgccggctgggatccgagctacgcacagaggtgggtggagagcagcgtggtgccctactacccggccacgctgatcaacggcgtggccgtggggaacgaggtgttcgatcaggcgcctcacctgacccagcagctggtgccggccatgaggaacgtgcacgcggcgctggcgaggctgggcctcgccgatgccataagggtgtccaccccgatcacgttcagctcagtcgaggtgtcattcccgccgtccgcaggcgctttccgggatgacatcgcgcagtcggtgatgagccccatgatcgacttcttgcagcagactgactcgtactttatggtaaatcactacccattctttgcatatgcggatccttctaccggaatctccctcgagtacgccacgttccgtcccaatgctggtgtgttcgatccggtgagcggcgtcacatattacagtctctttgatgccgagctagatgcagtttactatgcaataaacaaggtttctggtagtaacgagagggcctcgttagcccaagcaggaggacgggtgcccatcagagtttcagaatcaggccacccctctggtggtagaatccgctcaggggtcacagaagccaatgctgatggggactcggtggcaactaaagctaacgctcaagtatacaacaatggccttgccaagcgagtcttgttcggggcctccaatatggaggatgtttctgcgtacatattcgctttgttcaacgagaacaagaagggtgggccatctatagagagcaacttcggcctgttctatccggatgggacgaaggtgtacgatgttgactttcatggtggtggtacatgtcccacaaaggagagctggtgtgtggcaaatgcagctattgggaatgcacggctacagggagcactggactgggcgtgtagtaacggcgcggactgcagtgctatccaacagggaaaagtgtgctatgagccaaacaccatggttgcacatgcatcttatgcattcaatgactactaccagcgtaatggcaaggcaagtagcgcgtgcaactttgccggtgctgcttacatcgtctacaagccatcaccaagcatctgtgacccgaacccgagttggtgcgtggcgaacgcagaggtcggggacatgcggttacaggcagcactagactatgcatgcagtagctgcgcagactgcagtgccatccagcctggtggacggtgctttgatcgtaacaccaaggtggcgcatgcgacctatgcattcaatgactattaccagactgccggcagggcaagtggctcgtgtgactttggtggtgctgcttccatcgtcaaccaggcaccgagaattggaaactgcgtactcccaccaagcaagacttcttcaatgaacatattttactgaagaccgaaggtagcttaccagaagctcaataatgaaagtgggattgaagaatagccccgtattactgtgctgagaaaataaggatgatattgtatttagattctggttaagaattttaagtgtattccgttcgctcttgttgaataaaattcctttctacacaatgcagaataaaatgtacaataaactccatcaaactcctagagtgcaatggaaaatttgggaatgcaaatacacttagctgcc

SEQ ID NO: 26888 - DNA, 2740 bp, Oryza sativa
  ref <308>: DATABASE ACCESSION NUMBER: AK102330
  ref <309>: DATABASE ENTRY DATE: 2002-08-28
gggtcaaaccactcccccccacccccaccaccatgcctccctcgccgcctcccctcctcctcctcctcgcggtcctcctcgcagccgcgccggcggcggcgcagtcggcgacgccccgggaggacgacgtgcggtgcctcaaggaggtgaaggccgagctccgggacccggacgggcgcctctcggcgtggagcttcggcaacacctcggcgggagccctgtgcctgctgtcgggggtgtcgtgctggaacccgcaggagtcgcgcatcatcggcctctcgctctccgggttcggcctccagggcgggatcccctccgcgctgcagttctgcagcgccgccaccacgctcgacctctccaacaacgcgctggtgggggttatcccgcccgcgctctgcgactggatcccgttcgtcgtcaacctcgacctctccgggaaccagctctccggccagctccccagcgagctcgccaactgccgcttcctcaactcgctcaagctctccggcaactccttctccggccagatccccgactccctcggccgcctcgaccgcctcaagtcgctcgacctctccgacaacaggctcgacggccagatcccgccccagctcgccacgttcgggaaggactccttcgccggtaacaagggcctgtgcggccgccccgtgtcctcgcgatgcggccgcgcgctgagcggcgcgggcctcggcatcgtcatcgccgcgggggtgttcggagccgccgcgtcgctgctcctcgccttcttcttctggcgttgcaccgggaagagcaagggcggtcgccgccgccgccgcggagggagcgagtccggcggcggctccgcggaggacgggagctggtgggcggagcggctgcgggcggcgcacaaccggctggcgcccgtctcgctgttccagaggccgatcgtcaaggtcaagctcgccgacctgatggcggccacccaggacttcagcacgagccacatcgtggtggccgggagctcgcgggcggggacggcgtaccgagccgtgctgcgcgacggctccgctctgacggtgaagcggctccactcgtgcccgttgtcggagaaggcgttccgggcagagatgggacgggttgggcagctgcggcaccctaacatcgtgccgctgctggggttctgtgtcgttgaggatgagcggctgcttgtgtacaagcatatggagagtggagctctttcttcggtgatgaaggagccaggggaggcaccgctggattgggcgacacggcttcggattgctgtcggggcggcacgcggtcttgcttggctgcaccatgggttccaagttccgcaaattcaccagaatttgagctcaagtgcagtgcttctggatgaggactatgaagctcggttcatagatgttgggcttacaaggctggtccgaatggcaccaggcgagggtggagatacaagccccttcctgaatggggacttcggggagtatgggtatgtcgccccagagtgtgctagcaatccagttgctaccatgaagggtgatgtgtatgcatttggtgtgatactgctcgagctcgtgagtgggcaggaggctgccactgtaacgggtgatgcggcaggtgaaggattcaaggggacattggtggattgggtaaatcagcttaaggcctccggccggatcggtgatgctgttcataaatcattgcgtgggaatggccatgattcagagattgatgagtttgtgaagatagcttttgcgtgtatcatggttcacccgagggagaggttctcaatgtaccgggtttaccactctctgaagagcattggacagggtcgtgatgtctcagagcaatttgatgagttcccgctggcctataacaaggatgaatcagataccatgtaactaatggtggtggtcttgcttgggattgtgaaccgccctcggtcaggctcaatggatgcttctttgtgtagtcctgctacttgaattgatgaagagcatgctgaggcaaccatattggcatgataattattgctggatgatcaattcgatgcttgcctcatctcctgtcgagataatcgtgtaagctgtaagattttagtctgtattgtctttttacattattgctagcgcttgtagtatctcgctttatgcctaaattctgatatgaccttccttcttggaacaacttgcctccttccccaatctcctaagaacaatattggcagtgaacaaaattaatcttgaccaatttatctaaagtttacaggaatgtttcgctctgtcatgtactcatgtccttgaaacctttttcaagtagcatgttatatcatttgccatcttctctttgtgaattttcttgatgataccatgtaccttattcacatccacttaaacaatgctgtataaacatgatttatcatagttactattaagtgcgcccttatcagttcataatttttcagttttgatgtcaaaatctgtatagctataaactgggtgttatacttgtcaaccttggaccatctacctgtggtcactgctctatattctgaccatacatttgaagcatcacgattggaaaatgtcaccttcagcctcgcttttagccattgttttctaatttggttgtgtaccggtatcttgagtgttatctagttgtcttacttgatgtattgtatgctttctttgatttcaaagtcagctcttggtggcaaagaacaattatcaattccctttgc

SEQ ID NO: 26889 - DNA, 901 bp, Oryza sativa
  ref <308>: DATABASE ACCESSION NUMBER: AK102331
  ref <309>: DATABASE ENTRY DATE: 2002-08-28
gtgaaaagagagagcagcagcgagagacgaacaaaaaacagaatccatcgccataatcgaaggttcgctcttgcttccaccccgcaatccacatggagaacgaattccaggatggtaagacggaggtgatagaagcatggtacatggatgatagcgaagaggaccagaggcttcctcatcaccgcgaacccaaagaattcattcatgttgataagcttacagaactaggagtaatcagctggcgcctaaatcctgataactgggagaattgcgagaacctgaagagaatccgcgaagccagaggttactcttatgtggacatttgtgatgtgtgcccagagaagctgccaaattatgaaactaagatcaagagtttctttgaagaacacctgcataccgatgaagaaatacgctattgtcttgaagggagtggatactttgatgtgagagaccaaaatgatcagtggattcgtatagcactgaagaaaggaggcatgattgttctgcctgcagggatgtaccaccgctttacgttggacaccgacaactatatcaaggcaatgcgactgtttgttggcgatcctgtttggacaccctacaaccgtccccatgaccatcttcctgcaagaaaggagtttttggctaaacttctcaagtcagaaggtgaaaatcaagcagttgaaggcttctgagggttttgttgggctcctgcactgcggttctatattcaacctgaataagatgtgctatagcaatgtaaatttagcacagtggctatggtcgccactcaccaacttgatgtgaaagatttaatgatttttgttaattcttatgtatcaatcggcatatagcatttccgaaatgtgttttcaataaacagaaagtaagagtcatgaagctg

SEQ ID NO: 26890 - DNA, 2117 bp, Oryza sativa
  ref <308>: DATABASE ACCESSION NUMBER: AK102332
  ref <309>: DATABASE ENTRY DATE: 2002-08-28
gactcctcgtatcctgttctttgcttgcctcccggtccccctccccgccgcctcctcctcttccctcgccgcgaaaaaggggggaaaataaaaataaaatttcacggcttcatctcctcgtcgtcctcctcctcactgatctccccccccccccggattcggtgctcgcctggcgattccttgcgagatgttgatcccatggggcggagtcgggtgctgcctcagcgccgcggcgctgtatctcctcgggaggagcagcggcagggatgcggaggtgctgcgatcggtggcgagggccggaagcacgaaggatttggctgctatattggacactgcaagtaaggtcctgccacttgtagtggcagtctctggacgggttggttcagatacaccacttatctgccaacaaagtggcatgagaggtgtaatagtagaggaaacggcagaacaacacttcctaaagcacaacgatgctggatcatggattcaagattccgctgtgatgctttctgttagcaaagaagttccatggtacctggatgatggtaccggccgtgtttttgttgttggagctcgtggtgcagctgggttagttttaactgttgctagcgaagtttttgaggagtcagggcggacacttgtgcgtggaaccctagactatttacaagggctgaagatgcttggagtcaagagaactgaaagggttcttccaactggaacttcattgactgttgttggtgaggccattaaagatgatgttggaactattcgaattcagcgaccacacaaaggaccattttatgtatccccgaaaagcatcgatcaacttatcatgaatcttgggaaatgggccaagttataccagcttgcttccatgggatttgcagcatttggtgtctttcttcttgcaaagcgtgcactacagcattttctcgaaagaaaacgacgacatgaattacagaagaggtgtgtgctaaccaaccacttatttggatttagacggacatgttactcccatttacattcttcagtggtttgctcactttgctagacatggtcagaatgagatgctttggaacatcttgtaatgttcaatagcattgtgatctctgtatcttttaaattgtggaacctgcatgtgcttccagcagctaatatatatcattaggacaaaactgaaatggaagacattggagatgctgtcttgaaaaaagttttaccctgggagtaattttatatcgggggtgaaaatcacaaactaacattgtagcatacagatggacactaggatatgttttgtaaccattgacgattttgctaatgcaagatactgaaaatgttgttacaatgcattattttttccatacagggttcatgctgctgctgcacaaagacaagctagagaagctgaagggggcaatggtacatcagatgtagattctaacaataaaaaggatcaattggtcttggacatatgtgtcatatgccttgaacaggaatataatgctgtttttgtgccgtgtggccacatgtgctgctgtatgaactgctcttctcatttgacgaattgtccactttgccggagaagaattgaccaagctgtgagaactttccgccattgacagcacttcgatgcaaaatctggtaccgcatctttcagatccacttgattcttggaatgtggactgctgtcacctgattcttggaatgtgtgtcacctgcgtactccctctgtccagaaaaactcaaccgaggggatgacccctcctagtacaacgaatctggacagaatccaagaggggatgtgacccctcctaggttgagttctttcgggatggaaggagtatgacatttgatctgcagtattgcgccgaagcaacgcaggtaaaaactcataataggatatactttctggccatcatgtcgattgctgttcttgcctgtagtgtacaatcgcgtccagaatgtcttgtgtaaatgtgcattggttttcacagcacgcttacttgttagtaacatggatgttaatatttctttgtgcccagtgtatcctgcctattaggggtatgaacttgttttttcttttttcttatgaatggaatggttcttgtgtactc

SEQ ID NO: 26891 - DNA, 1632 bp, Oryza sativa
  ref <308>: DATABASE ACCESSION NUMBER: AK102333
  ref <309>: DATABASE ENTRY DATE: 2002-08-28
ttggctgcagcacagcaggaagaggaatcattgcacttagctgaaacaaacaagcaaaaggctgatcagcttcgcaaggagattgctacaattcaagagtctcttacgcatgtgaaggcagccactgaacaagcacatgaagaagaggctcaaatccttgctgagaaagatgttactaggaaaacatacaaacaagctttggaagaagccgagaagaaattatcctctttgaaaaaggattttgatcctgctgtttataaaagcctcaaagaaaagctagatgagaccaatttggagatttcatctatgcagaaaaagattgaagatgctcgagctcaagatttggagtctattgctactgtcagcacagagttggatgatgctaaggaaatgttacagaaagtggcagaggaggaaagttctcttcggagtttagtagaatcacttaaacaagagttagaagctgttaaggaggagtatgatcaattgaaacagaaggatacagaaactgaatccatagttggagacctacatgtgaagcttcagaaatgcaaatctgagcttgaggcagccgtagctgctgaatcaaaagcaacgtcagcttctgatgacttgatgttggccctccaacagttgtcttccgagtcaaaaaatgccctgcaggaagctgaagtaatgcaaaagagtgctgcagatttaagggatgaagctgaagctgcacgagtagcattagcagaagctgaacaaaagttgcaatctgctttaaaagaagcagaagaggcaaaatcagctgaagcaaaggcccttgatcagatcaagcaactatcagaaagagcaagcgctgctcgggcctcaacatctgaatcaggtgcgaagataacaatatcaaaagaagagtttgaatctcttagccgaaaggtggaggagtcagagaaattgagtgagatgaaagttgctgccgctatggctcaagtggaggctgtcagagccagtgagaatgaggcgattaagaaattggaggcggctcggaaagagatggaagacatggaattggcaacagaggaagcactaaagagggcagagatggctgaagcagcaaagagagctgtagaaggtgagctcaggaggtggcgcgagaaggagcagaagaaagctgctgaagctcagcctgctccagaagcgcaagcacatggaactgcatcttcccctgtacagaaagcttctgctggaaaagccaatgagaagaatgatggacctcacaagaacagcagaacactattgaaaaagagctttatgctaccaaatattacaagcatgttccataagaagaagaatcatgccgacggcagttctccttcacatcttcctggggacaaatctgtataatctatctgaagctcacgtctgaatgatgtgattccaaacttggaatcatggctttatgtatgatattatatttgtagttgcttgtaatatataatgttatcctggtctatatctatgacttgcctgttcctgactatttgggctcctgtgataagtttttttcttttttgtacctctgaaattcgctgtggttatattgatctgagcagtttgtctgctatcaacagaaataaccacgttttattc

SEQ ID NO: 26892 - DNA, 1245 bp, Oryza sativa
  ref <308>: DATABASE ACCESSION NUMBER: AK102334
  ref <309>: DATABASE ENTRY DATE: 2002-08-28
gacccctcctcctccactcgccccgcttcgccgccgcactgaccacgccgccgccgccgccgctgccaccggcgcgccgcctcgtcgccgccgctgcaggaggagacctatcgctcgcgatgtcggcggcaaccggggagtacccggtcccggtctcccctccctacccggcggcgtccaaggacgtggagctccggcgcgccatgacggcctcggcgcgctccgccgcctactcctccgcgcccgtcgtgttcgaggacgagtggctcgccgtcgtcgacaagcccgcgggagtctactgcgacgccctcctctccgctctcccttgctccgctgccacattaggggatgaagcaactaaacctaaccttcacctcgccaacaggctagaccgtgataccagtgggctcatggttattaccaaatgcaataaggttgctgggaagctagtgaaggcgtttacagagcacaaagttaagaaaacatatctagctctttgcataggttacccaccagcatgggagaagattaagatatgctctggccatggtcgatcaaaacatggtgcttggcgtgtgtacgctatgtctgatgttggacgatcactaccagggggttccgttgtacgcgacatgagtacacgatttgaagttctgggaatcaatggcaagggacagtttagagaaccatctaattttgaagttgatgaaacagagtctattaccgtacaagagaaggcagctgacctgacttcagatggtgatgagaagaacagcataattttggttagagcctatcctcagagtggacgaacacatcagattcgtctgcactgtcagtatcttgggttccctatcagaggtgatgtgaagtacagcggagttattgagtggaatggtgtggattatgatggccatgcattgcatgctgagagcttgtcatttgtacacccagtcactggattgccagtcaccttccggtcacctctcccttcatgggcgaatgaatttatttcgacgatggcataagttctttcaacgttattatgaacttgtggatgcattgcctcccaattgatgctgattttttattttttaaccaagagcacatccctaaactgtcgaaagcaactcttggagctatcttcggggagaagtattggtcagtgcccagttgtcatataacaatctcctccagcaaaacagtgccttcttggtcgttgttcgtggatatcagtactttgtg

SEQ ID NO: 26893 - DNA, 1686 bp, Oryza sativa
  ref <308>: DATABASE ACCESSION NUMBER: AK102335
  ref <309>: DATABASE ENTRY DATE: 2002-08-28
gatacctccgcttgactagatacaaccacagccatgtcctccgccggccacgccgtcgaccagcagcgcaaatccaccacgatgaaggcgcacttcgtgctggtcccgatgatggcgcagggacacatgatccccatgaccggcatggcccgcctgctggccgagcatggcgcgcaggtcagctttgtcaccactccggtgaacgccgccaggatggcaggattcgtcaccgctgtggaggcggctggcctggcagtgcagctggtgaagctccccttcccggccaccgagtttgggttgccggacgggtgcgaaaacctggatatgatccagtccagggatctcagccgaaacttcatggaggcctgcggagcgctccgggagccgctcacggcgaggctccgtcagctatgcccacctccaagctgcatcatatctgacatggtgcagtggtggaccggtgaaattgcaagggagctcggtatcccaaggctaacatttgatggcttctgtaccttcgcctcccttgccaggtatatcattttccgcgacaaactgttggacaatgtcgcagatgaggagatcgtcactttctcagggttccctatgctgcttgagttgccaaaggctagatgccctggaagcttgtgtgttccaggtatggaacaaattcgtgataagatgtatgaggaggagctgcaaagcgatggcaatgtaatgaacagcttccaggagctggagactctgtacatcgagtcctttgaacagataacaggtaagaaggtctggacaatcggcccaatgtgcctctgtgacagagacagcaacatgatggctgctagaggaaacaaggcatcagtggatgaggcaaagtgcttgcaatggcttgattcaaagaagcctggttcagtgatctttgtcagctttggcagcctcgccagcaccgcacctcagcagcttgttgagctgggactggggcttgaagcttccaaggagcctttcatctgggtgatcaaagcaggaaataagtttccagaagttgaggaatggcttgcagatgggttcgaggaacgcgttaaagacagaggcatgataataaggggctgggcaccacaggtgatgatcctatggcaccaggccattggagggttcatgacacactgtgggtggaactcaacaatagagggcatttgcgcgggcgtgcccatgatcacatggccacatttcgcagagcagtttttgaatgagaaatttgtggtgaatctgctgaaaattgggctggagattggagtgaaaggagtggcacaatggggaagtgaacataaagaagttagggtgacaaggaatgctgtggagacagcagtgtccacattgatgaatgatggagaagctgcacaggagatgaggatgagagcaaaagacttgggtgtaaaggcaaggagggctttggaagagggaggttcttcctatgataacataagcctattgattcaagaaatgggaaacaagcaaaatgcatctggttgatacagatgggaataagcattttttttaatcatgatgagcatgaagtggaggacctatcatacttatatcttcataaagtatggaagatgtccacatttggttattcaactatggatttggcctgaatttcatccctctaactataaaggattgtgtttt

SEQ ID NO: 26894 - DNA, 3529 bp, Oryza sativa
  ref <308>: DATABASE ACCESSION NUMBER: AK102336
  ref <309>: DATABASE ENTRY DATE: 2002-08-28
ggtccatcgaaatccttccgccgcgtttcaaatttctttctctcctccgccctaaaaccctacccacccccacccccacccccacccccacccgccggcagatccagcgaactcgccggagatcgcatcggcggcggcggcgagggtagggttctggtggtggtgctagtgtgtgtgggtgtgggaggaggggctccccgcgccgcgcgtgtgggggggacatatggaggcgcaggccacggcggcggtgaaggaggcgctggcggcgctgtaccaccaccccgacgacgccacgcgcaccgccgccgaccggtggctgcagcagttccagcacacgctcgacgcgtggcaggtagctgacagcttacttcatgatgaaagtagtaatatggagactcaaatcttctgctctcaaaccctcagaagcaaggtacaaagggactttgaagaattaccttcagaagctttccgtccgctacaagattctctatatgcattgctgaaaaaatttagtaaagggccacaaaaagttagaacacagatttgcattgcaatggctgctcttgcggtgcatgtacctgtagaggactggggaggtggtgggattgtgaattggctaagtgatgaaatgaactctcaacaagactttatcccaagcttccttgagctgctaactgttttgccacaggaatgttctagtcataaaatagcagctcgtcctgaaaggcgccgacagtttgagaatgaccttcgttcatcagccgaagttgcacttagtctattgactgcttgcttgggtattgatcaactgaaagaacaggttctggagggttttgcttcttggcttcgtttttgtcatggaatctccgcatctaatcttgcttcgcttcctttggtctatacggcactttcttcgttgaactctgaccaatttttggaggcagctgtaaatgttacttccgaattgatacattttacggtatctcgagaatctaatggcatcaccgaacagcttccactgattcaagttctcattccttatgttatgggtcttaaggagcaactcaaagattcatcgaaggatgaagaagatgtaaaagctattgcccgtttgttggcagacatgggtgattcttatgttgagttgattgcagcaggttctgatgatgccatgcagatagtgaatgcattactggaagttacttctcattcagaatttgacatttcctccatgacatttaatttctggcatcatcttatgcgtaacctgaccgataggggttcgtacgcatcatatggatctgaggtctcaatcaacactgagaggaatagaagattgcagctatttcgtcaaccttttgaaattcttgtttctctggtaagtttccgagttgaatatcctgagctctaccacaccttttcggaggaagaccaaagggatttcagacattccagatatgcggttagtgatgtattacttgacgcaactgatgttcttggaggtgatccgacgctgaaaatacttttcacgaagctgattcaggcatgtggaaatggacagaaccaaaaatggcagcctgtcgaggctgcgctgttctgtatacaagccattgctaagtcagtctcagttgaagagaatgaaatactaccacaggtcatgtcactgcttcccagctttcctcatcaagaacagttgctgcaaacagtttgttcactcgttggagcattttcaaaatggattgaagccgcaccatctgaactgttgatactaccacctctggttgatattctcaacaagggtatgagtacatcagaggaaacagctgcagctgcttctgtggcattcaagtatatatgtgaagactgtaggagaaagttctctggttcgttggatggccttttccagatttaccaaattgcattaagtggagttggtggttacaaagtttcttcagaggactcattgcatttggttgaagccttaagtgtggttatcacgactctcccaccagaccatgctcaaagagcattggagttaatctgccaaccagtaattaatcccttgcaggaaataatccagcaaggagatacagtgcttcagcaagttcctgttcggcaattaaccttgcatatagaccgattatcatgcatttttagcaatgtgaaacttccacaagtagttgctgacgctgtcaatagatattggccaacattgaaaagtatttttgatcaacgggcatgggatacacggaccatggagtcactatgtcgttcttgcaaatttgctgtaaggacatgcgggaggttcatgggattcaccattggtgcaatgcttgaagaaatccaaactctgtatcagcaacacaatcaggcttgcttcctttacttgtcgagtgaagttattaagatatttgggtccgatccagcatgtgcaaactatcttgcaagtctgattcaggcactttttggccatacaatacagctccttcggactattcaggattttacagctagaccggatatagctgatgattgcttcctgctagcatcaagatgtattcgttactgtccagatttatttgtacctacagagatgtttccaagattggttgactgtgcaatggttggtataactatacagcacagggaggcatgcaagtctatattatcttttctatctgatgtatttgatcttgcaaaatcacctgagggggaaaagtaccgagaattaataaatacagttatacttcagcggggtgcagtacttactagaataatggttgcttccttaacaggagctctgccatctagtcgcttggaagaggtctcgtatgttctggtgtcccttagcagatcatttggtgggaacatgttgagttgggcaagggaatgtattacccttataccaccacaagccttgacagattcagaacgttcaagattcttgaatattatatctgatgcatcatcaggatctagtcttggttccataacagatagatttgcagaaatctcagaagtttgtagaaggaacaaaactgtgcaagacatagttcaaggtgctttgcggccacatgatttatccttcacggttgcccccccgccattgtgagaacaggacgtttatacaagaccaactgaaagtccatggcggttcatctttagtcagtgttggtttatgcctccacagcttctttggatctttttttctacttcatacaggtttgagttgcggcaccatactgttcagatttgttcagaggatagataggttagtggtggtcactgtaattcttttgtatttcgtcgtcactgtacatgttccatgcattgtgtatctgggaggaaagttgtgttgtattatgtcaaaaacgaggtgggtatacatcactgggggagatcacacggatggtgatctgcctttgggcctgatttttcaacggccggccagcttctatcaatttagatggccttcaatttttttattgttatgaagacctcttcatttaaaaggatcccttttatgttt

SEQ ID NO: 26895 - DNA, 2375 bp, Oryza sativa
  ref <308>: DATABASE ACCESSION NUMBER: AK102337
  ref <309>: DATABASE ENTRY DATE: 2002-08-28
gaaacgctcctcgccgtcaaatctcccctctttctcgccgccggcgagcagcagaagcagcggcaccagcaccaccggctgtaggcgcgatcttgtaggctcatcggagatggggaagaagcagcatagcaaggaccggatgttcataacgcggacggagtgggcgacggagtggggcggcgccaagcagaaggaggccggcacgcccttcaagcgccttcccttctactgctgcgcgcttacgtttttaccatttgaggatccagtgtgcacagcagatggaagcgtctttgatttgatgagcataattccatacattaagaagttcgggaagcacccagtaacaggaacaccactcaagcaggaagatctaatgcctttaacattccacaagaactcagatggagagttccagtgccctgttttgaataaagtttttacagaattcacgcatatagttgctgtaaagactactgggaacgtcttctgttatgaggtggggtttggcaatccaagaactcaacatcaagccaaagaattggagagaattgctaactgatgagccctttacacgaaatgacttgataacaattcagaatccaaatgcggttgatagcaagatcctaggtgaatttgaccatgtcaagaaaggcctcaaacttgaagatgaagagttgcaacgaatgaaaaatgatccaacctacaacataaatatttctggtgatcttaagcaaatgattaaggaacttggaactgaaaagggaaagttagcttttttgcatggtgggggagggcagaaagctcaaaaggaaagagctgctgcacttgctgctatattggcaaaaaaggagaaggatgactcaaaatctggcaaagaacctaaacctcatcagcctttcagtattgtagatgctgcttctgcttctgttcatggcagaagtgcagccgcagcaaaggctgctactgctgagaaaacagctgctagaatagcaatgcacatggcaggagatcgagctcctgtaaatgctaaactggttaaaagcagttacaccacaggagcagcttcacgttctttcacatcaactgcctatgatcctgtcaccaaaaatgaacttgagtatgttaaggttgaaaagaatccaaaaaagaagggatatgttcagttgcataccacccatggtgatttgaatttggagcttcattgtgatataacacctcggacatgtgaaaatttcctcacacattgtgaaaatggttactataatggtcttatcttccatcgtagtatcaaaaatttcatgattcaaggaggtgatccaactggcacaggaagtggaggggagtccatatggggtaaacctttcaaggatgaactgaattcaaaacttatacattcaggaagaggtgttgtcagcatggctaattctgggcctcataccaatgggtcccaatttttcatcttgtacaagtccgcaccacatttaaatttcaagcatacggtatttggcatggtggtcggtggcttgaccactctttcggctatggaaaaggttcctgttgatgatgacgatcgaccattggaggaaataaagatattaaaagtaagtgtatttgtgaacccttacacggaaccagatgaagaagaagaagaaaaggcaaaggaagaggagaagaaaaaggatgaggattatgataaggtgggatcatggtatagcaatccaggcactggcgttgctggttcaactagctctggtggtggcgttggcaagtacctaaaagctcggacagctggctttgctgatgtggttgcagatgattcaaacaagaaaagaaaagcgagtgtgtctaatgtagaatttaaggatttctctgggtggtagattcctgatgaacctccccttctctcagaagaaatggctagtggaaacttcggtagcagcactgtggcatttcttcaatcttctgctatggatttaaactaagatgctcaaggtccacaattaagattctctgtaagcagatccgagttgagtaacatgatccactctgggtgggtgttttgcggcaaaagagttgcacactgagctataagagggatgcttgggacttaggaaatttgactggttcaataactggaaattcatgcttccatcagtctgtgtctgaattattacaaataaaacttgagagggccgagccgccgaggggatcttaactttccctcgttgattcgaaaagccttttactgccacaatccgggactgctgatattgttatggcaagagttatgctcaatctggaactgttgatattgttggttcattgcatgtttataccgataaatttgtatgccaataatcactgaaatcaacttg

SEQ ID NO: 26896 - DNA, 2550 bp, Oryza sativa
  ref <308>: DATABASE ACCESSION NUMBER: AK102338
  ref <309>: DATABASE ENTRY DATE: 2002-08-28
gtaagggaagacacgggacacggaagaggggagagagcgagagcgagatagagttcgagttctacgcccaaaaccctagcaagctcccccgccccgccccgcgtctccagtaccttccagaagcttccaaccccccaccccccaccaccaggtgagtggatctcccatttccccccctctccccgcgagctcgccccgggcgggggatcctagtcttgacccgtgtgcgtgtgtgattcattccgccgcaggaagagcgtgcttggatcgcgcgggggaggcaacgctggcggcgcgcaggtgatggcggatccgcctggcggtgggggatctagcgcttgcgtctgtgagcggagggaggcggaggcggtggtggtggtggtggtgccggagctggggagaagaggaggagagcagcggaggggaggatgctgagcgtggtgcgggtgcacctgccctcggagatcccgatcgtgggctgcgagatcacgccctacgtgctgctgcggctgcccaccggcgtcgtctccaccgacgatgtcccggaggccgcccctgcggatggctacttcatgcggtacagatggtaccgtatacaaagtgatcgaaaagtcgcaatctgcagtgtacatccaatggaacaagcaacaattcagtgccttggttgcgtcaagtcaaaaatacctgttgctaagagctaccattgttctgctaagtgcttctctgatgcatggcagcaccatagggtcttgcatgagcgagctagtagtgcattaaacgaaaatggagctgaagaagaggagctatttggcagatttggtagcactggttctggggttcttagtactactggttctggatcgatgtcaaatcttggacagagtcctggtttgaataatggccccgtgcctttatatccttcaggcactgataagaactcgggtgaaacttggtatgaagtggggcgcacacggacatatacaccaactgctgatgatattggacatgttctaagatttgaatgcgtgtctgtggatgctgaaaaaaaggtacctgttggacctccaacttcaattatgacatcccgtgtgattccagcaccaactccaactccacgtcgccttatccaagtgagtggagatgttttgagtcacttagatttggacagccaaacatctttcgggacattctcagtgctgtcctacaatattcttgctgatgcatatgctacaagtgacgcgtatagctactgcccaacatgggcactttcttggacatacagaagacagaacttgatgcgtgagattattggttatcatgctgatatcatctgtcttcaggaggtgcaactgaaccacttcgaagattttttttcacccgagcttgataaacatggatatcaggcactttacaagaaaaggacaacagaggtatatactggagctcctcatgccatcgatggctgtgccacctttttccgtagagacaaattttcacacgttaaaaaatatgaggttgagttcaataaggctgcacaatcattgacagacgcaattattccctctacccaaagaagagttgctttgagtcgattgattaaggataatgttgcactgattgcggttttagaagctaaattcggcaaccatggaactgacaatcctggcaaaaggcagcttctttgtgtggcaaatacacacgtaaatgtccatcaagacctcaaagatgtgaagctgtgggaggttcaaactctcctaaaagggttggaaaaaatagctgttagtgcggacattccaatgttggtctgtggggatttcaattcagtccctgggagttctccacatggacttcttgctatgggcaaagttgatcaattgcatccagatctggccatagatccccttggaattttacgccctgcgagcaagttaacccatcagcttcctctggtgagtgcatattcttcatttgcaagaatggtcggtgtcggctatgatttggagcaccagcggaggaggatggaccctgcaacaaatgaaccacttttcacaaactgcacacgagatttcactggaacggttgattacatattttacacagcggattcattgtcagtggagtcgttgttggaacttttggatgaggaaagtttaagaaaagacacggcccttccttctcctgaatggtcttcggatcatatagcactcttggcagaattccggtgcaagcctagaatcagacggtgacaccttaggtcgcgaatagatggttaacttcagcacccatgcggtggaacattcttccatggtgtgtgggacttgaggagggatggacgaaagcggatcctcggggaaggaccaccagcaccagcaggcttagggtagtggcctcatgaaagggaggcttgtaatgttgattacctcttacatttccaactcatgatgtttttaagcggccccattgtaatatcactttctacagaaggaaagatctcctgagagagagacatttttatgacagattcagatgccatcatggctaggccattcc

SEQ ID NO: 26897 - DNA, 2795 bp, Oryza sativa
  ref <308>: DATABASE ACCESSION NUMBER: AK102339
  ref <309>: DATABASE ENTRY DATE: 2002-08-28
gagatgtgtccagatccctatcctctttatctgaaaaaagctattatccaacatggtcagctgttcaaggagtatggattatatatctgaccgtgacttacagagttgcaacagggcccaatacttagtagtacatgctagtttctactaatcagtcaaataggcctcaatatggattagttacatttcataatctgcaagaaattaatttacttagtacattgtattaaacataggcaattaatgtcctcaatatcaaagaattgtatttcaggccaacatatttttgctgtgtttgtgtaaatttgcagtaacatgaatatagtttataaattaactgtcatctacatcttcttcagtttggatgtcactttcatcatctgtatctgtatactcagcgccatcactttcagaatcttcctcttcttcttcttctcttcaaacagatcatcttcagaatgtgttactggttctgcttcaatgggttcacattcgactccatctttactgagaaccgtagggaagtcaccatcatcaattgtagtgtaattcaatgcagccgtgatatgctcattctcttggcatgcttcagaactagacttatttgataaagttggatcattttcttcttcttcttctgtaggaggaaagtcatacaaatcacgtggcttcgtcttgactacaacaaaccatttagggtctctagtatctttgacataatatacttgctcagcttgtgttgccaaaatatatggctcatcaattggcactgtacgggaagtattaattaagtatttgttaccaaggagtggcctgccaacagtaccaaatatctgaaattttgtactgctgttgtcactctgcacgtcctcgattcgacttggtcgattgattcttgtttcaactccttgaaggattcttgtttgatccttcagggcgagctttgttttttacaaaagacttcaaccttcgcaaaaacctttcaatgggatacatccaccgatactggacaggtccaccagcaatagcttcctgggctaaatggattggtagatgcaacattacatcaaagaatgaaggggggaaaatcatctctaacttacagagggtaacagcaattgatgatgcaagcttcttgagaatttcagtatctaatttcttggaacaaatttctctaaaaaagctacatagctcaattatagcctcacaaacatcagcaggcagaactccacgaatagaaaatggaagcatgcaggacgaaataagatcttcccatcaccagttggaggtgcatgaagttcaggtcgtattttcatgagttccaaatcaaaccgggatttaatattgtcctttttcttcccatccagatttaacaaggtcaaaatggtttcccaagttcgtccatccgtgaaccagatggagacttcggatgatgctgctcgacaagtcataaccaatactaggaatgagggacggatgggaccaaccggaaacacaggtctcaaacgtaggaaaggtaggggtctcaccattaatggaacacttgcaaaactgagagcaaggggtgtgccactagacattcaatttgctgcacagtttggaaaagtctatggtaggcacgcaagtgtctttaaaagtgaggtcactgtctgtgtgcgacaagaggtcccccttaaggtgaagaagtggaaagtcattgaaaaagcttttcctggaaccatgtcatcaatttggaatttattgaaggcaaaattccctgagatctcaatggcagactaccaatgtgtaatgacacaagttgagcgaaagtacaatgtaagacgccacaaactgtacaagacctattgcacaacaaaaacagtgtcctagtcatgttgcgccagaggactggcagtggttgattgataacttatggagtgatgagcaattccagaaacggagcaaacataattccattaacagatcaaagcaagagatgaaatcacatgttggaacaaagtctatagtgcaaatagcacatgaactgagaaacctagtgacaggtgaatggcctagtgctatagatgtttggaaggcaacttatttgaagaatggaacatggtccgttcctaatggcgaagaaattctgaacaatctgcagacagtagctgaaacaaaccaggaaaggattgcagctgctcaaatcccaatggttgaacactttgcattagtccttggcagaaagccaaaccactcgcatggagttggtattagtgcaatcaatgagggagctcaagagaggtacagagttaatgcacaagcagaagctgcacaacagcaagccaatgaagcacatcaacaagctgctgctttgctagaagaagttcaaaaattgacagtagaaaacttgcaattaaagggcgagttgcagtctcagcgtgaagagttgaattctcagaaaagaaccgtagaggaacaaagtggtcacatggagtgtttgttggcccagaaacttgaggaaagaatgaaagcaatgtgggcacgcatgggtggcactggtggtgcttcatcttcaagtgtcccaaacaattaagaagttccaagttgacaaagactggcgtcgtggagttgctacaaagttctgtccatctaggcgagcatcctagagtccgtgtcccaagtttcatttgttgcttaggtgttcagttatcaatttagttatggtcttagttaaaatgctctttgtatgagcactttgttatcattcattaataaaggatagtttcctctagtgtgaggaacccttctgtcacacc

SEQ ID NO: 26898 - DNA, 1869 bp, Oryza sativa
  ref <308>: DATABASE ACCESSION NUMBER: AK102340
  ref <309>: DATABASE ENTRY DATE: 2002-08-28
ttgggcacggccatgagcactagctgtagcggtgcccttcgcgcagccaccaccaaagcgctgctactcctcgtcgtcgccgtcttcgtagtctcgctctcgcgtccatttccgtgcgcggcggcggcgcgcgacagtctactccggggcgcctccatcgccgtcgaggaccacgccaccgacgtcctgctctccccggacggcaccttcgcctgcggcttctacgtcgtctcgcccaccgtcttcaccttctccgtctggttcgcgcgcgccgccgaccgcgccgtcgtctggtccgccaaccgcggccgccccgtccacagcaagcgctcccgtctcaaactcaacggccgccgccgcgcgctcgtcctcaccgactacgacggcgaggtggtctggaactccaccgtcagcgccaacgccaccgccaccgccacagctgcgcgcgctcggctgcacgattccggcaacctcgccgtcgaggacgcgagcgggaacgtcctatggcagagcttcgaccaccccaccgacacactactgcctacgcagcgcatcgccgccggcgaggcgatggtctcggcagacaagctcctcgccgcgggcttctacagcttccgcttcagcgactacgccatgctgtcgctggtgtacgacaaccatgagatgtccagcatctactggcccaacccctactacagctactggcagaacagtcgcaagatctacaacttcacccgggaagctttcttcgacgcctctggccatttctcgtccagcgacaacgccaccttcgacgcctccgatctggccaagaatgtcgccgttaggaggaggctgacgctggacacagatggtaacctcaggctgtacagccttgacgaggtcaccgggacatggtcggtgtcgtggatggcgttcagcaacccgtgcatcatccacggtgtgtgcggcgccaacgccgtgtgcctctactcgccggcgccggtgtgcgtctgcgcgccagggtacgggcgcgccgaaccgagcgactggagcagaggctgccggccgacgttcaactccagtgacgacggcggccagccgcgggcgatgaagatggtgccgctgccgcacaccgacttctggggcttcgacatcaacagcagcgagaacctgtcgctggacgagtgctcgacacggtgcatgagcgagccgtcgtgcgtggttttccagtacaagcagggcaaaggtgagtgctacccaaaaagcctcatgttcaatggcagaacgttccccggcctgcctgggacggcctatctcaaggtcccggctgatcttgacatgctagaaatacacatccaccaatggcaagcagacagcgatggtcacggcattgccgccattcaggaagacatcgtcggatgcggtggcatgagctcaccggagttcttgctcaatgtctcgaatgcgtcatcgagcaaaagtaatcagggcaagtcgatatggttctacttctacggatttctgactgcattttttgtcattgaagtgtttgtgatagcattcggttgctggctcttttccaacaagggagtttttaagccatgtcaggtttcagcactaggtgaagggtacaggatggttaccaaccattttcgcacatatagctacgcagagctacagaagggaactagaaagtttcagagtgagatcggccgtggtgggtcaaggtgctacaagatgtgaagcaaagtgaggatgtgttccaggctgagttgagtgttattggtagaatttatcatatgaatcttgttagaatgtggggtttttgcttagaaggaatacataggattttagtctatgaatacattgagaatggatcattggccg

SEQ ID NO: 26899 - DNA, 1126 bp, Oryza sativa
  ref <308>: DATABASE ACCESSION NUMBER: AK102341
  ref <309>: DATABASE ENTRY DATE: 2002-08-28
gactctactctcctactagtcgtctactactcggccaggtgaggtgcccaaccaccgccgtggtagcgagcgcgcgacatggcggcggcggaggtgaggcaccggacggtggaggtggcaagcggggtgcgcctgcacgtggcggaggcgggcccggaggacgggcccgccgtgctgctcgtccacggcttcccggagctctggtactcgtggcgccaccagatgcgcgccctcgccgcgcgggggttccgcgccgtggcgcccgacctccgcggctacggcgactccgacgccccgccgggccgggactcctacaccgtgctccacctcgtgggcgacctcgtcgcgctcatcgccgacgtcggccagccccgggtgttcgtggcggcgcacgactggggcgccgccgtggcgtggcaactgtgcctgctccgccccgacctcgtcacggcgttcgtcgccctcagcgtcgagtaccacccgcggaaccccacgaggagccccgtacaaaccctcagggccgtgtgcggggacggccactacatctgcttcttccagaaacctggagtggccgaagctgaatttggtagaggtgatataaagtgtctcttgaagaaattctatggaatgcgcaaggcagcacctctgattatacccccaggcaagactttatttgactcaattgattcagatggtacttgccctgcatggctgtcagaagaagacatttcctactatgccgagaaatttgagaagactggatttactggaggattgaactactacagatgcatagacttgaactgggagctgactgcaccatggactggagttccaataaaagttccgacaaaattcatcgttggagatcaggaccttacgtacaacattccaggtgtaaaagattacatccacaagggtggtctaaaggcatgtgtgccaaatctcgaagatgtggttatcatggagggtgttgcccatttcatcaaccaggagaagcctgatgaggtctccgaccatatttgcgggttctttagcaagttctgatatgtgcaaaatctcttggagcctgcttgctaattgtactgtaaaaactagaaccattatgccagtactgatatcttcc

SEQ ID NO: 26900 - DNA, 1876 bp, Oryza sativa
  ref <308>: DATABASE ACCESSION NUMBER: AK102342
  ref <309>: DATABASE ENTRY DATE: 2002-08-28
gggggctggttgctcgtgctgcccccgagatctaaccaaaacccgcgtcccatctcacctcgcctcacctcaccatccgacgagcccccggatcaccggctccgacctgtcgccggcggagagcgccgcgggatccaggcgttgaggttggggagcggggtgtgtgtgccaggcgctcgggcgggggcgagcgggcggcgacgatgccggtggcggcgtcggccatctacttcctcaacctccgaggggacgtcctcatcaaccgcctctaccgcgacgatgtcgggggaaatatggttgatgcattcaggatgcacattatgcaaacaaaagaactgggtacatgccctgttcggcaaataggaggctgttcattcctttacatgaggattagtaatgtctatattgtgatcgtggttagcagcaatgctaatgttgcttgtgctttcaagtttgtcgtggaggcagtggctcttttcaagtcatactttggtggtgcttttgatgaagatgctatcagaaataactttgttttaatctatgagcttcttgatgaaattatggacttcggttaccctcaaaacctctcacctgaaatcttaaaattgtatataactcaagaaggagttcggtcgccattttcctccaagccttcagataagcctgttccgaatgccactctacaagttactggtgctgttggttggagaagagagggtcttatgtacaagaagaacgaggttttcttggacattgttgaaagtgtaaatcttcttatgtcttctaaagggagtgttctacgatgtgatgtgactgggaagattcttatgaagtgcttcctttctggaatgcctgatctgaaattgggattaaatgacaagatcgggcttgaaaaagaagctcaactcaagtccaggcctgcaaagagcggaaagaccattgagcttgatgatgtcacattccaccagtgtgtcaacttgacaagatttaactcagaaaagacagtcagctttgtgccgccagacggtgaatttgaattgatgaaatatcgaatcactgagggtgtaaatctcccattccgggttctaccaacgattaaggaattgggccgaacacgcatggagataaatgttaaagttaagagtgtttttggtgctaagatgtttgcacttggtgttgtcgtcaaagtccctgttccaaaacaaacagcaaagactagtttccaaaccacatctgggaaagccaaatataatgcttcaattgattccctagtgtggaagatcaggaagtttcctggacaaactgaggcaaccatgagtgccgaagttgagctgatttctacaatgggggaaaagaaatcatggaacaggccgccaattcagatggaattccaggttcctatgtttactgcttctgggttacgagttcggttccttaaggtgtgggagaagagcggttacaacaccgttgagtgggttcgctacatcacaagggctggatcatatgagataaggtgttagcgatgaagaaaaaagtcccaggtatttggcacggttatttcaaggattcgcggagctttctttctagtacggcgtcatgaatgatcataaagcatgtatattacatatgacaccactttttctttaagctattactttggcaaagggtagagcagagcagacaaattttcctgggttcttgtaatcgttttgacacgggatatctagtatcccctgagtcttgtttgtgtggtagggcatattttcatttgtatatgagaagatggcggtagcgtttgttcttgttgatcaatatacatatactcattggcagtttgtattgctttcttattaaattgatgggtgaattcacttgc

SEQ ID NO: 26901 - DNA, 2402 bp, Oryza sativa
  ref <308>: DATABASE ACCESSION NUMBER: AK102343
  ref <309>: DATABASE ENTRY DATE: 2002-08-28
gacatgcgcacacacccaatcaaatgctcctcctccgccgcctcctctcgctgagctgagctgagctgtgaaatagtgccaccgagtgagcgctgagctgagctcgaagcaagagaggaagaggaggaggagggaagagggggggcgaagatgattacggcggcggacttctaccacgtgatgacggcgatggtgccgttgtacgtggcgatgatactggcgtacgggtcggtgaagtggtggcgcatcttcacgccggaccagtgctccgggatcaaccgcttcgtggcgctcttcgccgtgccgctgctgtcgttccacttcatctccaccaacaacccgtacacgatgaacctccggttcatcgccgccgacacgctgcagaagctgatggtgctggccatgctcacggcgtggagccacctcagccgccgggggagcctcgagtggaccatcacgctcttctccctctccacgctgcccaacacgctcgtcatggggatccctttgctcaagggcatgtacggggagttctccggcagcctcatggtgcagatcgtcgtgctgcagtgcatcatctggtacacgctcatgctcttcatgttcgagtaccgcggcgcccggatgctcatcaccgagcagttcccggacaccgccgccaacatcgcctccatcgtcgtcgacccggacgtcgtgtcgctggacggcaggagggacgccatcgagacggagacggaggtgaaggaggacggcaggatacacgtcaccgtgcgccgctccaacgcgtctcgctcggacatctactcccgccgctccatgggcttctccagcaccacgccgcggccgagcaacctcaccaacgccgagatctactcgctgcagtcgtcgcggaacccgacgccgaggggttcaagcttcaaccacaccgacttctactccatggtgggccgcagctccaacttcggcgcggccgacgcgttcggcgtccgcaccggcgccacgccgcgcccgtccaactacgaggacgacgcgtccaagcccaagtacccgctcccggcgtcgaatgcggcgcccatggcgggccactacccggcgccgaacccggccgtgtcgtcggcgcccaagggcgccaagaaggcggccacgaacgggcaggccaagggcgaggacctccacatgttcgtctggagctccagcgcgtcgcccgtgtccgacgtcttcggcggcggcgcgccagactacaacgacgccgcggcagtcaagtccccccgcaaaatggatggagcgaaggacagggaggactacgtggagcgggacgatttcagcttcgggaacaggggcgtcatggacagggacgcggaggcaggggacgagaaggcggcggcggcggcgggcgccgaccccagcaaggccatggcggcgccgacggcgatgccgccgacgagcgtgatgacccgcctcatcctgatcatggtgtggcgcaagctcatccgcaacccgaacacctactccagcctcatcggcctcatctggtccctcgtctgcttcaggtggaacttcgagatgccggccatcgtcctgaaatccatctcgatcctgtcggacgcggggctcggcatggccatgttcagtctcggtctgttcatggcgctgcagccgcacatcatcgcgtgcgggaacaaggtggcgacgtacgccatggcggtgcggttcctggccgggccggccgtgatggcggcggcgtccttcgccgtcggactccgtggcacgctcctgcacgtcgccattgtccaggcagctctgccccagggcattgtccccttcgtcttcgccaaggagtacagcgtgcaccctagcattctcagcacagctgtcatctttggcatgctcatcgccttgcctatcaccctcgtctactacatcttgcttgggctgtaatcgagttgcatgcatgtaaattcctgctcctgacaaccagccatgttaagaagaggggagaagaagacagagctggtacactgtttgcaaagtcaggactctttgatttttcttttcttttctgtatttcttgaagtagaatttgggaggagggggattggaagggagtcaaacgagtcaaggggaggacaggatggtagctagcttagctaggacaatggtgagtcacaaaagagcaccaaaagcaagtacaagtacaaagcttggggggacacaggatccagttcaggtcacagaaacggttcggttttgggaggggattgtgggagttttggttggctgcgctgcgctgacccttgtaaaacggacgccgattctgacaagagatcgaccttgttttgttcgtgtcgtggtattgctgactactactttggaatgattaatctcctactactaattactcc

SEQ ID NO: 26902 - DNA, 2798 bp, Oryza sativa
  ref <308>: DATABASE ACCESSION NUMBER: AK102344
  ref <309>: DATABASE ENTRY DATE: 2002-08-28
gggctgatggcgccgcctcccgccggcgtggaggccgtctgcgccgccgtcatcaaatccacgctaacccaaccccacaaccaccaccacctgctcgcggcctcgccctccctcctcgccgccgtcctccaccgcctctccccgctcccctccaccgcgctcgccttcttccgctccctgcctccgccccacccgctcgacgcctccctcgccctcctccgcctcctcgccccccacccgcgccaccaccccaccgcccgctccctcctccgcgacctctccctccgccacccgctctcctccccgctcctcctcccttccctcctcgccgacccccacctccccagctggctcctcctcctcctctcccagtccgcccgcccgcacgacgccctccgcgtcttcgaccacatgcgcgcgcgcgaggtcgtccccgacgcgcatgcctcctccgcgctcctcaccgcgctcgcgaagtcccggatgacggccaccgcgcgcaaggtgttagaccaagtgacgcgggccagggttgccatgaacacccacgtgtacaacgccatgctgcacgtctgcttgaaggccggggacgccgcgctcgctgagtctctgatgacgcggatggacgccgccggtgtgccgctcgataggttctccttcaacaccgtcatcgcgctctactgcaggaagggcatgcagtacgaggccatgtgcgtacgggagcggatggagaatcagggtgtcaaggctgacgtcgtcacatggaactcattgatccatggcttgtgtaaggagcgcagggtgagggaggcgagtcagctgctgagagagatggcgatggcaggggtggcaccggaccatgtcacatacaccacgcttgttgatgggtactgtcgagcaggcgacttggaggaggcggtcaagctgcgaggggagatggaggcaatggggatgctaccaggtgtcgcgacatacaatgcgattctcaggaagctctgtgaagatggcaagatgaaggaggtcaatgtgttacttaatgagatggatgagaggaaggtgcaggctgatcatgtaacgtgcaacacgctgatcaacgcatactgcaagagaggggacatgacctcagcgctcaaggtgaaaagaaggatgatggagtcagggctacagttggatcagttcacttacaaggctctcgtccatggtttctgtaaggccaaggagctggatgaagccaaggaagccttgtttgagatgatgggtgcaggattttcacccaattatagtgtgttgtcatggattgtcgatggtttatgcaacaagaataatgcagttgcagttctagccattcctgatgaacttatgaaaagaggatttccaccagataaagcagtatataggtctctgatccgaaggctatgcaagaaagggtttattgatcttgctgggaatgtgttcaatgaaatgcaaggcaaaggtctagaagctgactgtcttgtgtatgctacacttgcgtgtgcatatctgactgctgggaagccagttgctgctttggatatcttgaatgagatggcgaagaagcagttgtacataacaccccagatttacaactgtatgtgtacctcttatgctgatgagaagggatcgcttaatatgctctgggcttcatgccattgagagaggcctaatcacaaagagcgtatacaaagtgatgcaccaagcaagaatgaaatcttcaaatcctgcagtctagaatgcgaggaggggaatgctcatatttcagggatgaacttttcagagactgtgaattgagagtgggctatagaaatagtcttgcactttggtcttttgatgtcgatgatgctcacaaatcaagctgcaaatttgcaggtgatggggtgcttcaattccaaaccaaacaatgccggtgcgatcagaagaagacatgggagggtagaagtggatgtttgcgcctggattatgagttcctgaggctcagaggagctgcgtcgaggacttggataattttcatggctactcgctactcatgagcactactcctgactaggcccaggaggcgcacgatcactcttcatggttcattcatggcacatctgctaaattgattatcaagaagaataatggcagaggtgatgaactaactgtctgaattcagtgttttttttttcgccgggaaggctgaaggagaccatccgagtatattaagaaggagtaaaagttacaagaaaaacaccacaactgaattcagtgcttgctggactgctgatcttctgcaggctttggaggattatttgcctctgctcttctcagcctagtcaaagatgataacctgatttccccttctttttaattggtctgaatgaaatccaggagatttgtgtcagtcgaggttgaattcttttacagggagcgagttggaagatagtacaattttgcatttatgaacgaagaggatgatgcagaggtccgcgtgcacctatattgttgcatgtggtgtaggacaataggagtgatactgtactgtgtttgatcatctatttgtcttgtgtaccgtcagtgcccagtgcttagaatgagatgctacctgttgtcttggacacgtgacggctatgctgcattcgtccgaagcaatttttgtgcgtcttcctaagacatgtattgagggataccatgctaatataaggtatctgagggtctggagcaatatgtaagcatatgagatacagataattagactctgaaactttgtgtttgtattccatgataagtttgctgctgcg

SEQ ID NO: 26903 - DNA, 3488 bp, Oryza sativa
  ref <308>: DATABASE ACCESSION NUMBER: AK102345
  ref <309>: DATABASE ENTRY DATE: 2002-08-28
ggagggcgatggcggaggaggacggcgaccggttcatcgagatggtgtcggcggggacgctgtacctctccggcgaatgggagcgcaagtactggagctgctccaggggcaaggatcggtacccctacccggtgggttatcacgccgtccgccacttctccgggatatcctacaccatgcaaattcaccaaggacccagaggccctcttttccaggtcacatccacccaaggagattcatccactgggcccaccccggatattgcctggaagaacttccacaaaaagaccgctcctaaagtcagagactggcagaggaaaaggagcttccctcagaagattgatggcgttgagcttttcgggtttaaaaatgcatctgttcagaggctgcttcgtgaacttatagttcgttcgactggagcagtgcagctaaacttgcctcatccagttacttctgatgctaattcacctttaagccgtaaggttgaagctgaaatttctgatggaaatgaagtttgcatggacaagacgggtggacctgctaaacgaagtatgaggccaagccaggaggaagggactgctaaaagggttcactaccagaatatttccacttcaactgataagtgccataatgagttggatataattgctgatgaaggttcaaacgaagatgccactggttcaagatgcacgtcttcttcgctggaagacatgccttgcaactcaacacatactttggttgacgacaatttaggtgaatttgttgcagattcacctgaacaagttgctttatcttctagttcttatttaagctctcaaaagtctgacctagaatcagctgagagagaagtagctaagtctatgatgtctattttgcttccccaagctattccctttctaaacaaaactcacagaaagaagaagaaggttaagcataaaaagagagaagaaactatttcaactacaactgctttagctgaaaatccatctgctgatggttgccgaggtgtagttgtgtctacaagtacctgtgaaggaataaatataaaaacttctcaaacatattcccatgggcaatctctttgtgaaatggttaaagactgctgtggtaatgacgatggcatgattgatgagccaggccttaaatcagatgacatgaaagttgttgcagatagttttgaggatgatgagcagggttggtgtgacaataaatctaaatccatgggtgctcgctgtcatgatgatgatgcgtgctctaaggaaagtttgccgtatggtaacagggaagatcatgatggccactctgagtgtcagatggggatagatgatggcacaaacacacctgatgtggtatatgatcatgaaaaaggtcaatatgttttatctgaagcgctccttgcctgtctggaggaagaatttggtgcgaaggataattcctgccctgcaaactacaatcaaatcgatgttgggcggagacaaggtgagcagcactttgaggaccctagaagtgggattaacgatgactcatcaatttcggttggtatgtcagataagagcaacttgaggagtggattaattgatggttatgcacaagcttctgctaagagctggacaggaaattcaaggcatggagagtctttaacaaatttgttgcagagtccagttcattctaacgcacataacaatagtgagaaaatgggtggtaaatttgatgatactgagtttgttgacaaatttgttgcttttgacaaatatgggatgaaaagagtaaacactgttacagtgtggcctgttgatgttagaacaaaaacaggtaaaagaaatcaccctcttgaggagcaaaaagaatgtcaaactggatgcagaaatggcaatgagaacgcaatggtttccatcggttgtgggagttatgtttgtggtcgtgtacctcctaaggatgaagacaatgcttgccatgagcatgctcctcctgacgtcaaccatttaaatggtccattatgtagacacaaagaaacatcgccaagggtgtcaaatcttcatctagatcttatgggatgctatctgcatccaatgcctgtcttgtctatcgtcctaaacaccaaaaataacagcagcttactgatctatgtactctgtggccttctagagagctgtgaaagattcctttatgtgtatactatcgtccctaaggatcagcaagagacagcaccttattttgttggctacactcctcttctattgtcctccttggagcggtcatgtacaggaaatctcccatttgaaaggtctgggttgcagttcacacctgatggccagtttctggtcctccttggcagtatcagaatgccttattgcaggaagcaaatcattgattgttcttgctccttgtgcaagttggatcagtgtggggataattatttgaaaattgtatctgtggatttgggttatgtttcactcttgaccaaactgatggcttatgggtcactgtcatgcattttaatctgtgaaccaaattacattgtaaccgttgaagatggaagaaacttgcatatctggatgatggctgctgggtggagaataatatctgaggagtatgtgattcctagttctggtaatgtgggtaattcaataatagagctcagaagaatgccaaaaagcagcactctcatcgttggtcatgatggcacaggaagctttagtttgtgggatatctccaagcgaacacttctggcaacttttacagctccaggaatcattgttttccagattcggccagtagtatcgtgtagtttgcaggaggatatcattcttgcttcggttagtgacatagagagaaggttaagagagattacagttactggtgtgtccagaaaagctgacaaggagtccattttgtcacctggaaaagatacagcaatttggattctgatttcgtctgcttcagtagcggagtatcaaagtgatcttcgagcaaaggaacataatgcacgatggaggctagctctgctggcaaataagactcttattatgggaactattttggatccaagggctactgcagtagatgtttgtggtaaccatggattcgctggaacacatggaggtctcttgtacgcatgggaattgtcttctgggagaaaacttgctggtacacaatgttttaacagtggacgagtctcgtgcgttgctgttgatgctaaatcaggtgtagtagcagtggccgacgatggatgccagctggtactttacagtcaaaataaggtgctgagcaatgcaagggcagaagggaacatgttcaggataaagtagccgtttggacattgtagttggaaagtaaggttggtgactgtatgcatatggcttgcaatttacagtggattgtacataaaatttttgttggtctcgtacatccatcatactatcaaatgtacatagctgatagaatctcgcgttgcatttcaatttgaaggcgcagatcgccttgcaacc

SEQ ID NO: 26904 - DNA, 2296 bp, Oryza sativa
  ref <308>: DATABASE ACCESSION NUMBER: AK102346
  ref <309>: DATABASE ENTRY DATE: 2002-08-28
gatgcgtagtaccccccgaatattcggacgagatgatcacatcatcacgcgtcccctagaaaaacccactccgccgccgccgtcgtcgcgtcgcacgcggcgccctaaaacagcagccgccgcgccggccgctcgccacattcacacgagcggggccggcctctctcacgagagcaaaccaacaaactagttcggcgagcgagctcggtcaatcgggataccgccaaagagtgcgtgcgagtggcaatggcgatgccgctgggtgggattctcctcctcttcctcgtgctcctcgccgccgccgcggcgggcggcggcggcggcgtgtgggcgttctcctcgtcgtcgtcgtctcgtcgtcgtattccaggatcggcgagcagccgctgtcgctgatcggcatccaccgcgcgacggtcggcatcgacgccgcggcttccgtgcaagcgtcgcctcggcttctcggtgtcaagggggaagatactgcctgggtaactgttgatttcgcagctccgcatgcgagtgacggcgattggatcggagtattctctccttcaaatttcaacgcgtccacatgccccggtccttctggatcagactcaggacctgttatatgctctgcaccaataaagtatcagcttgcaaattattcttcagattatggcaagacaggaaaaggcactctcaagtttcagttgatcaatcagaggcaggacttctcctttgcactgttcactggtggtctctcaaatccaaagcttatcgcagtatcaaataagatcgccttcgcaaacccgaaagctccggtttaccctcgtctagctcaaggcaaatcctggaatgagatgactgtcacatggactagtggttatgacatcaaagaggcatatccctttgttgaatggggcatgaaatggagccctcctacgcgcacagcagctggcaccgtcacttttgatcgcgaaagcttatgcggagaacctgcccgtactgttggttggagagatccaggtttcatacacacagcattcctgactgatttatggccaaataaagaatactattacaagattggacatatgctacctgatggaaaaattgtatggggcaaattttactccttcaaagcacctccttttcctgggcaaaagtcactgcagagggttgtcatttttggtgatatgggaaaggccgagagggatggaagcaacgagtacagcaactaccagcctggatcactgaacacaactgacacactgatcaaggaccttgacaacatcgacattgtatttcacatcggtgacattacctatgccaacgggtacatttcccagtgggatcagttcactcagcaagtcgagccgatcactgctcgagtcccctacatgattgcaagtggaaaccatgaacgggattggccaaacagtggatctttcttcaatgggacagattctggaggggagtgtggggtgcttgctgagaccatgtactacacacccacagagaacagggcaaactactggtacaagacggactacgggatgttcagattctgcgtggcggacagcgagcacgactggcgggaaggcacggagcagtacgcgttcatcgagagctgcctcgccacggtggaccggaagaagcagccatggctggtgttcatcgcgcaccgcgtcctcggctactcctcgggcttcttctacggcgccggcggcgccttcgcggagccgacggcaaggcagagcctccagaggctatggcagcggcaccgcgtcgacctcgccttctacggccacgtccacaactacgagcggacgtgcccggtctacgacgggcggtgcgcgtcgccggagaggtcgcgctactccggcgcggtgggcggcaccatccacgcggtggtcggcggcggcggcagccacctgagcaacttcaccgccgaggcgccgccgtggagcgtgtacagggagatggactacggcttcgtcaagctcacggcgttcaactacacgtcgctgctctacgagtacaggcggtccagcgacggcgaggtgcacgacagcttcaccgtccaccgggagtaccgcgacgtgctcgcctgcgtcgccgacagctgcccgccgaccatcccgccggcgacgtgatccagctccggtgattccgccggcgagtctgccggcgacgtgtgcactattgctgcttggtggtgcttgcgggcctcgtctgtaatcttgacttgtcaatcgtgtgtaaattgaattgcgaaatatttcgaaattaagtcaaataaagaaatgtt

SEQ ID NO: 26905 - DNA, 1176 bp, Oryza sativa
  ref <308>: DATABASE ACCESSION NUMBER: AK102347
  ref <309>: DATABASE ENTRY DATE: 2002-08-28
gctctcacatcctcccatcgcgccgccacctctccccaaccctagctagctccccctccttccccggcggcgacatcgacgatggcggcggctgcggcaggcggcggcggcggcggcgccccgcgggcgctctcccagcgggagcaggacatccagatgatgctcgcggcggacgtccacctcggcaccaagaactgcgacttccagatggagcgctacgtctacaagcgccgatccgacggcattttcatcattaaccttggcaaaacctgggagaagcttcagctggctgccagagtgattgttgccattgagaacccacaggacatcatcgtgcagtctgctaggccttatggtcagagggctgtcctcaagtttgcacagtacaccggagctcatgccattgctggcaggcacactcctggtacatttaccaaccaactgcaaacctcattcagtgagccacgtcttctcatccttactgaccccaggacagatcatcagccaatcaaggagtctgctcttggaaacatccccactattgctttctgtgacactgattctcccatgcgctatgtcgacattggtattcctgccaacaacaaggggaagcagagcattggttgcctcttctggctgcttgctaggatggttcttcagatgcgtggcacaattctccctgggcacaagtgggatgtcatggttgatcttttcttttatagagatccagaggaagctaaggagcaggaggaagaggaggctgcagtaggtcctgaatatgctgcagttgctgagtatggtgctgctccaactgacaattggggtgaccagcaatggggtggagaggtccagcctcctgccctccctgctgcaccgactggggaatggggtgctgctccagctcctgtggctgcagaagggtgggatgcagttgctgttcctcctgccgccgctgctgctgttgcacctcctgccgcccctggatgggaggaaggcagtgctccggcacctactggctggtaggaaatgtgcggatcatcattcgtcagctactggaggaaaactgagttacttaacattatgtaatgtatttggtagatctgtttaagtagctccatgttaaagtattgcataatgttaagtgagaatcaattttgaatgccgatgcatctggtt

SEQ ID NO: 26906 - DNA, 1533 bp, Oryza sativa
  ref <308>: DATABASE ACCESSION NUMBER: AK102348
  ref <309>: DATABASE ENTRY DATE: 2002-08-28
gatgggggtgtgcaagaatctacctcccctccccaaatctcgctcccacgcctcttccttccgacttgtgacagaatggcgctcaatgaggagtacacatacgtggagctggagaaggagccttactggccatttgagaagctgcggatctcgattacgggagctggcgggttcatcgcatcccacatcgcgaggcgcctcaagagcgagggccactacatcattgcttctgactggaagaaaaatgagcacatgactgaggatatgttctgccatgagttccatcttgttgatttgagggtgatggacaactgcctcaaggtgaccaccggggttgaccatgttttcaaccttgccgctgatatgggagggatgggattcattcaatccaatcactctgttatcatgtacaacaacaccatgatcagctttaacatgcttgaggccgctaggattaatggtgtcaaaaggttcttttatgcttcaagtgcttgtatctaccctgaatttaagcagctggacactgtagttagcttgaagtagtcagatgcttggcctgcagagcctcaagatgcctatggcttggaaaaacttgctactgaggaactgtgcaagcattacacaaaggattttggcattgaatgtcgggttggccgctttcataatatctatggtccctttggaacatggaagggtggaagggagaaggcgcctgctgctttctgcagaaaagctctaacctccactgaccgttttgagatgtggggagatggtcttcagactagatccttcacgtttattgatgaatgtgtggagggtgtcctcaggttgacaaagtccgatttccgtgagcctgtaaacattggaagtgatgaaatggtcagcatgaatgagatggctgagatagtcctcagctttgagaacaagcagctgcccatccaccacatccccgggccagagggtgtccgtggtcgcaactccgacaacacgctcatcaaagagaagcttggctgggctccaaccatgaggctgaaggatggtctgaggatcacatacttctggatcaaggagcagctcgagaaggagaaggccgagggcgtcgacttgtcggcctacgggtcatccaaggtagtgcagactcaggcgccggtgcagcttggctccctccgtgctgctgatggaaaggagtgagctctcaccctgggcaggaaacaggcatcatcatgatatagtgctactggtttcagaatttttcagatgccatatgatggttgccagccaccaccatctatacaatttcttgattctgttttggacttcacttcctgaaagatcaaagtttactagtctgcaattttcacttctttgtgttgtaaacgagggtaaaccgcttttatatatatacaagagggtgataatggtatagcattacaggggggaaaaacttcacaagaacaatggaattaagaatgaattcaagatatatgtggcctgagctgtgttaagcattcttaggctgtgtttagttggtgg

SEQ ID NO: 26907 - DNA, 1586 bp, Oryza sativa
  ref <308>: DATABASE ACCESSION NUMBER: AK102349
  ref <309>: DATABASE ENTRY DATE: 2002-08-28
gtcactccccccaccctcttcgctcactgcagatagaagaaaaagagatttgtttctgcttccgctgctgcgagcgatccgaggggcggggagaaaaaagaaaaaaaggaaaacaagccgcgcagcctctccccgcgccgacaaatcgctgtgggcggcaaccaactctgcgagctccgcggcggcggttcggatcggcggatctcgtcggccggcggtgcggtcgccaccaccatgatgagcagcagtagctcccctccaccgccctcaattcccacggggggtggaggcttcttcagaggttacaccaagctttgcaagggcctcgctgtcatattgcttctcgtgcaccttttgatccagctttttccatcagctgtcacctatcttgctcttgttcctggaaggacaatcccttttgcctgggacctgataactggtggctatgttgagctaacaattccaggggttattatcagcatagttggtcttcttttatttgggaaattattagaacctttatggggctcaaaggagttatcgaagttcatttttgttgtcaacttttcaacatctttgtgtgtcttcataactgctattgctctatactacacaacacaagaagagagctacctctatgctcctctttctggattttatggagttctgactggactgctggtgggtatcaagcagcttatgtcagaacaggagctaaatctttttgtgctgaagattaaggcaaagtggattccatcacttgttgcattgatctcagttattgtaagcttcttcgtaaaggagctggtctcttacctcccagttatattgtttggcatttatatgagttggatttacctgcggtacttccaaaggagattagagacaggcttgaaaggagacccaagcgaagagttctctttctcaagtttcttccctgaatttctaagacctgtgctggatccgatagcttcaatattccacaggcttctttgtggaagatctgaaagggctgatgctagaggtcagacattggataccacacctttgcctggttcagattctattgaggcgaacagaagaagagaaaggggtcaaagggcactggagcaaagattagctgagaagctggctgcggtcaaaagttctgagggcacatcacaggatgcctctgacaaagtttgagccttccatgcaacgacatgtgcattttgtgaattcccggtagtgttgtcaatgtcacattctctgaggacacagaagttacaagacaccatcgaattacccctcgcggccttttactgtttttttcattggttctcttgcttatcatctgtaatcagtttgtagtgcatggcaacggtggtccgagaatgtgacatttactgattttaggaagtaaaccctgcttaacaacgtgtgatgttttttttcttaggacaagctagttgcatgcattaccacagtttgtggtggtgcccttttgcccctggtaaaaaaagcttttctttccctgcatgttttaaagaccactggacgctttgcgtgaacaaagtgatgtcaaattgtcaggagttgattctttc

SEQ ID NO: 26908 - DNA, 1753 bp, Oryza sativa
  ref <308>: DATABASE ACCESSION NUMBER: AK102350
  ref <309>: DATABASE ENTRY DATE: 2002-08-28
gccgctccactttgcttgccaccacggtctccctccctccctcccctctcccatccaaaccccacaaaaccgcgacgaggagaccccgccgcgacgcagccgcagctccgccggggggggggggggggggagcaacgccgccgtggagtcccctgccacccacgagggttcctggtgcctacttggtctgaatggctgacctgaccgacatgggctgctgtagttgtttttgctttttaaggaagcctagggtgtctgtaagtcgacctcgcgacgctgatggcatcctatctgaagacttgttgaaccataaatctgcggaggatcctgatggaagcttctacaccggggatgatcctgatagaagcttctacgacagggatgatctcgatagaagcttctacaatggcgatgaccctgacagaagcttctatgatggagatgatcctgatcatctttatggaagtgatgatgggcagccaaggaagagatctgaagatattatactgtcaagggctcagaatggctttgcatgtagagaaagcctagttaaggagactaaaaaagtatttcgctcagaggatgaaaatggcagcaagatggtcaaccaatatgtccacctggggaagattggttctggaagctatggcaaagtggtcttataccgaagcatgaaagatggaaagctttacgcagtgaaggttttgaataaatcttacatgatgaaagtacgtgttgtgcgatcagaaactgccatgacagatgttcttcgggaagtatccatcatgaaaatgttggatcatcctaatatagtaaatctcattgaagtgattgatgacccaaatgcagataaattctacatggttcttgagtatgttgaaggaaaaatggtctgtgacaatggtttaggagaagctacctccagaagttacttgcgcgacataatctctggtgttatgtatcttcattctcataatattattcatggtgatatcaaaccagacaatttgttggtcacaagcactggcagtgtgaagataggggatttcagtgttagtcagatttttgaggatgatgatgatctgctttggaggtctccaggtactcctgttttcactgcaccagaatgctgtcaaggttcagcctaccatggtcgggcagctgatacatgggcagttggcgttactctgtattgtatgattactggtcactatccatttctaggagataccttacaggaaacttatgataagattgtcaatgatccggtgcaaatacctgacaacatgaacccccaacttgctgatttgctggaaaggcttctctgcaaagatccagcaaatcgtatcaccctgcaggctgtaggtgagcatccttgggttgctggggaccaggggccagttgttgaatacttctgtagatgtgggtttggccgaagaaagagagatgatcttaagggagaagtacaatagcaaaggcttgttcacagtttatcatccgatggtttactgtagataggcgatgagtgtggctaaacaaagaaagtgagatgatcgacaaaccgtgttactcttttttgtgttcttcctccctttaccgattgacctgttggttgctcgcctcaccacctctgcaagttttgttgcctaaccgagggagcccctgtttccatttttctgtagatcaattttggctgctgcaacatgtaagcttttttcatttggttgttgaatccagtatagcaaccattcat

SEQ ID NO: 26909 - DNA, 4016 bp, Oryza sativa
  ref <308>: DATABASE ACCESSION NUMBER: AK102351
  ref <309>: DATABASE ENTRY DATE: 2002-08-28
ggggcgaccatatctgtggtgactgtggtctcgctgcgcgcggctgccgtgacggaaagccccagggtatccttgaccttaatctgtactaggggttgccctagtccctaagcaggaactattggaattcttttgggcgatttgggtcactgtcgcacacccaaatcattaagggcttaagtcgataagacaaatttggcgttgggtacttgttcacccaaggatgaaattcacaaagaactgatatgagcagcaattgtgcttatacttgttctgcatcatctcgacacccctgtgtcaatggggattggagaatactgaagacctaagccaaggaccctgaagaaaaatcatatcttttttactgaggaagaggtgaaactccaagttatggctagtggattagtgtcatctcttctttcatcaaccagcagcctgttagcaattcttcgaagcccgttgtcagatttatatccccggagcggtcatcccactgcatctgccaatctgcaacgactgaagcgactgctgtcacgcatccaggccacacttgaagatgctgaggagcaagggctccaggacaactatgttaaattgtggcttaaggagctcaaggacttggctcttgatgccgaggatgtccttgatgattaccggtatgagctgctgcagagccaagtccaagagcttcaaggtgattatccacgcaagcggaagcacatggataatgatgaagaggacaatgatagtattgatgagagaattaatgagatgataaaccgtttcgaggagatatccagagatcgagatgctctcaagctcagatttgaagatggccataaaattgttgacaggggaaactggatgaagtcacggcctactagccaccttattgatgagtcccttgtttttggtaggattgatgagaaggaggatattatcaagtcagtattatctcatcaagacatggaaccatctggaattgttgttttgccaattgttggaatgggtggtattggcaaaactaccatagcgcagatggtatataatgacagtcgtgtcagaaaacattttgagcatagtggttggattcatgtatccccaacatttgatgtccataagttgacgattgccattactgagtcattaaccatgaaaaactatggcttcacacagctaagcttagttcatggggttctcttggaagaggtacaaggaaagaaattgtttttcgtgcttgatgatttgtggaatgaatgtgaaagtagctggcaggattttctatctccgctcaggcatgcacaaacagtggcaattttggtcaccaccaggagtaaagaggttgcacgtcttgttcaaacagtgcagctatatcatcttggctgcattcctgacaaggattgctggttgttgtttcagcattatgcttttggaaaccaacatgagagtgaacagtccatattagttcagattggcaggaaaattttgcagaaatgtggtggcttaccgttagcagtgaagtcactaggttgccttttacgatcaacaatggatgaacatgcctggatggaaatattggaaagtgagctttgggaattggatgaagaggataacatctttccagctcttagattgagttattactggttgccaacaagattgaaaccttgttttcttctctgttcattgtaccctagaaatttaggatttacaaaggatgacattattcagctgtgggtcgctcaaggttatatctactctacaaacgggaaaacttgccgggagataggaaatgagtattttaatgaactgcacgcaagatcattgattgaaacttataggaaaccagtatgttgggatattaacaaacggaagctttgtctctccaggtttacttataatgagagacaaggattttcgtcaaaaaaaagagagagacaaggattttcgtcaagaaacgaagggagacaaggactttcgtcaaaggaaaaagcaagagaagcaatgttctatttgaaaaacaagttacagtgtgaaacttatttgaagaaaccatcaacgtcaattggacgctttaagttgcatgatgttatttttgatcttgcaaaatcatttactagaggagaacagtgtacagcaatgtttggcacgacatgtatgccaccagtagctgatctgaaacttcaatttcccaacccgaggtccgtaagaacactcgtgttaaactgttgtttcagctgctacaaaaaacattctggttattttatggaattatccagtttcatgtatctaaggtctttaatactgaattcaaaccacgatgttagtggtatggtatattcaatcggcaatttaagacacttgcgctatctttctctgaactgcaaaatgagagagttgcctgaatcggtatgtcgccttcacagcctggagacattgattatttcctccttgagaatattaaagtcaagcaactttcagaatcttttcagtcttagatgccttcatgtttcttttgacttcatggatggatcgttggatcaatttagtgatctttattgcttagggacactgtgcttgaagcattgctgcaacattacatacctacccttacacataagaagcctccttaacttacaacatcttcaacttgtgggcatttcgaacatcaggcgtttggatcatgcatctttcaggtacaacaaaagtaacagcacatggcaaccagatgcactatttccatccttggagagtttagaactcgaaaatttgtgcaacctggaagatttgtgtggattgcagaattcagattgctcgaaattgcagtctcttactgtaagaaactgctcgaaattaagcagaatcccttgtttcacctccctgagaaatttggtaataagcaaatctgttgtcaagattatccagttttcactagctcctgattcttccttcagaaaatatgccgtgcaagccttgccatgcatttgtcgctgattgtcctaaactgaaacagtggtgcgagaaacatgagttcaactactttcaggttactaggaagatgcatatttcagatgtgcgattgatcacagaatatggtgttaagaatttcgtggccgttcaacatttgacaattgagaactgcacgcagataggccaaaacctgctttcctcaaccaagagctggttaccatctaacttgcggttcttgcagttcagttcttgcactttctctggtgttcttaatttccacaagggtctttcgatgctttcgggactagagatcaggaactgtgctaaacttgaatcgttgataggtttgaattatctcaataatcttcgaggactggttttggttgaatgtcctttacttgatatgtcaactggaacaaaatttccagatctattgtcatctttgataattcgcgggtgccatcagcttctatctctgcacttatgtaaccctgcagttctgacggagcttgagatatccgactgccgtggattcatgtacattggaggattaagaaattttagagaccttgaaagcttgaaacttcttcattgccctctacttcagctgcgggacttgatgccagctgctcctgaaactgccgtaatctgttgttgtccgaggctgaagaagtggtgcgaatggcatgacatagagtataaggacattcaggaaaatccagaagattcatatgggaagctgtgatacttttgtaattgaccacattttattacgacaacttcttgaagatacatatgggatggctggtcatacattttgatataaccgttatggtctcgagacagataattgatctgtaacagctcaagacaattagcctgttttgtattgtaggctagtggtgtgagaaaacttatcacagggtaaattaagttcacttcaaattttacacaacttaaatggaattggtgctacataattttcttcagaacaatgtaaatttggtgaaatggtgtaacgtttttataactgaagtgcattttcc

SEQ ID NO: 26910 - DNA, 1347 bp, Oryza sativa
  ref <308>: DATABASE ACCESSION NUMBER: AK102352
  ref <309>: DATABASE ENTRY DATE: 2002-08-28
tgagtggtagtaggctaggctatatccgcctcggccaccgccgggttcgcctccagtgctcgccgcctccgccgccgccggtgtccatggccgtggcccttgccggcgcgagatccccaggagcgggcgcgatcctcagcctccgccgcctcgcccccgccgccgcggcgcccgtacgtctgggcggaagcggaaccccaggcacccggcgccgccgcggcatcgccatggcggcagctgcgtccgccccgcccgcgcccgccgatgccctccccaagggtgctgattcatttttccggacagttatctcaaacatggagaaagtatatctgagcagaaatccaactgccaaaaccatcctggaacttgttcgttcttatgatggggaccacatttgctatgatcattttgctttcagaacatttggagttgatggttatggtataaaatcacttgctgaattttttactgactttggttatgtccctcgtgaagaactaaggtttccagcaaaaaagttaagagcactatggttttctcctcccaccaatgatggatacactggaactggtgtttatgggcctttgccaaggatattcatttcagaactacttgtggatgagttgagtcctcagagccaggacatcattcaaaaatacattagaacttctggtaaaggaaataaacatgcaactcttgcaagtacatcaggggagctgacatgggagaagcccatttattctgatttccaagttttatctagggaaagtgaatatgctgcatggactcttgttaatggctatgcactaaatcataccacaatttccactcatcgcttgatatcagatattagaagtatcaataagttcaacaaatttgtggaggacaatgggttcaagttaaattcagaaggagggattttgaaagtgagtcctgatggtctcctccagcaaagctcaactgtagctgattcagcgttgtttacttttgctgatggaatcactgaatccattccacgttcctatattgaatttgctgaacgcctggtactcccacagttcaaagatttgccaaatgatgaggtcaacgaacaccacaggcgcgatggttttgaggtagggaatgcggacaaaatatttgagagcacatcaaatgatcagcttacacggagatctgcataaacgttgaagtctcaactattctggaagcgagtcatgcctcttggaagcgtattgaaggagtgttctctgtgataactgtatctacctgggtaaattaaaacattagaatgaataaactgttcgatgtatatcgctctcttgaataaagaaattactagttatctct

SEQ ID NO: 26911 - DNA, 1613 bp, Oryza sativa
  ref <308>: DATABASE ACCESSION NUMBER: AK102353
  ref <309>: DATABASE ENTRY DATE: 2002-08-28
gcccgctcaaacaaactccgcctcgtctcgtctcctccgaaaccgccgcgctccgacgccgccggcgaaatggccgcggccgcgtcctacttctccggcacggcgctcatgccatcgcagcgcagcggggcccccgcgccggagtactccgccgccggcaccggcgccgccgccgctccttccccttccaagccgcgcgacccccgcttctccggatgcgtccccgccaccgtgctccacatttcccggtccttcgccgccgcgctcgccgcggacggtgggggcgaccccgtcttctccatcgacggcgtcgagaccaccaacgttagggttttggggagggtggtgagcgtggtgagcagggatactgacgtgtgcttcactctcgatgacagcaccgggaagatcccactcgttcggtggatcactgatcagtcggatactcgagacacgtcttacattcaggagggagtgtatgtgaaggttcaagtgaacctcatgggatttcaagctaagaagcagggtcttgctcgatctatcaggcctattaacaatttcaacgaagtggtgctacatttcattgagtgtatgcatgtgcatttggaaagtgttcaatcgaagatgcaaaggcaactccctccttcagtccaaaccaatgaatacactcatgtgccctcatctggtggagtgagggattaccaagttcatttcactcctcaagtaaaccaaggactaccccctgcagttcaaacaaatacatctacttatgtgcctcttttgggtggagttagagatcatcaagctcattttgctcaagtaaaccaagggcagttttctccggcagttcaagcaaacacatctacccatttgcctttttctggtggagttggagaacatcaaattcattttactcctaaagtaaaccaagggcaatttcctccatcagttcaaacaaacacatctgctcatgtgccttattctggtggatttagagaacatcaagttcattttacacctcctgtaaaccaagggcaatttcctccagcagttcaaacaaacctgtataatcatgcggcttcttctggtggagtgagagaacaagttcatcttactcaagcaaaccaattttcagcttactcaagcactggtggactacagcatgacccacaaagaatggttttggaagctctgcagcaaccagatatactgctctcgaacatggagcacacgttgatgaattggttagaagaactggaatgcccaaagcaaacattatgggggttgtcaagcatctggctgcagcaggcttcgtctattggaccattgatgacaatcatgtcaagtctatgtgtaatggttgatcaatgcaatcatcctcaagactagtatagcagtgtgagattaagtgccctgcggatactaaaacttcgtggcacatgctgtaagtaactcatatagggtgtgactcagtcagtctttcctttcaataatcaagtagatcaagtagggatattatggcccttttgcactcggaaactgtgattgctgaatggatctgtttattactgcatacaaaggtcactggcttcttcaatatacaatttacacttttc

SEQ ID NO: 26912 - DNA, 2087 bp, Oryza sativa
  ref <308>: DATABASE ACCESSION NUMBER: AK102354
  ref <309>: DATABASE ENTRY DATE: 2002-08-28
gactaccgccatcgatcttctttctcttccccagctcgaccacgaccactcccgggagggagagggagagggagagcagcagcagcggtagccagttagtccagctgatgccgccgaagcggcggccggaggaggagtcgccgcaggcggcggcgctgaagaagcggtgccggtcgttcgacctagagatcaggggttgcaggcacctgcaggagctcgccgccggctgcgtccgcacgctcgaggccgcgctcgagtccgccattagccggattccagaggaggtgacaaaagcacttacaagcttcctaatccgtgctcctagaacactgtctgatcagaaccagcctccaaggtacaagcttaggttctcaaatggcttgagcaatgaagttttcacaaagaaaggaatctgtgatgttaatggagagtctctcaagatatctgtgcatgtaaacaacccacaagaggcctgctcgcatcgccttctttctgctaagatcagagttgttgttcttgatggtgacttcaacaagaatgatcaggggtgctggacatcagaggagttcagaaaccacatagtgcgcccacgtgataaagttgggactgtgctgactggagagcttgagcttagcctgaaaaatggagaggcttacatccatgatgccacttttgttgataactccaagttcatgaggagtggtaagttcagacttggggtaatggttattgatgatctcggtgaacgtattcaggaaggcataactgaacctttcgttgtgaaggatcgtcgcggagaaggttccaaaaagcatgaaattccatcattggatgatgatgtctggcgcctgaagaagatatcaaaagatggtgtcttccatgatgcattgaaacagagtggcatttcaaacgtgaaggaattccttaggctgtactatactgatgagccagctctgcgcaaaattcttattaaggccactgataaagtttggacgactatcattgagcatgctaagaagtgtgatcctggaagagagctgtactctttcttgccggaaaaccgcaatgttgtgctgttcttcaactctatccatcagattgttggggtgataactggtgaccattacactcccttcagtgatcttgacaagcctatgcaggatgatgtaggacaactgagcaaattagcatatgcagatttgaaccacttcctacctgattttgaaatgaaaaatggcaaaccaagacaaatcaaccaatgcgctttccaagaatcgagaatggtggagcctaaatttactgaccaaatccaaggacatatggatcctaattttgctggccttatacaaggaaatatggatcaaaagaagagaaatgtccatgaatctgatgatcagcaaggaacttctggcagtcatcccaggcagtgcaaattatcaaggtttggatctgtgcgagtgacacacgtggcatccttgaacaaaaacgatgaagattctttggacttcagtttcctcctgaattctctatctgaccaacatgatgcaagcatgaacacaaatgagatagcagcctcggtgacattccattgtccaaccgcttctacaaatgaaattactggatcagtggtgatgaggcaagcatctttcagaatagatcatccagcttgtgaaaatgatgcttcagttgctgaattccaccaagagcaacaggtggttaccgcacaatttgatccatcttttttagctgtactcgctgatgcccccatgtactcaacgcacaacagcttcaaagagagtgaatgccacgaggcgctacaaaagctgtctgaagactgatttccctaagaacaatgaacattcattttgatgcatatttaggtcaagtactgttttgagtctcattttcttaatatgccagcttggtattagtgattgcttctatttaatttgtaatgtgctcatattcttgtactatttactggatcattattatttagttacaagaactttggctctgtgcatgctagatgcagaggccggggatgtaattcatcttccttattaaaaacaataaatattgtgtct

SEQ ID NO: 26913 - DNA, 1278 bp, Oryza sativa
  ref <308>: DATABASE ACCESSION NUMBER: AK102355
  ref <309>: DATABASE ENTRY DATE: 2002-08-28
gctcggcgtccccgcctttacgcgagaataaccctcccgaaaccctccttccccgatcgatgccgccgccgccgcctcctccgccggagtgggccgacctcccggtggacgcggtcctggcggtgttcgagcggctgggcgcggcggaagtgctgatgggcgccggggtggtgtgccgcagctggctccgcgcggccacccgcgagccgcggctctggcgccgggtggacctcaccgcctgcttcgaccccaccgtcgacatggaggccatggcgcgcgcggccgtcgaccgcgccggcggacgcctcgagcacttcgccgccgagcgcttcgtcaccgatgagctcctcctctacgtcgccaagagaactagctgcttgaaaagtcttcggctacgtgattgcataaaaatctcagagaaaggcttggttgctgttggcaagacatctccctgtcttgaggaacttgagctcactacctgcaccatcagtattttgctgaaggctgttggcgaagcatttccgaacctgaagtgtctgcgactgaaccatcgttggtttgatgttcagtttgatgagttcagagataacttccatgcccttggaatagcctgcagcatgcacaggctacgccatcttcagatctttgccaatcggctccgcaacaatgcacttgctgccatccttgacaactgcccgcaccttgagtcccttgacttgcgtcagtgcttcaacgtcgatgtggatgcagaagtgagagcaaagtgtgcaaggctgaaggatgtgaggttcccaaacgactcaaccaaggactatgagtatgagacttttattgagacaccatcactagattcgctcccacttccatttcccgcagcagttcctcaatggcccttccatgggaatgacgaggatgacgacaatgatggtgatcaggacgatgacgatgatggtgatcaggacgatgatgacttgggcggtcacagggtgacagagtatggttttatcatcggtgactaccatgtccgcggtcggatcatccaccatgagtaactcgacatctacatgccgtaattagcaggttttgatgtcccagcgtctgagtctcaggaaatggaaggtaggtgttcagaagtaaggtaattcgctgagcgctgtaagttatttctgttgtagtagcttactacaacagaagggcgcatttagaacggttctgtatccaactgcaagtctgcaaccggtctagtgacctcatgtgtagtggtaaaacctttgttcc

SEQ ID NO: 26914 - DNA, 3682 bp, Oryza sativa
  ref <308>: DATABASE ACCESSION NUMBER: AK102356
  ref <309>: DATABASE ENTRY DATE: 2002-08-28
gcctagggtttcctcctctccaagcttcgccgccgcccgccgccgccgccgacatggggtctagcgacgaggccggctcctccaagcaccaccgccgcgacaaggagaaggaccgcgagcggtcctcctcccgccaccaccgcgaccgcgaccgcgagagatccttcctctcgccaccaccaccgcgaggaccgggatgacgaccgggatcgggaccgggaccgggagcgccgccacagggagaaggagcgggatcgcgaggagcggaaggcgcgggagcgggaggagcgggagaaggagaaggagagggagcgtgcgcggcggcgcgaggagagggaccgcgaggagaggtcgaggaggcgggaggcggcggcggaggaggaggaggaggatgtggaccgcgaccgcaagcgccgccgccggtcgtcgcaccaccaccaccaccaccgcgacgcggagccggaggggccggcttcgggggccagggaggaggaggtggtggatgtggaggaggccgagaggcggcgcaagaagaagaaggaggaggagcagaagcagctggacgaagagatggagacgcggcgccgccgcatcaaggagtggcaggagatgaagcgccgcgaggaggagacgaagcgccgcgagcaggaggaggccggagttggcacctcagccgccgccgccgcggcccccgcagaagcagaagatggcggcaatgccgggaagaagtggaccttggatggcgaggagtctgatgaggaggggaaccaagaggatggtaagaaatccgatgataatggtggttctggtgccggtgccatggacgttgatgttccaaatgggggtgataatgcaaacggcgccaatgctatggatgaagatgagattgatccgcttgatgcgttcatgaactcgatggtattgcctgaggtcgcaaagcttgagagcatgcctgctgccaatgtggatgacaagaatgataagagtgctaaggatgctgtgactaatggggataaaaaggggccaaagaaggtgatggggagaattatacaaggagaagactcagactcggattatgcagatgacgaggatgatgagggtggttccgaagatgaggatgatgaggagttcatgaaacgtgtcaagaagacaaaggcagaaaagttggctattgttgaccattctaagatcgactaccagccgttccggaagaatttctacattgaggtgaaggatattacaaagatggcagctgaggaagtggcagcttatcggaagcagttggagctcaaggtgcatgggaaagatgtacccaagccaataaagacatgggtgcagagtgggcttaccagcaagctccttgatacaatcaagaaacttggtttcgagaaaccgatgtctatacaggcacaagcactgccgatcataatgagtgggcgtgattgtataggaattgcaaagactggatcaggcaagactctagcatttgtcctgcctatgctgaggcatgtcaaagatcagccggctgttgttcctggagatggcccaattgggcttataatggctcctactagagagcttgtggtgcagatacattcagacattaagaagttttcgaaggcgcttggcatcaactgtgttgctatctatggaggttctggagttgcccagcagatcagtgaactgaagaggggtgctgaaattgttgtttgtacaccaggcaggatgattgatattctttgcacaagcagtgggaagattactaatcttcggagagttacattcttggtgatggatgaagctgataggatgtttgatatgggttttgagcctcagattactcggatagttcagaatactcgtccagataggcagacagttcttttctcagccacttttccacgtcaggtggagatactggcccgtaaggtgctgacaaagcctgttgagatccaggtgggtgggaggagtgtcgtcaacaaagatatcacacaactggttgaggtgcggccagaaaatgagaggttctttaggctgttggagctgcttggagagtggtttgataaaggtaaaattcttgtttttgtccattcacaagataaatgtgattctctactcaaagacctgttccagcatggatatccatgcctatccctgcatggtgggaaagaccagactgaccgtgaatcaacactagctgatttcaagagcaatgtgtgcagcttgctgattgctaccagtgttgctgctaggggtttagatgtcaaggagcttgagcttgttgtgaattatgatgtcccgaaccactatgaggattatgttcatcgtgttggacgaactggacgtgctgggaggaagggatttgccgtgacttttatttctgaggaagaggagcgttatgctccagaccttgttaaagctttggagctctcagagcaggctgttccagaggacctgaaaggtctagctgatcgttttatggcaaaggtgaagcagggaacagagcaggcccatggaacaggatatggtggaagcggtttcaagttcaatgaagaggaggatgaagcacggaaatctgcaaagaaggctcaggcaagggaatatggttatgaggaggacaagtcagattcagattctgatgaggaaggaggggttcgtaaggcgggaggtgaccttgcggtacaagctattgctgctgctcaagctgctgctgctatggttgcagcaaaggctgctagcaatgccaaccagcaaacacaaggcactgctgtagggcccttgcttcctctagccattgcttcaaacacacagaataacgaggccacagcacgtgcactgcaggctgcatttaacatacagcaaaatctggcaaggatacaagcacatgcagtcccagaacattatgaggctgagcttgagattaatgatttcccacaaaatgcccgctggaagatcactcacaaagaaacattgggtcctatccaggaatggacgggtgctgcaatcactacaaggggaaccttttttcctcaaggaaaaattgttggtgctaatgaacgcaagctgtacctgttcatagagggccccactgagctatctgtcaagaaggcgaaagcagaattgaagcgtgtccttgaagattgtgccaaccatgctctgaaccttcctggttctgcccaaactggaaagtactctgttatttgaggggcggaacagatgtagggattttcttgacaagtgcagctttcatgggtttgcagaccacagtgctattcttggattggttcttccatatgcgcggctcatattttaaatcttagctatcgtgcatggcagctaatgcttacttttaaacttattattgcatgattattgtggagattgtctaatctagaatgttttgacaatttctgtagctactattaacagtggtggtagcttgctgttaacacaggatgtgttccaggcagtctgttgtgaacactgttatgtgaacatagctctcaagctatgttacattgttcaccccgagcactaatggggcatgctaaatgcaagagaaggtgctgagctttctagtgcaattttggaagtgcttgttggcttttgatgctataaacctaataacttgtcttatattcttgctttgaataaatcggtgcggtggcaccatttcagtgac

SEQ ID NO: 26915 - DNA, 1401 bp, Oryza sativa
  ref <308>: DATABASE ACCESSION NUMBER: AK102357
  ref <309>: DATABASE ENTRY DATE: 2002-08-28
ggtcagaactcaaaatctcaaattccagacttccagaggcgagcacaggaggaggttggaaaaatccatccatgggggatgagaaggctgctccgaaggcgggcgccaccgccgacccggtggtgctgaggatggagttgcattgcgccggctgcgcgcagaaggtcaagaagtccatcaagcacttggccggggtggagtcggtggcggcggacgtggcgacgaacacggtcgtcgtggcggggacggccgaagcggccgcgctcaaggcgaggatcgaggcgaagaccaagaagcccgtcgaggttgtctccgccggcggcggtggcgccgccgccaagaaacccgccgccgagcccaaggccgtcaaggacgatggcggcgagaagaaggacgcctaggcgaaagaggagaaggggaagaagcaaccgccagaggagaagaaacccaaagaggaaacggtgctgctcaggattcgcctccactgcgatggctgcgccgaccgcatcaggcgacgcatctacaagatcaaaggggtgaaggaagtggtaatggacggcaatgccaaggatgaggtgaaggtgtcgggcacaatggacgtgccggccatgctgacctatctcaccgagaagctcaaccgcgccgtggaggccgtggcgcccggcagcaagaaagacgagaagaagaaggacaagggcggtgacgccgacggcggcgagaagaagaaagacgccgccggcggcgacaagaaggacaaaggcaagagcatcgaggtcgccggcccgtccaccgccgccgccgcggcgtccatggcgccggcgccggccgaggcgagcacgtaccacgtctcgccgtacggccacggctacttcgcgtacccgcagcagcagggacctccccccagctactaccagtactacggcggcggcaatggcgacggcgtgggctacgccaaccccaatgccggcggcgccggcggctactaccacccccaccccaacgacgtccctacctaccagccgccgccgtcgtacccgccgtacccctaccagctcgacatgtcgccggcgccgcagctgttcagcgacgagaaccccaacgcctgctcggtgatgtgatcgccatgcctccggcgacagagctcagaggccaatctgacgacatgtacataccgaggactttagacttagaagatcagaggcatccaccaaacgtgttgttatgctttcgatcaatttttgtccaaacttaccccttctgttgtagcgtcattttttttagatcaattcttgactggttaagcgaaatttgattttaactagagtattagcggatgaaatggactgatggagtgatgatcttttggtcgcaaaatgcgtgcctagtcagagatgttggttg

SEQ ID NO: 26916 - DNA, 1952 bp, Oryza sativa
  ref <308>: DATABASE ACCESSION NUMBER: AK102358
  ref <309>: DATABASE ENTRY DATE: 2002-08-28
gacggcgcctactactcctacaacagaagacgagctcgcctcgccgccgccgccatcgccaccaccacccgcagctctcctcgtcgcgtcgtcccgcacctctcgatctccaacgacgcgggggcttgccggcgcggcgcgagttgacgacgactcgccggctgtagcaggcagcagcagcagtagagagacgagacaggagtgagtggtgatcgccgcggttgggtttcttggattgggctgtggctggcgttggtcggaggagccaggaggaggttccctctcgctttgctcgctcgctcgttcgttcttggctgggtttggtttggtttggtttggtctcggttcagatcttctctccaaagattgggattctgttggtaggggggggagggaagccattttcttgtttcgatggacgctcggtagatcggtaggtagatggggaactgcatggacaccgcggcggcggcggcggcggcgccggataccaacaacgccgatccatcaaaagctgctagcaagacaacctattcatcttacccttcaactacaaaaagcggttcatcttggactgtaccttcctataaggatcgtagcgaccttcctactcctaggacagaaggagaaattttatcatcgtcaaatttaaaggcattcacactgagtgaactcaaaaatgcaacaaagaactttaagcccgacagtctccttggggaaggaggatttggctatgtctataaaggttggatcgatgagcaaactcttgctcctgcaaggccagggagtggtatggttgtggccgtcaaaaagttaaaaccagaaggttttcagggtcacaaggagtggctgacagaggttgactaccttggccaacttcaccatgagaatcttgttaaactcattggttattgttcagatggtgataaccgacttctggtgtatgagtacatgcctaaaggaagcttggagaatcatctatttaggcgtggtgcagatcctttatcctggggaataaggctcaaagttgctattggggctgctaggggtttatcatttttgcacgatgctgaaaatcaagttatatatcgtgatttcaaggcatcaaacattctccttgactcggagttcaacgcaaagctttcagactttggtctggcaaaagcaggcccaactggggatagaacccatgtttccacacaagtcatgggtacccgaggttatgcagctccagaatatgttgcaacaggtcgcctctctgtaaaggcagatgtctatagctttggtgttgtgctgctcgagttattgactgggagacgggccttagacaaatcgaaaccagcatcagaacagaacctggttgactggacaagaccctacttgggtgacaagcgcaggctgtaccgcatcatggacatgaagctgggcggacagtaccctaagaaaggcgcccacgctatcgcgaccattgccctgcagtgcatccgcagcgaagccaagatgcgaccccagatgtccgaggtcctgtagaagctgcagcagctgcaagaccccaagtacaacgtgacctcaccgcaggttgacacccggaggagatcatcgtcgggttcagttcctaggtcgccgatgcggatgcagccttcgccacggcgcctttccgcctcggcttccccattgccggctgcaggctccccgctgccggcttgtaggactgcgcaagtgcactagatgcacagcctaggatagtttggaacttcgtgctgtagttgtttgtaacctctagctgtatattttgttttgatgttgtgcccaatctgtagttctttgttttgtgaggttggatacatctgttgctgttagactccgatgtgtgtgtaacagggaacgtgattccggcattctgacgcgatcattatttttttttacttgtttcaatagataaatggattctt

SEQ ID NO: 26917 - DNA, 768 bp, Oryza sativa
  ref <308>: DATABASE ACCESSION NUMBER: AK102359
  ref <309>: DATABASE ENTRY DATE: 2002-08-28
gctctctctccttttcttttctctcactttcttcctcagtcggccagcgcagccggcggggtggggaggaggctggtgggggaggcgggagtccggcgacaacgacgcggcgacgaggcggcaggcgacgaggcgacgacgctggagaagggaaacgcctgcatcccgccgcctcgctttcgcctcccagaccaacgggagatggggttggcgatgtttgggcacacgccgttgtttccattacaccacgccgccgccgccgccgacgacgacgacgacaacgacacctccccactggcgatcgagaccagtagaggcacatgcgaagtgggttcccatggcgccatgatggcaggaagcagtgagagcgagtactactcggaggaggaggtgggatgggaggaggaaggtctcggaagcaaaggcgtggaggagaagagggagtgggcactgaagcggctcgacgacctcggcaagcgcggggtgtgctacctcagccgcgtccctcccaacatgaacccgtcgcacgtccgtctccgtcggttgctctccaagcacggcgaggtgtagatgatttaccttgtctagttcatgccactagagttgaagccgtgttcgattcaatttgggatatgtatggtggttaatttcaaatctcggtgcttattcgagaaacctggaagctgcaattactatctagtactacctccatattttaatgtatgacgtcgttgactttttatctaacatttaactattcgtcttatt

SEQ ID NO: 26918 - DNA, 1277 bp, Oryza sativa
  ref <308>: DATABASE ACCESSION NUMBER: AK102360
  ref <309>: DATABASE ENTRY DATE: 2002-08-28
gaaatcccccattcgaatctctccgcctcgtcgccgttgcggccgctcctcccctcccctctctctcttgttcccccatggcgatcgccaccgagtcgcgctgcgaggaggagaaggcttcgccgcattcgcaggaggtgaagcggtgggtgttgtctgattttgacatcgggaagcccctcgggaggggcaagttcggccatgtttacttagcaagagaaaagagaagtaaccatattgtggctttgaaagtacttttcaagagccaactaaagcagtcccaggtggagcatcagctacgtcgggaagttgagattcagagtcatcttcgtcatcccaacattctacggctgtatgggtatttctatgatcagacccgtgtgtacttgatcttggagtatgccttaaaaggtgaactttataaggagttgcagaggtgcaagcatttctctgaaagacgttcagcgacttacattgcatcactggcgcatgcgctcatctaccttcacggaaagcatgtgatccatagagacattaaacctgaaaatcttttaattgggtcccagggcgaactgaaaattgcagactttggttggtctgtgcacaccttcaacagaagaaggacaatgtgtggaacattagattacctgccccctgaaatggtggagaagactgaacatgactaccatgttgacatttggagcttggggatcctgtgctatgagttcctttatggagtcccacctttcgaagcaaaagaacactccgaaacatatcgcaggattgtgaaagttgacttgaagttcccactgaaaccattcgtgtccccggctgcgaaagacctaatttcacagatgctcgtgaagaattcggcgcatcgtctgcccctccacaagctcctcgagcacccttggatagttcaaaacgctgatccctccggcgtgtacagaggctagaacaatctcttccactctcctcaattcgaggagagacctgattctttttcatcactgttgttatggcaaaacaagaaaaaagcagtagccgtactactctacctgttgtttccgatcccagctgcgcctgtgtagttacgtgacaacgtgtatgctcaagcttcagatttcctcgatgaagatttgaagctgtgtgtgtgggtttaacgcgtatgtgttttagcgtgtgttcacagcatggggttgtgatatgttttctgtgcaacgccctgtacttaatgtactaatcgtatttcttattggacatcactcgattagtct

SEQ ID NO: 26919 - DNA, 2132 bp, Oryza sativa
  ref <308>: DATABASE ACCESSION NUMBER: AK102361
  ref <309>: DATABASE ENTRY DATE: 2002-08-28
gcctctccttccctcttctctcgcaatcgcatcgcaccccctcccccccgagcttgactccggaaaccctaggcagcccagccatctcagctctcggcgacggcgaggcggcgctcgctgggggtgcggccgcggcggctgagcttttgccagatccggaccaccgcccccagttccggcgccgcggcggcggcggaggcggaggcggaggtgtgggagtcgttggcgattcggccccgggggtgggtgggagagggcgccgctctgatcggtgctccgactccgagtggttctaagctaggaaggatgatcatgttacgttttgctcaagattttgcttcacactgataagatctcagcatttggatgattaacgcatattgaattctttctcaataaacatgggagctaattgctgtatagctgcaaaagagaggcctcagccatgtgttactccaattgaagtgtcagcattcaggaacgtaagacactctccatcatggagcttccggtgggataaccgcacacacatagaagacataatggaaatgcccgcattgttttccaaccatagtagtggaagcattcggcctgaaacaaagagtggctcaattgcgccaactgatggcttttctaacggaggcagcccttctgatatgttcaacaagctcaagtgccataaatctgacaggaagagggagtcatctaagattgcgagatctgaccttcgagcaggtagatccaccacaagcaattcttcccctgaggcaaagctttccagaaaatcgctagacacagtaagtgtggcttcagattcgaagatgtcaatctctgttccttcaacgccgcctgctatatccagagcagatccttcatcatcctccagggggcattctctaccaacagatgcagactcaatgaggaaagcacgtcgatcaccagggtatcaactgtatagacaggtctccgacagcaagattccatctctcaggtctctcaacgagggcgcctctcctgaaggaaggccatcctcctccatgctctcagtctgcagcaacgatttatctgcagtaggatcacatggcgagtcatctgatggttggtcaatgcgaacattttctgaaatggtcgcatcatctcagagagagagatggtcagttgatagtgagctcttaggttctgtttcgagtaaaatgacaagatcaaatgcttctaataatcctactacacattcacctgaccaagaggtgtgcaagctatgtttaaagctattaaaggaacggtccacatggaatgctcaggaactggctgttgttgctgttttattgtgcggccatgtttaccatgctgactgtttggatagcttaactgcagaagctgacaaatatgatcccccttgtcctgtatgcacccatggtgagaaatgtacagtgaagctatttgggaagttggaatcaaagacaaagaacaagatacctaaaaatgtgatagttgatgttaatctagatgggagctctaagcatcagaaggaaagtaggagagagcccagattaggcacaagttctagcttgaagggctcgtttagtcgcccgtttttgagaaggcatttctctattggctctcggccatcccagtcaatttcagagagcgagtctgccagaaagaagggcttctgggcaaggcactggagggaatagcataactgccagtcatcatcgagaaatccctcttgaagaggagctgtactcccaagcgagagcaagcatgcgggagctgaagtcaagccgaatcggtgcaaatgatatgacatggctgttgaacgacctccgcattgaaggtttctcctagccatagtcatattcggccgcaagcacttgtcgtgctggaaagggtctcgatagtagaataacagttgatatagtatactatgcaactgaggtttatttcagagcccagtcgcagtttagtagcgagtaatctaacagaaaaaggggatgatggccttcagagttgagaccgaaggtccattgctgtgttgcaaggttatatataatccagcgtcccagcaatctagttactatgttttgtggttttgtattattggttatgtgccccctttattttatggttgc

SEQ ID NO: 26920 - DNA, 2351 bp, Oryza sativa
  ref <308>: DATABASE ACCESSION NUMBER: AK102362
  ref <309>: DATABASE ENTRY DATE: 2002-08-28
gtccgcagctatcggggagcgccgccgccgccgccaccgccgccaccgctaggctttccttccccttcccccaccagaagcttctcgccggagaaggaaaggaggaggagagatggcggagcggctgacgcgtatcgcgatcgtcagcgaggacaagtgcaagcccaagaagtgccgccaggagtgcaagaagagctgccccgtcgtcaagaccgggaagctttgcatcgaagtaactccggcgtcgaagcttgcgttcatttctgaagagctgtgtattggttgtggtatttgcgttaagaaatgcccgtttgatgccattgagattatcaaccttcctaaggatttggaaaaagatactactcatcgctatggtccaaacaccttcaaattgcacaggttgcccgttccaagacctggtcaagttttaggccttgttgggacaaatggaattggaaagtcgacagcactcaaagtgttagctggcaagctcaagcctaatttgggacgatttaaaaatccaccagactggcaggaaattctgacatacttccgtgggtctgaactccaaaactattttacacgcatattggaggataaccttaaggcaatcatcaagcctcagtatgtggatcacattccaaaagctgtccagggaaatgttgggcaagtacttgaccagaaagacgagagaggcgtgaaagctgagctttgtgtcgaccttgaattgaaccaagttattgatcgaaatgtaggagatctttctggtggtgagctccagagatttgcgatagcagttgttgctgtgcagaatgcggaaattttcatgtttgatgagccatcaagttaccttgatgttaagcagaggcttaaggctgcacaagtcgttcggtctttgcttagacccaacagctatgtgattgttgtggagcatgatttgagtgtcctggattacttgtccgactttatttgctgcttgtatgggaagccaggtgcttatggtgtagttactttgccgttttcggtccgagaaggtatcaatattttcttggccggatttgttccaacagaaaatctacggtttcgagatgaatctcttacttttaagattgcggagactcaggaaagtctgaggagattgagacataccagcgatataagtaccctactatgagtaaaacacagggcaatttcaagctcactgttgttgagggtgagttcactgattcacagattgttgtgatgcttggtgagaatgggacagggaaaactacattcatcagaatgctggctgggttgttgaagccagacactgtggaaggaactgggattgaaattcctgaatttaatgtgtcctacaagcctcagaagattagcccgaaattccagcattctgtgaggcacttgcttcatcagaaaatacgggattcatatactcatcctcagtttgtgtctgatgtcatgaagccactgcaaatagagcaactcatggaccaggaagttatcaatttatcaggtggtgagctacaaagggtggcaatatgcctttgccttggaaagcctgcagatatctatctgattgatgaaccaagtgcctatcttgattcggagcagcgcattgttgcttcgaaggttatcaaaagattcatccttcatgcaaagaaaactgcatttattgtggagcatgatttcatcatggctacctacttagctgacaaggtcattgtttatgaggggcggccttctatcgactgtactgccaatgcaccacagtctttggtatctgggatgaataagttcttatcgcatcttgacattacttttagaagagacccaaccaactataggccaagaataaacaaactggactccacaaaagacagggaacaaaagtctgcaggatcctactactaccttgatgactaatttgaaggcgtacagaatcttcttgtggagcttcccgcccataatttgcccaggccttcgatgtcctacgcattacttgttcagaaggttactttgaagctaccacagcttgaagcatgctaaataacttggctgcaggagtgaagtggtatcatcatcagttataaggctgagcatgtgatgctgacacttgagttcttttgctggtttgatatatatgatgatgggaaagatagatgttactgttaaactgagcaactttgtcaggatcggaagattgtgaatttttgtgtatttttgcattattgtatcgtggatttaccaactggcacccttaaatcgttggttttataggcataaagtttttgagctgttactcatgttaccaatgttatcaaagttctctgagttattactgttaattc

SEQ ID NO: 26921 - DNA, 2361 bp, Oryza sativa
  ref <308>: DATABASE ACCESSION NUMBER: AK102363
  ref <309>: DATABASE ENTRY DATE: 2002-08-28
tttcaactggggcgccgctggcgtgtctacgtcggtgtggcgcggcgcccgcctccgcgacgtgctccggcggtgcggcatcatgcccagcaagggcggcgcgctcaacgtgtgcttcgagggcgccgaggacctccccggcggcggcggctccaagtacggcaccagcatcacacgccagtgggcgctggacccgtcgcgggacatcatgctcgcctacatgcagaatggcgagccgctgctccccgaccacggcttccccgtccgcgccatcatccccggctgcatcggcggccgcatggtcaagtgggtcaagcgcatcatcgtcaccaccgccgagtccgacaactactaccattacaaggacaaccgcgtcctcccgtcccatgtcgacgccgagctcgccaacgccgatgcgtggtggtacaagccagagtacatcatcaacgagctgaacgtgaactcggtgatcacgacgcccgggcacgacgagatcctgcccatcaacggcatcaccacgcagcgcggctacaccatgaagggatacgcctactccggcggcggcaagaggatcacgcgggtggaggtgacgctggacggcggcgagacatggctggtgtgcgtgctggacctcccggagaagcccaccaagtacggcaagcactggtgctggtgcttctggtccgtcgaggtcgaggtgctcgacctcctcggcgccaaggagatcgccgtgcgcgcctgggaccagtcgcacaacacccagcccgagaagctcatctggaatctcatggggatgatgaacaactgctggttcaaggtgaaggtgaacgtgtgccggccgcacaagggtgagatcgggctggtgttcgagcacccgacgcagcccgggaaccagaccggcgggtggatggcgaggcagaagcacctggagacggcggaggcggccgcaccggggctgaagcggagcacgtcgacgccgttcatgaacaccaccgacggcaagcagtttaccatgtccgaggtgcgcaagcactcgtcgcaggactcggcgtggatcgtcgtccacggtcacgtctacgactgcacggccttcctcaaggaccaccccggcggcgccgacagcatcctcatcaacgccggcaccgactgcaccgaggagttcgacgccatccactccgacaaggccaaggcgctcctcgacacctaccgcatcggcgagctcatcaccaccggcgccgggtacagctccgacaactccgtccacggcgcgtccaacctctcccagctcgcccccatccgcgaggccatcaaggcgccggcgcccgtcgcgctctccagcccgcgcgacaaggtcccctgccaactcgtcgacaagaaggagctctcccgcgacgtccgcctcttccgcttcgcgctgccgtcctccgaccaggtgctcggcctccccgtcggcaagcacatcttcgtgtgcgccagcatcgaagggaagctgtgcatgcgggcgtacacgccgacgagcatggtcgacgaggtcggccacttcgacctcctcatcaaggtgtacttcaagaacgagcaccccaagttccccgatggcgggctcatgacgctgtacctggactcgctccccgtgggcgcctacatcgacgtcaaggggccactcggccacgtcgagtacaccggccgcggcgagttcgtcatcaacggcaagccgcggaacgcgcggcggctggcgatgatcgccggcgggagcgggatcacgcccatgtaccaggtcatccagtcggtgctgcgcgaccagccggaggacacgacggagatgcacctggtgtacgcgaaccggacggaggacgacatcctcctccgcgacgagctcgaccggtgggcggcggagtacccggacaggctcaaggtgtggtacgtcatcgaccaggtgaagcggccggaggaagggtggaagtacggcgtcgggttcgtcacggaggaggtgctgcgggagcacgtgccggagggcggcgacgacacgctcgcgctcgcctgcgggccgccgccgatgatcaagttcgccgtctcgccgaacctggagaagatgaagtacgacatggccaattctttcatcgtgttctaaactcctactactaaattatacgcaccgcattaattattttggtatacgtacgacgatgtatatacgtgtcgtgccaattagaaacgaaatgctgcatgcatgcgtatgcaagatgagagaaaaaaaaacaatatctaagttgtagtagtgtactcttgataatatcctagagtacatactgcatacataggccatgatttccctttctaagaggctagcggttgattccttcc

SEQ ID NO: 26922 - DNA, 1905 bp, Oryza sativa
  ref <308>: DATABASE ACCESSION NUMBER: AK102364
  ref <309>: DATABASE ENTRY DATE: 2002-08-28
gggtcgacgccaccccccaccggccggccccgtctcgccgtcgccgccgtcgtctccgccacccaaaaccctagccctgcagcctcccctccgcagctcgccccctctcctcgccatggccaccaacggcagctccccgagggcgagggagactgagagcagcctggagaaggtgaagcggcagctctcgtcggggtccgggcggtacctgctgcaggggccactgctgaagcgatctgagacgttgaggaaatggaatgagagatgggtaattttagaccctacttcaggaaagatggaatacaaaattcggagaaatgaaactgccattaaaggaaccattatatttgatgcttcaagcactattaccttgtcccctgtaaatttccaagggatgccaaagtatgatggctgctgtttctacattggaactcctcaaaaaaaggattactttctttgtgctgaaactcctggtgctgcaaaggcttgggtatctacgttgcttgcaacacaattagtactacaagcgcataaagaagcagtgaattctttggctgggaacggctctcctgccacgttaggtacagttgctacagcagttgctaatgccaacgctactgctttggaggctaccaaggagatagaagcagcaatgaaagtttcaatgagggcagctcttgggttgggtgcaaacaatccaaaggaaggtcaacttgatgatttaaccatcatgaaggagactcttcgggtgaaagatgaggagttgcagaatttggccaaggatattcgtgctcgggatgctacaattaaggaaatagcaaataaattaacagagactgcagaggctgcggaagctgctgcttctgcagcccatacgatggatgaacagagaagacttctatgttcggagatcgagcgcctaagacaagcaatggaaagacaaatggaacaatccatgctcaagctaagacgatctgaagaaaaggtaattagcttgagtaaagagaaggaccaattgctgaaggaaagagatgctgcacttcaggaggctcatatgtggcgcactgagctagggaaagctagagagcaagcagtaatacaagaagcaactattgccagagcagatgagaaggtaagggcatctgaagcagatgctgcagctcggataaaggaagctgctgaaaagttacatgctgttgagaaagaaaaagaggagcttctatcccttgttggtattcttcaatcacaagtccagagagagcaaagcagcacgaagcaggtatgcgaagagagatctgaatcatgctccggcaccgataactcccctcccttgacaaagcacgtcgatgcatcagatgacgatgtcgacaaagcttgtgtgagtgactcaagatctgtcctagtttccaatgataacactgaagtccaactggccgtggatggggtcgacatccgtcctatcggtgatgcggagtggggtagtttccagcagtcggaagcattgatcgccgatgtgcgggaggtctccccagaatcagaaggcggcagcttggatatccctgtggtcaaccccccaccagtgagcgatcatatccagggaggcgcaacccacccctgaaggcctggagccaaatacattctgggattgttgtgattattgaggataaccgactgggatttgaatcctttcgagaattgctgtggcaggagttcgcaccggtgcctggttgtatgttcattgtattaaaactatacgactcaaataaaagatagcggtggcttgtgtgtgtaaattgttcggttcaagctctcttttgttacattctgacttcaatgcattaaagtagtagtaactgttaaaacggcagattagcagtgtgaatgtgagatcttgtcaacttggcc

SEQ ID NO: 26923 - DNA, 2044 bp, Oryza sativa
  ref <308>: DATABASE ACCESSION NUMBER: AK102365
  ref <309>: DATABASE ENTRY DATE: 2002-08-28
gtcacctgtcagctcccccccctccctccagtgagaagatcttctcttcttcgccgtcgtccgccggagcgccgccgcagaacgaccgccatctctccccggcgacctcgccgttgcgtgagaggcggccgcgctacgtcttgcccggagcagggagcgctacgagtcacgacgacgtgggggaatatcgcacgtcgccggctggtttgtcagtcgcgatgcaggtggagctcgctgaccgcgcggcagcccggcccagcgagacgggggaggctccgccgtcatctccagccgccgccgccgctgcatcagcagcagcggaggacgcgccgctcttgccaggtggaggtgggggtgtgcggcggcgggtggtggtgagcgagcggttccggcagcgcagcggatccttccggcgggaggtccgccgcgcggccgaggagacctacctactcacgcgcctcacgctcatcctcctccgctacctcgggataggctacagatggatcaggcagttcctagccctctgttgttacaccttcttgctcatgccaggtttcattcaagttgtatattattatttcttctcgagccaagtttgtagaagtgttgtatatggagaacaaccaagaaacaggctggatttatacatacctaccgatagaactgggttgaagccagttgtggcatttgtcacgggtggagcttggatcatagggtacaaagggtggggggcccttttgggcaggcgcttggcagagaggggcatcttagttgcatgcattgattacagaaactttcctcaagggactattggtgacatggtagaagatgcatctcaagggattgcctttgtctgcaataatatagctagttatggaggtgatcctgaaaggatttatcttgttggacaatctgctggtgctcatattgctgcttgtactctcttacaccaagctattaaagaatctggtgaaggagatgcttccacttggagcattgcacagctaaaagcttattttggtatttctggcggctataatcttcttaacttggtcgatcatttccataaacgtggcctgtaccgatcgatctttctcagcataatggaaggcgaggagtcgttgcaaaaattttctccactggtgatggttaaggacccagctgctaggtctgcagtatctctattacctcgaatattcctttttcatggaacaagtgactattcaataccatcggctgagagcgaggctttctttgatgctttacaacagaatggcgctaaagcagatctgttcttgtatgatggaaagacgcatactgacttgttccttcaggatcctctccggggtggtagggataagctgctcgaagagattgttactgtgatacacaatgacaatccagatacatctgcccagcatcttgctgtacctgttgcacgccgccttgttcctgaattcatgcttatgcttgctggaagagttagtcctttctgattatgttggcgaccagtgatggcagctatgtatatattcaatgcaaggattgagcccagagaaatctgctgctcccggattagctagcagctagtcagttagtgtagtgttccaattaagatgccaaatgtaccccttcgttgagtagctacccgccagtatgtacagatcttgcctcagacgtctgtcattgactcattgttgtattgtatcttaaggtctagctcattatgctttagtaacacataacttgatatcttatgaagctctgtttggacaagggtcaatctgaggagagagcttgttgtgaattggaagaatattgtgaagacaactgttctgaccgaagaaaatcgtcatgagatgtctcctgcctttctgtaattcagtagtcagtaaattcagctcccaatagagttgctcgcagtactggaatggaggggtgttctggaagacgtttcatctgcgcacttgaagatgtctgtgtgtcttgtaaaagagtgtgtggctcagttattgatcaattagacaagaaaacattgcatgcg

SEQ ID NO: 26924 - DNA, 2846 bp, Oryza sativa
  ref <308>: DATABASE ACCESSION NUMBER: AK102366
  ref <309>: DATABASE ENTRY DATE: 2002-08-28
gactctccttctcatccaagccaccacccgtgaaaatcttgggagataaatccatctccaacctccaccacccccgattcttcgcgattagttgtttccttcttcttcgcaggattccctcctgcgaattctgcatcgccatcatccactcctgaaggtccagtgactttacctgcattgtgtgattgaggcctcacttgtcgtcgcacaccgtcttgtttgcggcaatggaggatccacagggtggtcaggattgttccaagtttggggcctttgttgacaagaattccggtgcttcatcgagtagtgctgctgacattgagcttcagaacatgtgtggtacttctgtggcaaggactgcttctttgagcacgggaagggcttcgccttctcaattcgcaccgactgttggaagatatcatcgtgctgccggctcctgccaaagtgatgttctacctgatgagcagtctcttgcatcagcttttgacatggttctgagtttcagaaatcaccctgttgattatcctaccaatccctgcaatgttgtgccaagtaatggactatatgtatcaggccctatgagggctacttcagttcagagctttgatccactgcttgttcaggatgaatccatgcgtccacagtttggcgctggacatggcaagctaaagactgatgagttcactgttgaccaacaagaacaagcacacatgctctcacattactttgggaattggccacagaactatgggatgaataatatgggtggagttgccagtactccatacaagccatcagcttcactctaccagcaaccattttatatggatgagcaatctcaaatgtatgcaccttatcagcagattccttcaaacttcttgttgcagcatgatatggatgtacagaaccactcttctatgcaaccacactatgtttatccacaaatgcaacatgctgctgggtcaaatgttaggagcaatcaacaggctgcagcttgcacttctgcaaggggcagatcaacatatggacatcaactgttgctggatggtgctgtttaccataatggaaataaccagatgaacagtttgtatatggatggttttcctggtatgtatactgacagttcatttgactccagtgattttcaccgtctgctggaagctgaaaagtttgcccatccgtatgaactaaactcttcatccaaaggtttcttgcaacctcaaatcccagatgatctcagcacgatgaagatgctgatgaattctgctggggtaaatcgagtaagagctatcaagttccctcctacagtaaatggctatagtggtgtgggtcgaagaaccaatggttatggccataaccatctggatgttaaaagtgatgaaaccttgcacctcaacgggttgaattcccagtttatgtccttaaaatctgagtatgatttggcgatgaaatcaacacagctgaattatggttcagttgatgaagttgctggaaggatttatatgttagcgaaggatcaaaacggctgccgctttctgcaaaaagtattcactgaaggcaccaaagaggactttgaaaaaatcttagctgaaattattgatcattttggagaacttatgattgatccattcggcaattatttggttcagaagttgcttgaagagtgcagtgatgatcagaggacgcgtataatttgtgaaattaccagagtgcctggagagcttattacagttgcttgcaacatgcatgggactcgcacagttcaaaaggtcatagatacaataaatactccggaacaaatttcgaaggttgtatctgcattgagtcctggagcaatgcgtttgatgacagatactaatggaagtcatgttgcacaacggtgcttgaagaaattgttacctgagtataaagcgttccttcttgatgttgccgcattgcgttttcttagattagcaaaagatcaacatggctgttgtatcattcaaaagtgtattgaacattcaaatgatgagcagaagtacaacttgttgtgcaagatcacatccagtgcccttagcctttcagaggatcagtatggaaactatgtcattcagtttgttgtcaacctaggaattgaatgggccacaagcaaaatagtaaaagaactaaagggtcactttggatatctatcaatgcagaagtgtggtagccatgtcgtcgaaaattgtctgaagcaagcatcggagctcgaccgggaaatgattatccatgaacttatggctgattccaagttaccgcatatcatggcagatccatttgggaattttgtgattcaaacagcacttaaagagtgcaagggtgaactacatagctcctttgtcgaagctattaggccgcatgctcctgcgctgcagaacgatgtgtatgcgaaaagggttttatcgaagacatatctgaagaacaagcaataccgacttggcattttttagcctgtcatttgggtgattgcaggaaggaaggtgcaagttcaggcagcatgtatcagaacaggacttttagtgtacaatggtgtgataaagaaaaacagttcttagagaaaatgatctttttgtctcaaggtagtcttggcgaaggaaagcttttggttggaccatttcagtatatttacgtttgtagaattaatatagccaaaataactgtcagttgtgttgttggatcggtcattaatcatgtagtacgtcctgtatctgcaaaaactgtagtttatcagtaacatcttgtaatcactagtctgatcagatgagctgtatcatctgcaagggtttatattccggttgtgtccttagtaaaattttagggtttttacc

SEQ ID NO: 26925 - DNA, 2686 bp, Oryza sativa
  ref <308>: DATABASE ACCESSION NUMBER: AK102367
  ref <309>: DATABASE ENTRY DATE: 2002-08-28
ggccgccgcaattcgctcgccgccgccgccgccgccggtgggcggtggcttgccacctccctctccgcctccggcagccttctacgctgcccgtctccgtctcttctcccttcacccaaatccccagacattcggccatggccccccctgactcttctctcttcttggccgcccgccgcggcgctgcctgacgaggatcggcggctcggggcggaggaaccccgagcttccggcgcgagggggtggcctcctcctcctcctcatcctcatcgtcgccgccgcccacgtcgtctcgccctcggccaacgcccgagctcgaccacaaactaaaaatcaagaacaagaaagttttatgttctgacaaactgaatgtgaagatgcaaagcttttacaggtaacaggggatatctcttacaatggctatcagcttgatgaatttgtgcctgagaaaacagccgcgtatatcagccaatacgatttacacattcctgagatgactgtgagggagactttggacttctcatcccggtgccaaggtgttggaagaagaccaaaaatactcaaggaggtgagcgcgagggagagcgcggcggggatcatacctgatgcggacatagatatatacatgaaggctatatcagttgaagcttcaaagagaagcctacagacagactatattttgaagatcatggggctagagatatgcgcagacacgatggttggggatgcaatgataagaggactatcaggggggcagaagaaaagattaaccacagctgagatgattgtggggcctgcaagagcatactttatggatgaaatatcaaatggtctggatagctctaccacttttcaaataataagttgtttccagcaactgacgaacatcagcgagtacaccatggttatttcacttcttcaaccaacacctgaggtatttgatctttttgatgacctgatattaatggcagaagggaaaattatataccatggccctcgaaatgaagctctgaatttttttgaggagtgtgggttcatatgcccagaaagaaaagaggtagctgactttctccaagagatcttgtcctgcaaggaccaacaacagtactggtctggtccaaatgaatcttacagatatatatcaccccatgaattatcaagcatgttcaaggaaaatcacagagggagaaaactagaagaaccaattgtttctccgaaaagcgagttgggcaaggaagctttagcattcaataaatattctctgcaaaaactggaaatgttcaaagcctgtggagcaagggaagcactcctaatgaaaaggagtatgtttgtttatgtcttcaaaacaggccagcttgccattattgcactcgtaacaatgtctgtgttccttcgaactcgcatgacaacagatttcactcacgcaacttactatatgggagcattgtttttttccatcttaatgatcatgctaaatggcacaccagagataagcatgcagattaggagactcccaagtttttacaagcaaaagagctattatttctattcttcatgggcatatgcaataccagcttcagtcctaaaggtccctgtttccatattagattcacttgtatggatatgtatcacatattacggtattggttatacagctagtgtttcgaggttcttctgccaatttctgatgctttgttttgtccatcaatcagtcacttcgctgtatcgatttattgcttcatacttccaaacacctactgcgtctttcttctacctttttctggctctaacattcttcctcatgtttggaggcttcactcttcccaagccctccatgccaggatggttaaactggggattttggatttctccaatgacatatgcagaaatcggcacagttattaatgaattccaagcgccaagatggcagaaggaaactattcaaaacataacaattgggaaccgaatcctgattaatcatggcctatattacagttggcacttttattggatatccattggagcattgttcggatcaatcattttattttatatcgcttttggattggcgctagattatattacatctatagaagaatatcatggaagtaggcctataaagaggttatgtcaagaacaggaaaaagattctaatatacgaaaagaatctgatggtcattcaaatatttccagagcaaagatgactatacctgttatggaacttccaattacgttccacaatctgaactactacattgataccccaccggaaatgctgaaacaaggctatccaacaaaaagacttcaactacttaacaacataactggtgcattgcgtcccggtgttctttctgcactaatgggtgtcagtggagccgggaagacaactctgctagatgtattagcaggaaggaaaacaggaggatatattgaaggggacataagaataggtggatatcccaaggtgcaagaaacatttgttagaatcttaggttactgtgagcaagccgacatacattccccacagctcacagttgaagagtctgtaacttattctgcttggcttcgtctaccttctcatgtcgacaaaaaaacaagatctgtatgtcccttggaagttggaacaacacagacatatactgattttaataacagatagataaacaagaagcttacctaagaaact

SEQ ID NO: 26926 - DNA, 1432 bp, Oryza sativa
  ref <308>: DATABASE ACCESSION NUMBER: AK102368
  ref <309>: DATABASE ENTRY DATE: 2002-08-28
gggtccaagaagagttagcccaacggcacagacgggtcggagactcggagagagcggcgtgggtctcgccgccgaagcggagcacgcggatggcggcggcggcggcggcggcgtagttacagggcatggcggtattccggaggaggttggttgtgattccgcggtgctgcagactccttgctgaccagacaaaggagcataatgggactgcacatatggtgttggttggttgtcttgttcagcttggccccattgtgttgtagtttgagcgcagatggcctggctcttctggatctagccaagactctgatactgcccagctccataagctcgaattggagtgctgatgatgcaactccgtgtacatggaaaggagttgattgtgatgaaatgagcaatgtggtttctcttaacttatcatattctggattgtctggttctctaggtcctcagataggactcatgaagcacctgaaagtcattgatttatcaggtaatggtatatcaggaccaatgcccagttccattggcaactgcaccaaactggaggtgctccatctactacgtaatcgattgagtgggatccttccagatacattgagcaatattgaagcattaagggtttttgatctctcccgcaatagcttcacaggcaaggtcaatttcagatttgagaactgcaagcttgaggagttcatcttgtcattcaattatctcagaggcgaaatcccggtgtggatagggaattgcagcagcttgacacagcttgcatttgtcaacaatagtatcaccggtcaataccaagttcaatcggtttattgagaaacctttcttaccttgtactttcccagaactccttgtctggcacaatccctcctgagattggtaactgccaattgctgatatggctgcatctagatgcaaaccagctcgagggcactataccaaaagaactagcaaacctgaggaacttgcagaagctctatctttttgagaattgcctcactggggagtttcctgaagatatatggggaatccaaagcctactatctgtcgacatctataaaaacaatttcactgggcagctgcctatagtgttggctgagatgaagcagctccagcaaattacgctattcaataattcattcactggtgtcataccacaggggttgggtgtaaatagcagtttgtccgtaattgatttcataaacaatagttttgttggcacaatccctccaaaaatttgttcagggggaagattggaagttttgaacttgggttcaaatcttctcaatggtagcatcccctctggtatcgctgactgcccaactttgagacgagtaattctcaaccaaaataatctcattggatcaattccacaatttgtaaattgtagcagtcttaattatattgatctcagctataatttatt

SEQ ID NO: 26927 - DNA, 1211 bp, Oryza sativa
  ref <308>: DATABASE ACCESSION NUMBER: AK102369
  ref <309>: DATABASE ENTRY DATE: 2002-08-28
tgaccatgcaaagctcacacacttcagctcgagatcgagctaagctagcaggcaaaggcattagcgattaattagcatggcgtcgctgtggcggccggcgctggcggcggcgatgtgcggcgcgctgatcctgtcgtcgtcgtcgtcggcggcggcggccgggaagaagaccgggcggatcacggtgtactgggggcagacggcggcggaggggcggctccgggaggcgtgcggcagcgggctgtacacgacggtgatcgtctccttcctcaccggcttcggcggcggccggtacaagctggacctcgccggccacgaccggggcgccgtggggcccgacgtgaagtactgccagtccaggggggtgctcgtcctcctctccatcggcggcggcatcggcaggtactccctcgcctccaaggccgacgccaaggccgtcgccgaccacctctgggacttttaccttggcggccgctccaagtcccgccccttcggcgacgccgtgctcgacggcatcgacttcgacatcgagctcggccgccccgcccactacgacgacctcgccaggtacctcaaagcttacagcgggaggaagccagggggtaagaaggtgtggctgacggcggcgccgcagtgcccgttcccggacaggatgctgggcgaggcgctgcgcacgggggtgttcgaccgcgtccacgtccagttctacaacaacccggcctgcagctaccgcgccagcaacgccgccgcgttcgccgcggcgtggaggaagtgggcgtccagcctgccgaggagctccgtctacctcgggctcccggcggcgccgggcgcggcgaacagcgggtacgtcccgccggcggcgctggcgggggaggcgctgccgatcgtgcagcggtcgaggaactacggcggcgtgatgctgtggagcaggtactgggaccggcgcaccggctacagcaagaagataaagcatgccgtgtgattgtactactatgtgtgcttaatattggaataagggtggccttgcagtagttcttactgctgacaagatggccctgcgatcacaccttatgtgactgtataattagtgtgtgtttggggaagaagagcatatggatgctagcttccaagtatattgtgtatgtgtatgtccaataataatattgtgtaataaaataaaatggcaagtcgtccttgtcaggaagaagatc

SEQ ID NO: 26928 - DNA, 2102 bp, Oryza sativa
  ref <308>: DATABASE ACCESSION NUMBER: AK102370
  ref <309>: DATABASE ENTRY DATE: 2002-08-28
ttttactcaagtctacgtgatgtgcagcctggcccaagagacggcactcttaaatgtttcataagaagaaaccggactactcagacatattatctgtatattgggctcacagaagcacttgccgatgatgggaagttcctacttgctgcacgcaaatgcaggaagcccacatgcacagactacctgatttcccttgacatgagtgatatgtcaaaggggagcaacacctatattggcaagctaaggtcaaactttctcggaacaaagtttaccgtctatgatgcccatccaccatatgatggagctgttgtctcaaaaagtcggtctgcacgtgtggttggtctgaaccaagtctccccgagagttcctgccgggaattacccagtttcacatatttcctacgaattgaatgttttgggtgcaagaggtccaagaaggatgaactgcattatggattccatccccacatcagctgttcaagagggtgggaaagctccgacacagactgaatttcctctcagtggcctcgactctttcccatcaatttcattcttcagatcaaaatcagctcgaatagatagtgcaacttcacaattatccactcagaaggaagaaaagctggttctgaagaataaatctcctaggtggcatgagcaactgcaatgttggtgcctcaacttccgtggacgggttactgttgcctcagtgaaaaactttcagctggtggcgtctgatgaaaatgggccaactaaccaggagcaggacaaggtgattctccagtttggaaagattgggaaggacttgttcaccatggactaccgttatccgatatcagcatttcaatcatttgcaatctgtctgagcagttttgataccaaaatagcctgtgaatgagataaggtgatcatttctctctattcagctttactactatcgacatttacacatggttacttaccctgcttgatataatgacacttaatacttgcttttatctagatggtcttcagtttacctaattgtttcttcaacagtattatgaaagctgactcacattttcagaaccttccaaacttcagacactagatagtcagattaggagtactagtagagcagtagttgatccaaaatctgagctggctgttaggcatatctgaattcatcggtctgcccatatgcaaatcgagcttttctgttgggatgtcacatcagaagagaatagatggcaacacatgtatgcaatttgcaccagatgatagctgccctctgtgttttacccttagctccgtaatcactactgattcagcctgttctgtaaactacagttgcatacttgcttgggtacggtttatgtgccatgaaacgtgacacgaagcaaagaaaaataattttagagtagggattttatgtttctactcttagcggtttaaatagaaaacaataagaaaaccacgtagaccaatctgaaattaagtttcaaaaattcaaatttagccttggtttataggctgacgagttgccaatggaactcgcaaaaatacctcttaagctgcagttgcgcagttgttttccatcactgtccaggcatagctgcattcatgcagctaaatcacaatcagatgaaccgcatcctaatcaagatttttggccgcgaatgcaatgtacctgcaggtgctggatgaaggacgaaccgtggaagcatgataagctggatcggcaggcgtagcgtgcacgagtcacgcttgacattgaagcacaaggatttgtttggatttgggcagaaaaaaaaacaccaagtccatctcctgaagttgctgccccggatgctgctgctgcagtgtacataatagccacctgtgatctttctggcctcctggcttgtaattctgttctagtttgttttttttttctaattgttacacattcttgggcggtgccggctgttgaaacctagagagtttcttcttctttttaatctcccccaatttacattgtaaacggcaggcttgtgtagccaaaaatgccaagttgtgtgttgcaagttgcaacttgatgtgttctttaaattagtgtaatacatggagtaataggctgcagtgctg

SEQ ID NO: 26929 - DNA, 2293 bp, Oryza sativa
  ref <308>: DATABASE ACCESSION NUMBER: AK102371
  ref <309>: DATABASE ENTRY DATE: 2002-08-28
ggcagcccgcatcccatcccatcgcatcgcgtcgcaccgcaccgcaccgcaacccgcccaaaccctaaccctcgcgccatctcgtcctcgccggcgtgctccgccgccgccgccatgtccgccaggctgctccggcgagtgctccaggagcgggagaccgccccgcaggaccctgccgccgccgccgccgccgcagaggtcgagcgggaggaggaggaggaggcctcccctccccgtgtcgccgccaggaaccccttcgatctcctcgacgaagaggaggaggaagaggaggagaaggaagatgaagtgtattctgagcaacctgtgagttacaacgaacagaaacattctgtgaacaagaagcctggcaatgctgttcctgaaacaaacaagaaatcaaagaaaaagaagaaaaagagcaaggcagacaaacaagtgtcaacaaagtcaagggatgaaaagtcactggattcaattctggaagatttatctattgaaaagaagcccatgcagcaaagagttaatcaaaatgaaagagcatctgggaaggagattgagatagatgaaaccactcctgggacatcatctattctctcaattgatcccaaacatctaaaagctgaaaatgagatgaggcgcatttttggatcaaaagtagtggattcacttgaaaatcaacggaatgtgcctagcagttcaacatcaaggctacgaggtgttaggcgcgttgcccacaatccaagaaaaacccttcttgttactccatctagctactggccaccatgggataaatcaatgtcaatggatattgtggagacaaagagtggtttcaactatttcaggtacatatatgatccttctgtcagtcatgtgcaagacttgtttgaagttgccaaatctgcaaatgatctcaatgctattgcagctatattagcaaagtacccttatcacccagaatcattgttaacatttgctgaacttttcaaatattctggagaacatcaatcgtcagcagatgctgttgagaagtgtctatttgctctggagtgtgcttggcatccattgtttagcccactgcacagcaactgccagctgaaatatagccatgacacaaacaagccattctttactgcgctttttagtcacatgaaaaatttggatagacgtggctgccatcggtctgctttagaggtctgcaaattccttctttcattggattctgatgatccaaagggtgctctattctgcattgattactttgctctaagatcacaacagtacaaatggttggaacagtttgcagaagagtaccagtgtgataactccttgtggttattccctaatttctcattttcccttgccattgcacggttctacgttgagcgtgatgcaacaaatggggaggcttctgaccattctgacaagtcaacatctgtagatctcatgaagcaagcattgatgcttcatcctttggtgctgcgcaagattgttgacaaggctcctttgaaagactcctcgtggacccaaatactcaggaatgtgttctttggatcagcaaagccaggaagcccttcccttgagcatatgattagcatatatgttgaacgccattacatcatgtggaggttcccagaactgcagaatttactcaaagatgctgctcttttggtgattgaatcactaaaacaggataacagagaggcccaggactgggcatgtgttagaaaagaagcattctcttcagataagaatgagtactctcatcttcttgtttcagacttctccgacacaacaccatcactcccccctgaagaattgcggccattcatggttgctcctggaatggcacatgagatgccgccagctgaacaagaactggggattgaggtcagaccccgtgccccccgtgaagttgcagggcgcaatcctgcgttggttttcctggaatcactgctcccgtgggttgactatggtgacaatcatcatgacgaaaatgaccaaaacaatgatgactgattcaacccaaagcaccaagtggcatggatgcctagttagcagaacaagacttaaattgcacccatgtgctttcctgtctctatgatgattaacacaaattgctgtcaatcattgtatcaccttcacactctcaagcaacaatcatcagaaactagtgctctagtacttttcatggtttcggcatacatgtatagctgatccaccaaaatctaaatcgctgaaatattaagtcaattttgggcctggaaacatgagagatcaatgtgtcaatttctgc

SEQ ID NO: 26930 - DNA, 586 bp, Oryza sativa
  ref <308>: DATABASE ACCESSION NUMBER: AK102372
  ref <309>: DATABASE ENTRY DATE: 2002-08-28
gagaatctttctctgtctggaggagtcgggtcggcggagtggaggggatcggagccggaggaggaaaagaaaaaagaagagaggggattgttggtaggataattcactaaccagaggccggctatagtattattagcttataattcactaacatgtagaagaagtgaagagagagagagaggggcgggcacaagcacaatggcctcccttgtatagaaagacagacagactagtaacccgacataacataacctaaccctgataccagtgcaaaccgttaccagagttttaggcttggtagattggcagtgtccaagatgttttttttttttttggggggggggggtatggcaagggattttgtgtttttggtttttctggagggtgcagaaggaaaaggaggaaagttggggttgtgtagctacaagctagtgtacatttgggggctttgatgaaaagaatgcatacagagatactgaagctggcgtaccttattggtttgtattgcgttgttttgcacttttgtttgttgtgtatgagaatcatacagaagctgggtgcaatgcaaatgatgtgaagaagaagc

SEQ ID NO: 26931 - DNA, 1630 bp, Oryza sativa
  ref <308>: DATABASE ACCESSION NUMBER: AK102373
  ref <309>: DATABASE ENTRY DATE: 2002-08-28
gagcccagtgagagtaggactggctcggctcgctcactcggtcagctgcacacacactgcacttcggctcactctctccactgttcttcttcctcggcgaggggggaaggaggaggcgagagctcgaggcggctaggaggaggagatggagggagattcggcgaggaggctcgcattgctggggctgtgcctgggcctgcttctgctggcgccctcccatctggcctcggccgctgcggtggaggatggcttgctcagcaatggtgactttgagacagcaccagctggtggttttgtcaaatctgcttcagttgctgaaggtgcatcatcgatccctggctggacgatcaatgggacagtcgagctcatctcagcaggccagcaccagggtggcatgattcttattgttccacagggggatcatgctgtacgtcttggaaacgacgcaagtatagggcaggtggtgcaggttgagaagggctcagagtatgctatcacgttcagtgctgcccgaacgtgtgcacagctagagtcactcaatgtgtctgtgctcggtggtgcatcacagacagtggacctgcagacattgtacaacatagaaggctgggatgcatatgcattggcttttcaggcaacagatgagcaggcgagccttgagttcaggaaccctggtatggaggatgatccgacttgtggacctatccttgacaacgttgccataaagaagctcttcactccagacaaaccaaaggatactgtggtgtcaaatggagactttgaggagggtccatggatgtttccaaacacgagctttggggtgcttctcccaaccaacctcgatgagcagacgtctgccttgcctggctggatgattgagtcaaaccgagctgtccgctttgtcgactctgaccaatacaccgttccccaagggaagcgcgccattgagcttctatcagggaaggaaggcatcatctcacagatggtcgagacaacccctcagaaagagtacagcctgacattcacattgggctcagcaggggattcatgccagccaccaatggctgtcatggcattcgcaggtgaccaggcccagaacttccactactcgcccatgggtaatgccacaagccaggctgcgaatgtgacattcacagcacgagctgagaggacgcgggtagcgttctacagtgtgtattacaacacgagaagcgacgaccacagctcgctctgtgggccagtgatcgatgatgtgcgcgtctggggcttgaatggagctgctgggttgaaggcaagtattgggctgctgcttggcattgttagcattgtcagtctgatgttgttctgaatctcttagtgattgtggtcgaaagatatataaacctcttctgtaagtatgaggaggccactagttttggtagtaagcttgaagtttctattaggttgagtaatgtgagattgtgagcttaggctaaagctacctgaagctatgtatggctgtttctgttgctttcttttgtgattcagaaagtaacatgccattgtgggaagtgtgtggtggttagtgtgccaagagcttgtaatgttcaaatatcatcccttcaatatattagaaatttcaggagttgatccg

SEQ ID NO: 26932 - DNA, 1103 bp, Oryza sativa
  ref <308>: DATABASE ACCESSION NUMBER: AK102374
  ref <309>: DATABASE ENTRY DATE: 2002-08-28
ggttccaccacttactgtaaagctgaagggaaaaaaactgaaaaagagaaatattcccccgcctgagatttctcagagacatttcgaaatttctcctcctcccagatcgccaactcaagaaagaacaccgcctcctcctcctcctcctccactcctactccaccgcatccgcctcaacctccatcaatggaactctcctccaagcgcgagcgccccaaggactccagctagagtgagctccctgatcgggccatggcgacgatagcagcagcccgtggaatctccaccaacgacatcgcccacatggcgttcgtgtgcaagcgctaggcgggcgctctgtgagttcactgctccaccttcggagaagtcttcagctctgatgcgtccgtctccattgatgaagcgcttctccaagggtcctatggattcgggctggggtgagctccctgcttgcgcagtcgtgaggatcacagcagcaagtggacttgcggacaaggacgtcaaccacatggtgttcctgtgccatcactgggcgaacgttctcctcgaggagctcacgatggcatcgggtgagtccccctctttccctcccttagagagttctgcagcggccacagggtggagaggggggatgcattcagctgctatgtcatcatcgcgatggagcaccattctatacgacttgttgttcgcaattgctcttcgcctgaaggatttggccgtgctgaggcttgtgtgcaagccatggtgggatgcattcccaggtccaccgtttctggtatgctccacacacttgctggaagaaccactggttggggaatcacaagttttgggtcattttctcccatgcaagttgcaaaaaattttcccccaaattcagtctgttggggtggatctcttgatgtacttgggatagtcgattcggacggccaccatgattgcaggattttttgtctgctctgtgagggagaggagagattaccaccattgccagattcacctaatggactcttcgtgttctagatctgtaacattcttatgagagcagttcatgttgtggcatcgtcattactttatcatttccatgagagaaaatttgtgct

SEQ ID NO: 26933 - DNA, 1962 bp, Oryza sativa
  ref <308>: DATABASE ACCESSION NUMBER: AK102375
  ref <309>: DATABASE ENTRY DATE: 2002-08-28
gagtttagagagcccaaattaggacaagccagcgtctctctctttctcgtctctccaatggcggcggcggcggcgtcgtcggagtcagcggatgccgccgccgctgggccgtcgacgctgagcatctacaaggcggcgcggcgcatcaagcggcgggagagcacgctgtacaacgcgctgcggagcgtggcggacgacgccgcgttcgtggcggagatcgcggcgctgtggccggcgctgccgctggtcgccaacctccgctgcgggctctggtacttgccgccccgcgccgtcgccgccacctgctacttcaagtccaccgatgggcacgcgggcaactgggccttctccaccgcccgcctcaacctccacctcgccctcctcgctggggagagaggagggtgcataattgttgattcaacaaggagagggaaacgtttccctgacagcatgtcaaagaccatacccatttggtgttgtgtcctcaaccgagcaattgagaggtatcggctgcagactaacaacaagtcagctgctgtagccaacaaagacgctgaaaagatctctgaatcatcaaactgggataactcagtgcatcttcctgtatgggttctagagactgagaaaaatgctatagaggggcgtatcgaggaatggacaacccaatttgaatcatgtggtgcagacattcgttctcttgcgttaagtttgaagaaaccactacgtccattgtggatatcacaaaggacacggatatggttaaatgaagttccagagcttgaatcatgggatttcacccctatcatattagtttcagcatctgcatctggtgcagtagctacacaaaggatgacttcagagttcagctggcactatattcctggagctggagatgatgaagagagttgggcacgtggtctcactcctacattattctggaagcactcatatgatctgcttgatggtggaccagacctttgtaatcagttagttgcagatattgttgaaaaagatagggtctatcgtgcacagagaggcgaatattctccccaaattacagctaagcctttgaagtgttcaagccatgatggtcctttcagtaatggtgatcatacaagtattgtgcaaccaatggactcggatcctcctaccgttactgctatggacaaacaaaattccagtgatggccatatactcttctggattgggacatcaaaccttgcagtagcatcaactctccaagttggagattccttagctgaagtggattgtatactgaactgtgacagcacatcaaatttacctttgacttcatcagagaattcttaccttgaactacctatggtgggatcaaaggacgaccggttttcgttgatgaaaaaccttccaaaagcagttagctttgcaaacaggaatttgatagcagggaagaagctactaatatgctgtcaaaatggagaggatataagcatctgtgtggccttggcgataattacacgattatttgattgcgatggattctttgatcatggcaattcatttctgaaaggagacgtcacgaagttggagatgaggaagaggctggtttttgtttgcaaatatgctgttaatgcaagaccatctagaggaaacttgaagcaggtctatggtttcctttgcagcgagaaggaacagttttcttgtttgacgtagtttatttacgtctagtcttgtggatcctgatcagttgtttcctttcctatcccctgcaagatgcatctatgtgttccgatcagttagggaagctctggtttctgagtttttcatgtcaactgatgaactgctagtgtatatggggaaccaatagtcgcaaattgcccttgggatttcactgacaaacaacctggagttgatctcataccaggttaatcgacaaactggcactgcttattaacctgttaatgatacgacggtggtttctgt

SEQ ID NO: 26934 - DNA, 1391 bp, Oryza sativa
  ref <308>: DATABASE ACCESSION NUMBER: AK102376
  ref <309>: DATABASE ENTRY DATE: 2002-08-28
ggctcctcgctagtccaccaccgcacctaacagccgccaacctctccctcgactcgtcgtcgtcggcttcgattcgatcgatcgaggcgaggaggaggaggagctagggtttcggatgggaggaggaggagggttgtagaagcgcgggggcaggctgcggtggatcgtcgatgggggagcagccggcgcggggggcggcgtcgtcggcgtcggagtcgtcgccgctgatcccaccgccgtcggagatcgacatcgaggccggggccggggaccagttccagtgccggatctgcctcgagaccgacgggagggatttcatcgcgccgtgcaagtgcaaggggacgtccaagtacgtccaccgcgactgcctcgaccactggagagccgtgaaggaaggatttgccttttcgcattgcaccacttgtaaagctccttactatttgagggttcatgttcacactgataggaaatggcgaacattgaaatttcgtttcttcgttactagagatatattattcatctttgctctagtgcagtttgtcatatctgcattagcgtatttggtgcattttattgatggattacagaattactggttgaggacagcctgggcatttgacaatgaagttagtttttattacatatgtggggcattgctattttttgctttgcttgggttatcaggatgcttcataacttgttatgaccgaagagtacggaatgacctggcacagccttgtcgagagttatgtctttgttgctgccaaccagggatgtgtgcagattgccatctacctggtacgctttgcatgtggacagattgcactacatgctttgagggctgtgcaacgacagctggagagtgtggtggttgcttgggtggtgctggagaagcagggttaccattgctctttatcatgggagtaatcgtgcttggactattcacagttatcggcattttctacagcgtcttggtagcaaccatggtgggtcagcggatctggcagagacactaccatattcttgcaaaacgaatgttaactaaggaatatgttgtggaagatgtcgatggcgagcgcgcggattggtgtccgccccctctcccttcggagcatgtccaacagctgaagtctctggggcttctataatctgtagcccatgattataccaatgatgaccttaatttaggacttgcggcactatccagctgtacaggagatgatacaaattaagcggtgaagcaggcgtttcggtttttaagcagccaaatgcacaacaatatcgtttgtctttttttgtacattgtaacaagggaatacctatctgaaaaatgacaacagcatttgatttttatacgatgaatggtttcacagttttatttcgatgagctc

SEQ ID NO: 26935 - DNA, 2251 bp, Oryza sativa
  ref <308>: DATABASE ACCESSION NUMBER: AK102377
  ref <309>: DATABASE ENTRY DATE: 2002-08-28
gacaattctccacacgcagccgccggcgcccgtcgaaatgctggccaggcctgggcggctcgccgcttccacccttcccaacgattccgccgccgccgccgcatccaccgtcctctccatactccgcggcgaggaccccgccagcctccccgcggccggcatcgacccgtgccccgccgtgttccagcaactccgcccgtcgctgcccaccgtcccggactccgcgctcccggcgctggcccgatgggcgggcgaagccaccgccgtctccctcctgacgtcccgcggcctctttgctgccgcctggcgcctcctcctggccccttcccccacgcctcctcccctcgccgccttcgccccgctcgtccgacgctacgcccgcctcggccgcgcccccgccgccctccgcgccttccagttcctccgccgccaccccgaccgctacatggccggcggcgacatccctgccgcggcgtccctgctaaacatggcggtcgacgcgctctgcaaggagggccacccgcgcgcggccgtggagctcttcgagcggtggcgccgcgaggagcccgactcgccaccagatgagcgggcttacaatatccttctccacggctggagccgcgccggcaggctcgacaaggtggggaaactctgggccgagatgcgcctcgccggggtgcgcccgacggtggtcacgtatgggactctcatcgaggggctctgcgtgaagcgcaggccagaccaggcgattgcgcttcttgacgagatgcgggaagaagggatcgaggccaatctgcttacttgcaaccccattgtgtacgctcttgcgcaggccggccgattccaggacgcccacaaggtgctcgagaaatttcctctgtacggtgtcgcgcccaacatttccaccttcaactcgctcgtgatgggctattgcaagcatggggaccttgctggggctagcagtgtgctcaaggtgatgacagaacggggcatttcgccgaccacaaggacatacaattatttcttcatgacctttgccaagaacagcgatgttgagtcagggatgaatttttatagcaaaatgatcggtaatggctattcaccagatcagcttacttatgtcctcttggtcaagatgttgtccagggcgaaccggcttgaacttgtggtgcaaatgatacaggagatgagaactcatggttttgagccagatttggcgacgagtaccatgctgatacatttgctttgccggcgtcatcaatttgaggaggcatgtgctgagtttgaggatatgtttaagagaggaattgtgccccagtacatcacttaccagaagcttatgagagagctcaagcgacttggtttggttcatctgatccaaaagttgacaaatttaatgcgctcagtgccacattctacaaagttaccaggcagctatagggataaggaaggggatgactccatggaaaagaggaaattgatattgcagaaagcacaggctgtttcagatgttttgaaggagtgtaaagatccaaaggagttgggcaagctcaaagaagatgaagagactgatgttgaggtcgcagataggttagtagccaacattagaagaagtgtatatgggggtgcctcaacgagctctgtaatggcacctctttcttgaatatggagttgcaaaaatgaaaatcataaagataagggacatgattgcatgtgaggggatttactgatagattgcattgttcatctcagaagttgaccacctaaatgattcgtgcacatgtttactgttgttgtttgggcccttcaagataaaagataacagagaagaggtagtgacatactactgtggttgtggtttactggatattgtcccatgaaggaattagctggttgatgtgtttcttgttttagggaaacattgatatggcagttatttactgatgtgctcatctgcagatgtcttggattgctatgagacctgtgtatgcctcatgcagtgatattgcattgaatcaggcaactcaggaaaagatgatgcctcattcgaagtctaaccagtgaacatagaattggtaggacattatttagcatgtggcagcccttgggtttggccgcttgtgcaactcatatacacaaaattttccattgtgtaaagaattttccgttgctttgttggtcggatacttcttcagatgctgttgttaaattgagatcatttagaaatcccatttcctgttaaacaaatacg

SEQ ID NO: 26936 - DNA, 3252 bp, Oryza sativa
  ref <308>: DATABASE ACCESSION NUMBER: AK102378
  ref <309>: DATABASE ENTRY DATE: 2002-08-28
ctctctcccgtgctgctctcccttctcctctcctcaattaccacgccgcagccgcagccccccaaccctagctagtacggcgggcgacctgagggggtagctgcctacctctatacctgctatctccgttcgatccgggtcgggctcgtgctgctgggggcgggggcaatcaatcggcgagctcggtgatccatggccgtggctgtggggtggctgtgagggtgcccccggcggcgctcccctccgcgcctgccggcgagggggctcggactgaagggatctaggcgagctgaaaattgaagtgcaggcaaggagataagagcagcgtccaaattgtgagtacttcattagcaggaggtagtggttgtgcttgcttggctcctttgcaatttggctttggcgaggtagcaatggctgcggcagtggcaatgcgagggagtagcagtgatggaggtggctatgataaggtttccgggatggactccggtaaatatgtgcgctacacgcctgagcaggtggaggcgcttgagcgggtgtacgccgattgccccaagccaacctcctcccgcaggcagcaactgctgcgtgagtgccccatacttgctaacattgagcccaagcagatcaaggtctggttccagaacagaaggtgccgggataagcagcggaaggagtcttcacggcttcaggctgtcaacaggaaattgacggcaatgaacaagctacttatggaagagaatgagcgactccagaagcaggtctcccaattggttcatgagaatgcccacatgcgacagcagctgcagaatactccgctggcaaatgatacaagctgtgaatcaaatgtgactacccctcaaaaccctttaagggatgcaagtaacccctctgggctcctttcaattgcagaggagaccttgacagagttcctctcaaaggctactggtacagctattgattgggtccagatgcctgggatgaagcctggtccggattcggttggtattgtggccatttcacatggttgccgtggtgttgctgcccgtgcctgtggtttggtgaacctagaaccaacaaaagtggtagagatattgaaagatcgtccatcttggttccgtgattgtcgaaacctggaagtctttacaatgattccagcaggaaatggaggaacggttgaacttgtctacacacagttgtatgctccaacaactttagttcctgcacgagatttttggacgttacggtacacaaccacaatggaagatggcagtcttgtggtctgtgagagatctttaagtggttcagggggcggtccaagtgctgcctctgctcagcaatatgtgagagcggaaatgcttccaagtggatacctggttcgcccatgtgaaggtgggggatcaattgtgcacatagtggaccatctggatcttgaggcatggagtgttcctgaggtgcttcggccactctatgaatcttcaagggtagtcgctcagaaaatgactactgcggcactccggcacatcagacaaattgctcaagaaacaagtggggaagtggtgtatgccttggggaggcaaccagcagtgctacggacttttagtcaaaggctgagcagaggctttaacgatgccattagtggtttcaatgatgatgggtggtctataatgggcggagacggtgttgaagatgtagttattgcttgcaactcaactaagaaaattaggagtaacagcaatgctggcatcgcctttggagcccccggaggtattatatgtgctaaggcatcaatgttactgcagagtgttcctccagcagtactggttcgatttctgagggagcatagatctgaatgggccgattacaatattgatgcatatttggcttcaactctgaaaacaagtgcatgttcacttactgggttgcgacccatgagattttctgggagccaaatcatcattccacttgctcacacagttgagaatgaggagattcttgaagttgttcgccttgagggtcaacctcttactcatgatgaagctcttctttcaagggatatccacctgcttcagctctgcactggaatagacgagaagtctgtgggatcctcctttcagcttgtgtttgcaccgattgatgatttcccagatgaaactccattgatttcttctggcttccgtgttataccacttgatatgaaaacagatggtgcatcctctggtaggacattagatttggcatctagtcttgaagtaggttcagcaacagctcaagcctccggagatgcatctgcagatgattgtaacttgcgatctgttctgacgatcgcttttcaattcccttacgagttgcatctccaagacagtgttgcagctatggctcgccaatatgtccgtagcattgtttctgctgtgcaaagagtgtcaatggctatctctccctctcaaactggtctaaatgccggacagaggataatctctggtttccctgaagcagcaacccttgctcgatgggtttgccagagctaccattaccatctaggggtagagttacttagtcaatcagatggagatgcagaacaattgttgaagatgctatggcattaccaagatgctattttgtgctgctcattcaaggaaaaaccggtgtttacatttgccaacaaagcaggactggacatgctagaaacttcccttgtcgccttacaggacctcacattggacaggatctttgatgagcctggaaaagaagcattgttctcaaacattcccaaattgatggagcagggccatgtctacctgccatcaggcgtgtgcatgtcaggaatgggtcggcatgtttctttcgatcaggccgtggcttggaaagtgcttgccgaggatagcaatgttcactgcctggccttctgtttcgtcaactggtcctttgtgtgaccatcccacatccactgcgaagtgaagattcatttttgcttgttcaagactgttttgcactagatctagacctgagaatctagtagtatttgcgaaatttctcgcttatgtaaatgtaatctcgctcccattccatcaagtacccaagtacaaggcagtggccaagtggttttagttgtagggggatcggagcaatcctgacggttgggtacttgggttccttccagcaatgtaaaatcggatcctgtagggcgtcgaaaactgcattggcaagattcttcgaaatgcagaccaaatttagctagtacatcgtaactttggc

SEQ ID NO: 26937 - DNA, 3270 bp, Oryza sativa
  ref <308>: DATABASE ACCESSION NUMBER: AK102379
  ref <309>: DATABASE ENTRY DATE: 2002-08-28
gtgcctctcttctcaccgtgccaaaaccctagagctctcctccctcctctgtactcaccttccggcggcgcaccaggcgggctcgagggcggagtgggagacgggcggcgactccgggcggccgcgggcggcggcgagggcggggactctcctggcggcccagtcggcaaggacgtagggggcagcgagcagaccaattttttctccttccactcctcttcaaatcaagttggttagctcaagatctgtgatgaacgaccaagcttccttttagatcttctgtttattctccttgcttaacctaaactatgactggtaaacaaacctagagaagatacaaaggaaataacggcataaacttttgttttgcaaaagattaacagtggcttaccatggctggaactcggcagacaacttcagttccgatggataatgcagcagttgttgatgcaaaacccttgcgcacattgactcccatgttccctgcggcacttggtctgcacactttcactgctaaagaaaactcatcttcgattgtctgtattaccccgtttggaccatatgctgggggcactgaacaggcaatgcctgctagtattccaccaatgtttgcatcaccggctgcccctgcagaccccaaccagaggcagccatatgctgttcacttgaatggagctgctcctgctaacggtacagcaaacaacacaggggtcatccctgatttgcaaatagctgtggcaggtacagtggaatctgctaagaggaagaggggcagacccaagcgcgtgcaagattcttctgttccttcagctcatttggttccttcagctccaggaggtaacatcactgctgtccagacgcctccttcagcaaccacagatgaatctggtaagaagaagaggggacggcccaagcgggtacaagatgtacctgtcctgtcaactccttcagctcctcaggtagatagtacagtttttcagacacctgcttctgctgtaaatgaatctgttacgaggaaaaggggacgacccaggcgtgtacaggatggtgcagatacttcagctcctccaattcaatcaaaatataatgagcctgttttgcagacaccttctgctgtcaccttaccagaagatggtaagaggaagagagggcggccaaagcgtgtgcctgatggtgcactgattcctttaagtcactcaggtgtttcgatagatgatgacagtggtgaaataataacagggaaacgtggacggcctaggaaaattgatgtcaatcttctgaatctgccatctttgttttcagatgatcctagggaatctgttgataatgtactcatgatgtttgatgcactgcggcggaggctcatgcagttggatgaggtgaagcaaggagcaaagcagcaacataacttaaaggccgggagtatcatgatgagtgctgaacttcgtgcaaataagaacaagaggattggagaggttccaggtgtcgaggttggtgatatgttctacttcagaatagagatgtgtctggttggactgaatagtcagagcatgtctgggattgattacatgtctgctaagtttggtaatgaggaggatcctgtggctatcagtatcgtgtcagctggtgtgtatgagaataccgaagatgacccagatgtgctggtttacactggacagggcatgtctggaaaggatgaccaaaagcttgaaagaggtaatcttgcacttgaaaggagtttgcatagaggtaatcaaatcagagttgttcgtagtgtaagagatttgacttgtcctactggtaagatatacatttatgatggcctttataaaataagagaagcatgggtggagaaaggaaaaactggctttaatgtgtttaaacacaagctgctcagagaacctggtcaacctgatggcatagcagtgtggaagaagactgaaaaatggagggagaatccttcctctcgagaccatgttatattgcgtgacatatcatatggtgcagaaagcaagcctgtttgccttgtgaatgaagtggatgatgagaaaggtcctagccacttcaactacacaactaaactgaactacaggaattctctcagctcaatgagaaagatgcaaggctgcaattgcgcaagtgtgtgccttcctggtgataacaactgctcttgcactcatcgaaatgccggtgatcttccatacagtgcttcaggcatacttgttagccggatgcctatgctgtatgagtgtaacgattcctgtacatgctcacataattgccggaaccgagttgtacagaaaggttctcagatccactttgaggtgtttaagacaggagatcgaggttggggacttcgtagttgggatccaattcgggcaggcacatttatttgtgaatatgcaggagaagttattgacagaaacagtatcattggagaagatgattacatctttgagacaccgtcttctgagcagaatttaagatggaactatgcaccagaattactgggtgaacccagtctttctgactcaagtgagacacctaagcaactgccaataattatcagtgcaaaacgaactggaaacatagctcgctttatgaaccacagctgctcaccaaatgttttttggcaaccagttttgtatgatcatggtgacgagggatatccacatatcgcattctttgcaatcaagcatattcctccgatgacagagcttacatatgattatggtcagagccagggtaatgttcaactgggaatcaattctggatgtcggaagtccaaaaactgcttatgttggtctcgcaagtgcagaggttcctttggctaaaatgcgaaccctgcaacaaaaacattaaagcataatctgccattgcaagaagtaggcgattgttgtagaactatgaagcagcagggtgcattcagtgtttcaagatgccatgtaataaggttggccttcgtctggatgagaatgcaaaagagggtatttattgcagaaagcattggcattgtaccaaactttattggaataactagtatttagcgtagcatctgaattccgagaaggttggaaccgtgttactatgttcttgtagtgtagttgtttctcctgtttaagagaactttaccaactgtagaatgccatgcatatggttgcatcgcaagattttcctgggcttcgcatgccagtcgtgcactcgccgtatgtttttctgtaatattaatggctacataatgcatcctgtaataatcatggtagtagctcc

SEQ ID NO: 26938 - DNA, 1210 bp, Oryza sativa
  ref <308>: DATABASE ACCESSION NUMBER: AK102380
  ref <309>: DATABASE ENTRY DATE: 2002-08-28
gggtattgtcacacatggcaggtacaaaccactgagctaaccacagtagctcacaggccattatcctgtcagtacttaagagagtgaagcacgcaacacacggttgctaatctccttagccctctcctccattggagctatagctagcaaactttttttttttactgagcaaattcagttagcgaagcgaaaaccatgaagaaggagatcattatcaggatttccgtgaaaaccgacaaatgccagaagaaggccatgaaagaggctgctactgtcagcggggtgcagtcggtgacgctggccggcggcgaccggaacctgctgctggtgatcggcgagggcgtggacacgaacaagctgaccaagaagctcaagaggaaggtgggctccggtgagatcgtcgagctgaggaccgtcgacacgttcgaggcggcggcggcgatgttcccgggcgggatgatcatgccgccgccggcgccggggagcaaggacgccgccgccgccagggcgatggcgacgacgcgggcgtcgccgtaccactaccagccgtcgccgtacggcccgtaccaccagcagcagcagtggcagccgccgtacgccatggcgcccagcccgtacgcgtacccgtaccagtaccacccgtcgccaatggcgatggccgccggcggcggcggctacggctacggcggcagcagctactcccgcgcggtggcgctcagccacccggccatctactcgccgctggtggagaagcacgactaccaccccatgaaccactccaccaccaccaagaagaagaccaccaccaccaccaccaccaccggcgccggcaccggccgcgccgccgccgcagccgccggcggcaagaccttcaaggcggtgtcccgctcccgccgccaccacgagagcgacagcaacgcctgctgcattctctagcaccaaattaatctcgatccataaaattacctatatatgtgcatgcatgtacatatgtgtgattttgcttgttgctttcttgccttgttcttttccatttttgaaggtcgttaaccttttgctgctttcttttgcggttaattaatttggcagcttttgctgcacaacctagtgaattaaccatgtataataataaaactgtatatcgtaaaaactgtacctgtaaaactctgttactgcttggatttcttcagagattatctgaagttcttgc

SEQ ID NO: 26939 - DNA, 2544 bp, Oryza sativa
  ref <308>: DATABASE ACCESSION NUMBER: AK102381
  ref <309>: DATABASE ENTRY DATE: 2002-08-28
gagcagctgctcgcggcggcgaagcgagacgaggcgaggcgaggcgaggcgaggcgccccaccatcgtgaggaggggggagccatcaactcgagctcgacgcgccggcggccggggtgcgaggctagggttagggttcccctcgatccggcattgcggaggccccccactcggcgcggcgggcgcggcgggggctcgagagagcgagagggagagacgcgcgtgatttggatggtggattgcggcgccggggctcagatctgagatggcggacggcggcggcggggaggaggggagcgcgtcggcgctcaggggctccgcgcgacggcgcggggcggtgcagccggcggggctggacgccgacgagctcctcacgctgatgcacgggtcggatcccgtcaaggtcgagctcaaccgcctggagaacgaagtgagggataaggatagggagctcggagatgcgcatgcggagattaaggcgctaaggctgtcagaaagagcgcgggagaaggccgtcgaggagctcacagcggaatatgagaagctggatgagaaactcaagctaacagagtctctccttgaaagcaaaaatctagaactcaagaaaacaaatgatgagaaaaaggcggctatggctgctcagtttgcagcagaagcaactctgcgaagagtgcatgcagcccaaaaagatgatgatatgccacctattgaagctattcttgctccacttgaagctgaactaaagcttgctcgtcaagagattgcaaaactccaggatgacaacagagctttagatcgtctaacaaaacaaaaggaggcagcgctgctggaagcagaaaggactgtagaaattgcattagcaaaagcggccatggttgatgacatgcaaaacaagaaccaagagttaatgaaacaaattgagatctgccaggaagaaaataagatcttggacaggctgcaccgccaaaaagttgctgaagtagaaaagcttagtcaaactgtaagagagctggaagaggctgttcttgctggtggtgcagctgctaatgctgtcagagattaccagcggaaagttcaagaaatgaatgaggaaagaaaaattcttgaccgtgagcttgcgcgggcaaaagttacagcaaacagagttgctgttgtagttgcaaatgagtggaaagatgctaatgacaaagtaatgcctgtcaaacagtggcttgaagagcgcaggtttctgcagggtgagatgcagcaacttcgtgataaacttgctattgcagaacgaacagctcgatctgaagctcaactaaaggaaaagtaccagctgcgcctaaaagttctagaagatggattgagggggccacctagtggttctagtcgtcctacagaaggaaagagtatcggtaatggaccatcccgtcggttgtctctaggtggagcagataatatgtcaaaaatctccccgaatggcatgttggcaaggagatctccatcatttaattcaagatcctctctttctactagcagcagcttggtcatcaagcatgcaaagggaacttcaaggtcatttgatggtggtaccaggtcattagaccgtggaaaagtccttgggaatggacctcatttgctcaatagatctacggatgctgttagagattgtgagacaactgatgattggaaggcggctaacacagaagaaaaaggtagcgaggccacaaatagtagttcaactgacacagtatctggtgtactctatgacatgctgcaaaaggaggtcatttcattgagaaaggcatgccatgagaaagatcaaagtctaaaagacaaggatgatgcaattgagatgttggcaaaaaaggtagatacattaaccaaggctatggaagtggaggctaaaaagatgaggcgagaggtagccgctatggagaaggaagttgctgctatgcgtcttgacaaggatcaagaaaacaaggctaagcggcctggaaatttcaaaggacctggaaccacttctcaggcgcctcatggaagaaatgcaccacggggtgggttgactcggaaccttcaataacatacctctaacaccagtcagcatgaatttcttcgatagtttcggatttccctttgtatttgttcctctgttcgtattaattttgtgattgagatagcacagatgaccctgcgacacctagattggggaaagagtaggcttgcatctgacatcggctttgctgtaatgtagtgaaggtaatccttcggtaaggtttaaccttgcggcacgctcccattttgtcaaggcagtgcacgttgtggttgtataggctggaggaccttgtcttcttcccttctgtaatttagatagtgtgtttgcttttgcttgtcagggttgtgaatatattattatcgcaatatattagggtcaccctctcccgctctatttgagcttggttgggctgtaattgatttctcgtgtttaactgatgtagcacaattaactcttgatattttgtttcaacctcgagctgaatcagaatggtggtttcttgcttgc

SEQ ID NO: 26940 - DNA, 1740 bp, Oryza sativa
  ref <308>: DATABASE ACCESSION NUMBER: AK102382
  ref <309>: DATABASE ENTRY DATE: 2002-08-28
gcgtcaaacgcaccccacgcctcctccccttcccccctctctccctccatggcttccctcgcctcccctcctctcccctgccgcgccgccgccaccgccagccgcagcgggcgtcctgctccgcgcctcctcggccctccgccgccgcccgcttcccctctcctctcctccgcttcggcgcgcttcccgcgtgccccctgcaacgccgcacgctggagccggcgcgacgccgtgcgggtttgctctcaagctggtgcagctggaccagccccattatcgaagacattgtcagacctcaaggattcctgctggagatttttacggccacatacaattcgaggaactgccttgggatccatgtagcattagttgctagagctttgatagagaacccccaactgataaattggtggttggtattcaaagcgttctatgggctcgtggcgttaatctgtggcaatggttacatcgttgggatcaatcagatctatgacattagaatcgataaggtaaacaagccatatttaccaattgctgccggtgatctctcagttcagacagcatggttattggtggtattatttgcagctgcgggattttcaattgttgtgacaaactttggacctttcattacctctctatattgccttggtctatttcttggcaccatatactctgttcctccattcagacttaagagatatcctgttgctgcttttcttatcattgcaacggtccgtggttttcttctcaactttggtgtgtactatgctactagagcagcactgggtcttacattccaatggagctcgcctgttgctttcattacatgcttcgtgactttatttgctttggtcattgctataaccaaagatctcccagatgttgaaggggatcggaagtatcaaatatcaactttggcgacaaagctcggtgtcagaaacattgcatttcttggctctggtttattgatagcaaattatgttgctgctattgctgtagcttttctcatgcctcaggctttcaggcgcactgtaatggtgcctgtgcatgctgcccttgccgttggtataattttccagacatgggttctggagcaagcaaaatatactaaggatgctatttcacagtactaccggttcatttggaatctcttctatgctgaatacatcttcttcccgttgatatagagaccaggcaatctgatatggtctgcatgttgagtgcggcaaaaactagaagcccatatgaacagtgggagtaagggaacgaacatgccatccatgggaagactctgataactctctctcgcccgggctgtaaagggtaagcactgttgtgcatatatatgaaaggaaggtgataaagcagggatgctaaattgctactgggatccttaaaggcttatagtggtcaccagtggaatgtgccttaataatttggttacctagcagagcaagtttttgcaggttattaggtaatatctttgagggaatgaacttagatttcattgttttaaggtctggtcacacaacgggtagtagttctggagcggcaaaagacgaccttgttttacactaccaagggaggttaactctagttttcatgtgaccacttaccttgagagttgagaccatggaatcacttgtcgactcctcggcttgtatatttctagtgtcagcatttgcattctcctccacacttgtacttgaagagttgaagacaacttttttgtttgtg

SEQ ID NO: 26941 - DNA, 4323 bp, Oryza sativa
  ref <308>: DATABASE ACCESSION NUMBER: AK102383
  ref <309>: DATABASE ENTRY DATE: 2002-08-28
ggctgccgttccccgttattcgccaacgcttccctccacccgccccctccccaagctgagctgtgctgccgctgctttcgccttcactaatcatcatcgcctcctcctcctccttctcctcttccccaccaccttcctccccacacacacacaacctcgcgcgcgcgcggcgagaacgagaagcatccagggcggcgcggaggcggaggcggaggcggaggtggagggggggggggggggaagccgggatggcggcggcggcgtggggcggcacgacgcagaagtgcgactcgtgcgggaggacggtctacaccgtcgaggagctcgccgccgacggccgcgtctaccaccgcccgtgcttccgctgcacccactgcaaggccaccctccagtttagtaactattcttctgtcgaaggtgtcctatattgcaaacctcactatgaccagatattgaaatcaaccggcagtttggagaaaagttttgaagggacatcaaaatcagctaaagcagaaaaatcgaatggaaacaaggggcaaccgaacagattctctagcatgtttgttggcacacaagacaagtgcgtagtttgtaacaagactgtgtaccctcttgaaaaggttaatcttaacgggagctcatatcataaatcatgcttccgttgcacccatggaggctgtactcttagcccatccaacaatgtcacacatgaaggcaaactttattgcaagacccatcactctcaattatttatggttaagggaaacttcagcaattttgaggatagtactccaaatgcaaaagtggatatcgagaagcaaccagaacatgaagatgctaccaagaatccaggaggcccaggtcaaggtgatgggctcactgagaaacctttagaaagtgaactcactcctgagaaaccgtcacaagacgatattgtggctgaaaagcaatcacaaagtagcgttgatgtcccaaaacaatcagaaagcagcacaacagttcagaggtcagaagaaggggaaagggttaccaagggtgagtcaaatagtcatgtagtcagcaagaagccattggaaagcagtgtagaaaagccattccagagcagtgcagttaacttacagccatcaggaagtagtgcagccgtaagaaaaccatggcagcgcaatcttcccacagataagccattgctgagtaacacaaccactgaaaagtcaactccaagcagtgctgccattgaggaatcattgccaagtaatggggttgatgcaaaacagccagaaagcagcactgccagcacagtggtaaaaaggccatggcaacggagggtagctacggagaatctaccgcagagcatttcgccatcagataagccatcatcaaccagtgcagatgatgtgaagccatcagaaaacagcaaattgatcagaaaaccatggcaacgtgctgtggctgctgaggcgcagatacagaacagtggaccaactgagaagtcatcattgacaaatgatacaaagccatcagaaagcaccacatcaattaaaaggccatgggagcacaaagtggtcaatgagaagccactgcagaacaatatagacacggagaagccactgcagaacaatacagacactgagaagtcatctagcagtgctatcgatgtgaagctggcagaaaccagtacaacacccactgtgccacaggaacacagtggaatcacggagaaaccttcacagaccagtgcagatgatgtaaagccatcagagagcactgcagcagtggttaaaaagcaatggcaacgtaacatcggattccagaaacagccccagagcagtgtaactgatgcaaagacacctgaaagcaggggaatgggcaaaagattgtggcagcgcaatgttccaactgaaaagcaatcgcaaagcggtgcgtcggttgtgacaccatcacaagttagtgtggctagcaccaacccgctccaaagcagcgtggttgtgaaaaagccatggcaaagaagcgtgtctagagaaaaagagccagagaaggatatatctagcaacaaaccgttacaaaaccgtgtacttgctgaagaagcagagaaaaccaatgtgactgctgataacaaatcacagatcattcaagataaaaagaacaatggtgctaccacagagaattcatcacaaataagtgaaagtgccaaaaaactaccacttactgcaaataaatcgcaagctgatacttccacagaaaaattgtcagaaagtgacatacttgctgtagcatcatctcagatcactgaaccatctaagaagccatcagaaaacactgctgaaaatgagaagccatcacagactgatattgctactgacgagctacccctgacccaaagtgtagaagccatgtcagaaccatctccaagtgatgcagctcatcaggaaatctccgagagggagatactgacagataaattaccagaaagtaccatggctgttgagaagctatctcaaactgctactctaaccgaaaagccatctaaagaagatgctgcagagaagctaccgcaaaccaatgaaccttctgagcagccacacgagagtgaagagactgctgagaagccacttcaaaatgaagctaatgctgaaagcacaacaaaacaaagtgatctcagtcttgagaagccacctcaggttgatgccaatgttgggaatcctaccgagcctgaaagtgatgccacttctggtgtgaactcatcagatgctcaaatcaggccaactgctgagcagttagtaggacctcaaggcattgtatctgccgagaagacatctgaccagatattagaagctaacaccgatccagctgctgaccagtcatcagagtcccaagatgttgcacctgctaaagttgcaatggagcaaccattagaaaatcaaaaggctgcagcttcagagcagccattggaacctcaacacgaagcatatgaagagaatccacaagagcataatagtgatgcaactgccaaggagtcatcagaacctgaaagagatactgcttctgatcagttggctgagcagccatcagaatctcgaactgcaggtgagaaggcaacactgcgtgaaagtgatgtggttaccgaggatccagcagaacctcaaattgatgcagctgctgaaaggtcagctgaggtgttatcagaatctcaaactggagttgagacaccagtgctgcatcaaagtgatagaactaacgaggttccatcagaacctcaaactgatgaagcttctgacaagtcaactgagcagccattggagcctgaaaatgatgcatctgtcgaggatgagaagccaccggaaatcgaaagtgatgatgtgcatgataaaccatcagaaagcaccccagatactgaaaccctgcctcataacactccaaagagtagcataagcattagcgaagctgcagacggcaacgtttctgaggaggcaccacctcagagcagtgcatccatagaaacgccatcagaaagtgccatagctgtcgaggaaccaaaacacgacgacgaggccagcataaagccatccgaagacagcagtgctcttgaggagccgccgcaggacgatagcgccagcgtggagccatcagagaacactataactcttgagaaggcatcagaggaagatgagggaagtgtaaagccatcagaaggcaatgatgctcttgagaaaacattggaggaggatgaggcgagtgccaagctaccagaagacagtacgacctttgagaagccatcggagaaagatgatgctggcaccaagcagacagaggaccctgtaactcttgagaaggaaccagaggaagacaagggaagtgtggagccaacacaggacaatgctggtcttgagaaaccgttggaggaagacgaggcgagtgcgaagccatcagaggacagtgtggttcttgataagccatcagtggaagatgatgacagcgccaagccatcagaggatagcatggaccttgaaaagccagaggctcacaaaccatcagaggaagaagatggcgcgaccaagtcatcaccggaggatgctgccgttgaggaggcgccattgcaaggtgacacagaaacagccactgacaaaccctcactagaagcagacaccacagaaactgcctgagctggttacagttagttagcaacagtacacagtttttaacccagatgggtggatactactgttgatactttggtttgccattttgcttgttttcttgttttgtacaatgcttgagttgtaaaatttgagggaaaacagaaaaggaactataggtattgatttg

SEQ ID NO: 26942 - DNA, 1623 bp, Oryza sativa
  ref <308>: DATABASE ACCESSION NUMBER: AK102384
  ref <309>: DATABASE ENTRY DATE: 2002-08-28
gatgtaactcagagttatgcgtcaggagcagggattaatcgcctacagtagttattaatcttgttgttttgttcttcagaaatcaggaggagaagccatgatgcagaaatatctgtggatacagatttttgtgttgctctcgagcttctccttctcggttgagacggattacgcctccatttttagcttcggagattccttctccgacaccggcaacatcgtcctcatctacggtccggcgagaaccgacctcgtgatgaccaaaccgccgtacggaatgacattctttgaccatcccagcggccgcctctccgatggaagattgatcatcgatttcatcgccgaagcgctggggctccctctgcttccgccgtcgttcgcggcgaaccggagcttcgagcatggcgccaacttcgcgacggccggcggcacggcgctggaccgcgcgttcttcgtggccaacaacttcacggtgatgtccccgttcaacatctcgctcggcgaccagctcgggtggctcgacggcatgaaaccgtcgctctgcggctgcaagccaggtgggtgcgagggttacttctccgagtccctgttcttcgtcggcgagctcggatggaacgactactccgccgtgctgctcgccggcaggggcgtcgacgaggcgaggtctctcacaccccgagtcgtcggaaccatccgcgcggccacacagaaactcatcgacggcggcgcgaggacggtgttcgtgtcgggaatcacgccgatggggtgctcgtcagcgaacctcgtgctgttcgcgggctcaagcgaagcggactacgagccggacaccggctgcctgaggagcctgaacctgctgtccatggagcacaaccggcagctacgccacgccctggcgcagctcggcggcgcgaggatcatctacggcgacttctacacccccctcgtcgagctcgccgcgacgccgcgccgcttcggtgagccgcgccatagctcagacctcagagctaattaagcttctggattttcatgtcaccggaacatatatatggcggcgcagggatcgacggggaggagggcgcgctgagagcttgctgcggcagcggcggtgggcggtacaacttcgagttcaacatgagcgcgcagtgcggcatggcgggggtgaccgtgtgcggcgacccgtcggtgtacgtgaactgggacggcgtgcacctcaccgaggcggcgtaccaccacgtcgccgatgggtggctaagggggccgtacgcgaacccgcccctactcagctcgtcgtgttcggcgcgagcgcggtagccgcggcgagttgaggccttctcccttcttcggcgtgggccttctcgtggtcgtctctttacatgttggtagtaggaataagttcactccaggtccctcaatttgtcgcccagtctgattttcatcctcagtgcagaaaaccggatacaacacatcccttaacttataaaactgtacagaagaggtccctcgacagtattgtggccggttttggatgatgttgcatatacgtggctccctttgactaggtcctcatcccacgtggcattgacgtggcgttttgatccgaaaagaaataaaggagtaaaattg

SEQ ID NO: 26943 - DNA, 3416 bp, Oryza sativa
  ref <308>: DATABASE ACCESSION NUMBER: AK102385
  ref <309>: DATABASE ENTRY DATE: 2002-08-28
ggtgtgtgtgtttgttgtttattttcagaaggagcctttattgctgttttttttctctcttccttgctccttattcacctgtaagaattgggagcggcagattgaaggcaaagcgcaagtgctttgctttttcttggagtgtttctcaggaatatgtgtgagttaagctttcagtgagggtgcacccaacattttaaggaattttttttataacttctaccattccacattcccagttttatccctgttcttcacaccagtctatgcaaatgagattcactaaaatgagctggggagctgctgcccgagggatccagacagccacagggtttgttacaagcgtcaatacatgggctgaattcttcaattgtctgagctcagccatttcatctgcatgctcttggatcaacattcatcagaaaccacagaacgattttgtaaaggaagaaatccagcatctgcaaagcgatttatggcagctacagacaactctgccaaaaatgcgcaaccttgttgagatacttgagtggcaaatctataaaaaaccagctgcagaactcctcccacatatcaaggatgcattgctagatgctgaagacatcattgatgaatttaattactatgagctcaaggcaaagatagaggggagaatagaggaatgcctaacatcgtctggatgccaggaattctatatgagtgtcattcgaggaagctttaacagagtgaaagaaatccaagagaagctagaccatctacatcgtcagtctatggacttgggcttgcattgtgcagcacaaagatttgacaaaattgttaggccagaaacaagttcttttcttaacagtcagatttttggacggcaagaagaagagaaaatggtgttggagttgttaggagtacaattacaagctaatgctggctacaaacgcaagcgaagcagtagagtggaggtcttgccaattgttggactgggaggtgtaggaaagactactttggcccaacaaatttgcaagaatcaaatggtgaaagctcactttgatatgatcctttgggcatgtgtatcagatgactttaacgcaaagaggttaactaaagaggtaatccaatcttccaagaaagaaacatcatttgacaatttggattctcttcagtctattttaaaagatactgttgagttaaaaaggtttttacttgtactagatgacatttgggatgatgtcatggcagatggtgggcaagattggcaaaggttttgtgcaccgttgtcaaatgctcttcaaggaagcatgattttgatcaccacccggtcacagaaagttgctgataaggtgcggacaatggattgttttccattagaaggtctaactgaagatgttttctgggaatttttcattgtacaagcatttggaactgagagtttatccaaatacccagatctggaggacattggtagaagcataattctgaaattgaagggttctccgttggctgccaaaactattgggcgtcttttgaggactaatttgcatgcttcacactgaaataacatattgcagagtgaactatggaagttggagcaggacaggacagatattctacctgccctgcgtttgagttatatgtatttaccaccccatctaaagaggtgtttctcattttgtgctgtgtaccccaaagactacaggtttgaaaaggataccctagtcgacatatggctggcagaaggtttcgttgaacatgcaagtagctttccaactgtaactgttgtgcagcaatattttgaagagcttctaagccgatccttctttcagaaagtgacgcacggcaaatatgtgatacatgacttgatgcatgatatggcacagctagtttcgcaagatgaatgcttcatcataaggaatgcaaatgaccttcgaacaatcccttccaatgttcgccatctatcaattttcacaaaaagatatattggatgccatgatttaatgggactatgcaggtataagaaactgcgcacccttttgtgcagtaaagcttttatcaaaggtgagtttgcttctgtacttggcagctggtttaaggagcttcaacacatccgtgtgttgagttgttctcttcccatgatagtagatatacctgagggcatcagcaacttaaagcttgtcggctacatttacttctcaagccaacgtactttcagcatccttccttcgtcattttgttgtctatataacctgaaactctagatgcttcaacatgtgttttcagaagcctgccttgtgactttggaaacctgatcagcctaaggaaatttagagcgaaaaatttcagttatctcccaggagaggattcacgcatgcagtttctaagaggagagagaatcaaagtgttgaaatatgtaaatcaggtacagggaagtttgcttgtcaatttgcctggtctcaaaagtaaaaagaatattggccttactgtgttgaaaaaggagaataatctctactctctccatatatctcaatttgcagaggatgctagatatgaacaggaacaattggaagtctgtgaaaacctacatcctcatccggatcttcaacatttggaggtcactggttaccaaggagagaatttttgtcctagctggttcctgcctgacaacttaccaaacatgatatcgcttatatttgaggagtgccataatgctaagaagatatcattgcatagattaccatgcacaggattccagtatttgattaacctgtacatcatcgaatgcacaaatttatcaagcatcgaacaatttctgcaaccatgtcatataccggctatcaaaatgataagcataaagggatgccaggagttatcgttgatatcagctgaaagatttggaggttttcgtttcttagaagctttggtgatccgtgattgtccaagaatcagttgggaaaatgggctggcattgccgcccactctcacaagcctttcgttggtgaggtgtggggatatttctaagtggatacctgactgtctactgaacctatcctcccttgtccgcctgcagttggttgggctttcagggacaatgtttattcctgggagtatctggaggaataatcttccattgctagattacttggagatctgtaatttccaagagcttcgttttactggtgtaccagaagcaattgaagaaataaacaatgtgcttattgacaagtgcccaatgctgaaagaactaaagcagcctttctccagaggtgatgttaccttcttgtgggggattccgactagtaaatggtacttgtcttaactgattcctttcatcgaattaccgtgtgttatactaaagattggggtttgctaactttaagtcatgtaaaaagttgctaatttttcatcacctaaaattacagatttctaacccc

SEQ ID NO: 26944 - DNA, 1906 bp, Oryza sativa
  ref <308>: DATABASE ACCESSION NUMBER: AK102386
  ref <309>: DATABASE ENTRY DATE: 2002-08-28
gcacctctcctcatcccctctcttctctgtatctatccactctctcccaaaggatcagccgagcagaggggagcggagcagtgccgccgccgctggcgacgaggcctgggtggatgaccgagaggaaggggcgcgggtgtcggcgaggccccacgcgagctcggcgagctcgacgggcgacatcacgtcaggctcccaaagctgacgtacagcaccgacccggtcggctgctcgtcaagccaagccatgcacgcggcgtcctcttcccacaggctcagcccagcggcgccgccgccgactaggttgttcgcgcggtcggcgccgagcgggccgatggtgtacacgcgcgggaactcgtccctgagcacgtcgaagacgtcggactcgaggtcgtcgaacgtacgtgttgaggatgagccccggcgccctggcgcagctgttcgcctcgctcctcgtccacgcgtagtgcgaagctggtcgggtcgagcgtgcgaacgaagctgcagacgtcgccgagacgcaccgtcggcacgccggcgatccagtctatcggcgtgtccaggtaactgttcgtaaggtagctctcgtctgccatggcaggggaagcaaaagcaaaggatttagtccatcgcatacaatatagcacgcgccaagtgtgcaagcacgtgtgacaacaaacacatccatggcgatatcgatcatacacgtgcgacggagtgatcgctcaccggacgaaacggacctttgagcgaatgagcggcgtgtaccctctctgccgtagctggcgaagccggagcgtgcacgcgaagccgcaggcgctggtgccccagagcacgaacgccggcacgccgagctcctccgcgacgtcgagcgcgaagctgacgaggccactgagcacgacgcatgtcacgggcagcacaccgctgctgccgtcgctcgccaccctcctcgcaacctccaccagcatcgcgcgcagctcctccgcaacgacaggtacagcctcaccgtgctgtccggcaccgcctcgaaccggaacccgtcccgcccacgcagcgccccgccgccgccgcagcccgctcgtggttgtgctccgtgttgacgaacgtgacgggcaccctgcgcgagtgcagcagctcggccagcttcaacgtcgggttgatgtgccctgagcacgggaacgggaacagtatcgcgtgcgctctcctcccctctcccatggccagcgccaacaacaacgacgaggacgaggacgaggacgaggaggagtcgcacatgggaacaggagtacgcggctgctgtggagcggcggcgcacgaagttggtgggatggagcggagcggcgacgggcggagtggagcgacggcgaggcggagcagcggcgggtggagtgaagtgacggcaagaaggagcggcggtgcatgaagtcgccgaactcgactccctctcggggacgctgctcgccgcaccgtccccgcccttcccggcgccctccaacctgctcgccgtcctccgcaccccgtctccgccatccaccgcgccgccctccaacctcgacggcgtgctcgccatgggcggcggctcgccgtgctatccccttgacatgggcagatgcacgcgccagctgctccccaaccgcccgcgcgccgcttctccgccgccggccgccgtcgtggcgctgccctcctcgcggcgtcagatgaggagagagagagagtaggaagggagagagattgacgtggcatcctaaatgtgggtcccacattgactcagccgccgacaaaaccggagccaaaaacatcaaaggaactatcgtgaccagttttaattagttgagggacgcaacatatctcgttttgtggttgggggatgattttgtaactcgatgacaagttgagggaccttcggc

SEQ ID NO: 26945 - DNA, 831 bp, Oryza sativa
  ref <308>: DATABASE ACCESSION NUMBER: AK102387
  ref <309>: DATABASE ENTRY DATE: 2002-08-28
gacactagcacagcgcaagaaaatggcgggtgccatgaccatgagtcgccgccgtctctcccacgcgctcctcctcgtgctcgcgatcctccccaacctggccgctctcgccgtcgccgccggcggcggcagcggaggcggtggcttcttcccgcaccggtccctcctccagtcctccagctgccagccgagcggcgccatcaccggaacgtccggcgactgcaacgcggacaacggctccgagtgctgccaggacggcgtccagtacatgacgtacgcctgctcgccgcccgtcgccgccggcggcaccggcaccgcggccctcctcacgctcaacagcttcgccgacggcggggacggcggcggcgcgccgtcctgcacggggaggttctacgacgacggccagctggtggtggcgctgtccacggggtggttcgacgggaggagccggtgcgagaaggacgtcgtcatccgggcgagcggcggcgcgtccgtgacggccatggtcgtcgacgagtgcgactcccagcgcggctgcgacagcgaccacaacttcgagccgccgtgccggaacaacatcgtcgacgggtcgccggcggtgtgggacgcgctggggctcaacaaggacgacggcgaggcccagatcacctggtccgatgcttgacgacgacgacgacacacgtagtgacgtagacgccatgtaacacggccgtataatttcccattaataagcttatatatattccctaacagtgatgtatcgtaatttttcttttgtaaaattaaacacctcttgatatatcaagtaataaagagggaatactaaattat

SEQ ID NO: 26946 - DNA, 1646 bp, Oryza sativa
  ref <308>: DATABASE ACCESSION NUMBER: AK102388
  ref <309>: DATABASE ENTRY DATE: 2002-08-28
gggttggttccatatgcctcctccgctatccccttcctctccgcggccggtgagctagctagccgcgtgccttctccctgtcggtcctgtagccgcgccgatcgctggacgtatccgatccggttacgcccgcgggatgccgattacgattatatatgagcccaaaacaaaccctacctctctggctctctctccatagttcatcgacaggtagaggagaagtcctgtggacggaatctgttcgcggcgccgcgtgtcgccaggtcgcgtcggcctacactgcgattaattcaacgctgaaaggcgagatgaattccaagaaaagcaagtgcacgtgtactctaactgatgatcttgtagtcgatatcctatctcggttgcctttgaagtcagtttgctgcttcaagtgtgtctgcaagtcctgggcatcactcttctcagatcaatacttttgcacgaagctgcccagaaggcctgcaggtcttttgtaccaagacagtaataacagttcgatccagattgcaaagttaccctcaggcaacagtgaaatcggcacatctcttagctttatgccacaccatgagaatctaaaacttgtagattgctccaatggtttaatcctttttacacatgggagtaaatctgattcacccgattcttctcacttcattgtgtgcaacccagcaacacaagagtggattgcacttcctgacacatgccctagagtaaatggatctgattatattgctatgttggccttcaatccatcatcgtcctgtcatttttttgtctttaacttccagaagaggagatccccacactcaggggtttttgtcatcactgaagttgagatattttcctctgaggatttcacttggattgccgatgatgcatttgaaactgaaattatgatgatttcaatgccacatgtcctacttcatggtgttctgtatctacggactgtagaacatagtgtttttgcaattgaaacaccacacatgtataaaccatggatacatcgttggacctttgagcttcctggggattcatgtcccatgaacaactatatatggggctgcctcggcgaatcgtccggcatcttacactatatgcagccaaactatgatggctgctggcttaatgtctggaggcttgaaagtcgtcatcaacagtggagcatgacgcactctcttagcatgatcgatgcctttggaaggggtacccttgttcatggtgatccctttagtgttgattggtctgcagattatggcatgctgtcttttgacctcgagagagagattgttttccttcatgaccgtgtatcaagcaaagtgctttcatacagcatacgtactggaaaactctgtgagatgggagatctccctagaaattctttgtattatgttccatactggcgcaagtttccagttgtagaggaagaccaatactggttatgacttgtgacagaaattatcctggcgcaagtttccagttgtagaggaagaccaatactggtgacttgtgaccgaaattatcctgtgaatgttttactatataagtgtatactatgtgctgtagtgctgctgtgttatgttatcgatacctgtcttggtatcttattcctatggcagtgccaagtgccaacc

SEQ ID NO: 26947 - DNA, 2497 bp, Oryza sativa
  ref <308>: DATABASE ACCESSION NUMBER: AK102389
  ref <309>: DATABASE ENTRY DATE: 2002-08-28
ggcatagcgagtcgaatcgaccgaaggggagggggagcgaagctttgcgttctctaatcgcctcgtcaaggtaactaatcaatcacctcgtcctaatcctcgaatctctcgtggtgcccgtctaatctcgcgattttgatgctcgtggtggaaagcgtaggaggatcccgtgcgagttagtctcaatctctcagggtttcgtgcgattttagggtgatccacctcttaatcgagttacggtttcgtgcgattttagggtaatcctcttaatctctcattgatttagggtttcgtgagaatcgaggtagggatctgtgttatttatatcgatctaatagatggattggttttgagattgttctgtcagatggggattgtttcgatatattaccctaatgatgtgtcagatggggattgtttcgatatattaccctaatgatgtgtcagatggggattgtttcgatatattaccctaatgatggataataagagtagttcacagttatgttttgatcctgccacatagtttgagttttgtgatcagatttagttttacttatttgtgcttagttcggatgggattgttctgatattgttccaatagatgaatagctcgttaggttaaaatctttaggttgagttaggcgacacatagtttatttcctctggatttggattggaattgtgttcttagtttttttcccctggatttggattggaattgtgtggagctgggttagagaattacatctgtatcgtgtacacctacttgaactgtagagcttgggttctaaggtcaatttaatctgtattgtatctggctctttgcctagttgaactgtagtgctgatgttgtactgtgtttttttacccgttttatttgctttactcgtgcaaatcaaatctgtcagatgctagaactaggtggctttattctgtgttcttacatagatctgttgtcctgtagttacttatgtcagttttgttattatctgaagatatttttggttgttgcttgttgatgtggtgtgagctgtgagcagcgctcttatgattaatgatgctgtccaattgtagtgtagtatgatgtgattgatatgttcatctattttgagctgacagtaccgatatcgtaggatctggtgccaacttattctccagctgcttttttttacctatgttaattccaatcctttcttgcctcttccagatgcagatattcgttaagaccctcactggcaagaccatcaccttggaggttgagttctccgatacgattgacaatgtgaaggctaagattcaggacaaggagggcatccctccggaccagcaacgccttatcttcgctggcaagcagcttgaggatgggcgtactctcgcggattataacatccagaaggagtccaccttgcaccttgtcctccgccttcgtggaggcatgcaaatattcgtgaagaccctcaccggcaagaccattaccctggaggtcgagtcctccgacacgatcgataatgtgaaggccaagatccaggacaaggagggaatcccaccagacagcagcgtctcatctttgctgggaagcagctcgaggatggccgcacccttgcagactacaacatccaaaaggaatccaccctgcaccttgtcctgcgcctccggggcggtatgcagatctttgtgaagacccttactggcaagacgatcaccttggaggttgagtcctctgacacgatcgacaatgtgaaggccaagatccaggacaaggagggtattccaccagaccagcagcggctcatcttcgctggcaagcagcttgaggacggccgcacccttgctgactataacatccagaaggagtccaccttgcacttggtcctccgccttcgtggaggtatgcagatcttcgtgaagaccctcaccggcaagaccatcaccctggaggttgagtcgtctgacacgatcgacaatgtgaaggccaagatccaggacaaggagggtattccaccagaccagcagcgcctcatcttcgctggcaagcagcttgaggatggtcgcacccttgcagattacaacatccagaaggagtccaccctgcaccttgtcctgcgccttcgtggaggtatgcagatcttcgtgaagaccctcactggcaagaccatcactctggaggttgagtcctctgacaccatcgacaacgtgaaggccaagatccaggataaggagggcatccctccagaccagcagcgcctcatcttcgccggcaagcagctcgaggatggccgcacccttgccgactataacatccagaaggagtccaccctgcaccttgtcctgcgcctccgtggtggtctctgagcgtgtgctgtggtgcagcattggacttcattatacctatgccgctcgtctgtcatatcatcgtgtcatggttgtgttgtgttctggtttagagtccctaagttgtgttgatactattatccatactagtacaatttgctcc

SEQ ID NO: 26948 - DNA, 2152 bp, Oryza sativa
  ref <308>: DATABASE ACCESSION NUMBER: AK102390
  ref <309>: DATABASE ENTRY DATE: 2002-08-28
gttctcccatcgcctctctcgctttccccttctctcctctcgctttcctctcctctcccatcccaaacccccccacctcgagctctagggtttcgcggatcgaggggcgccgcggctagggtttgggtggggggtgcctgcgcgatggccgctccggcggcggagtcggcggtggtgggggtgggggtggattcggcgacgagcgcggcggtgagggatggcttcgcggagctggagcggcagcagcagctgcttgcgacctgcacgcgcctgtaccagcagctcacggagcacttcggctcgctggagcgccgtctcgccgcgcgctccgagacgctccgcaccaagcgccgcttcctcgacgtgcgcacctcccgcaggctcgaggcgctccgccgccgggaggcctccatcgacggctccgtctcgctcgcgctctcccggctcgattccctcgccaagggcgacgcggggacgaccggctccgcctccgccgacgccgctggaatcgccgaggggctcaggtcgctctgcgccagcatggactcggccgggttcttcaccttcgtggtcgcgaggcgcaaggaggtggacgcgctccgcgccgagctccccgacgcgctcaagcgctgcgtcgatccggcgaggttcgccatggacgcggtctccgaggtgttccccatcgacaagcgggcggtgaggtcccccaccgacctggcgtgggcgtgcgtgctcatcctggaggcggtggtgccgtcgctggccgatccggacccggagatcggggcggcgcgccccatggtgccgcaggcggcgcgcgagagggcgcgcgggatggcgagggagtggaaggacgcggccgagaagaagggcggggtggagggcgccaagccaccggatgcgcacgcgttcctgcagcacgtcgcgacattcgcagtcgcagagaaggaggacaaggagctctacaggaggatcgtcgtgagcttctcgtggcggaggcagatgccgcgtctcgctatcacactcggcctcgaggatgagatggatgatatcattgaagagcttatcactaaggggcagcaacttgatgctgtgaactttgcatatgaggctggtcttcaggaaaaattccccccagcccctcttttaaaagcctaccttgaagattcaaagaagataccctcaaattcagataacctgagtactagcactggccaatctgggagcaatgccaataagaaggagcagtctgcactgcgggctgttataaagtgtgttgaggaccacaaactcgaagctgagtttccattggaggatctccgtgagcggctggaagaactggagaaggccaagaccgagaagaaaaaggcggcatcaagcagttccagcggtggtagctctggtccagccaacaagcgcatccgggcaagcaccggaggaccgatgccccctgccaaggcaggccgtctcaccgactacaccggtacaccgtcttcgcctgccaccaccacgaccaatgccacattcattcgctccccgtcccatgcctcctacggtacagcatctccttactcttatgataggccagctgcacaccccctctactgtggccagaacacactggcaatgagggagccctatgcataccaccacccatctgaggtatccagcgtcggcctcggcatgtcatacccatcccctcccataacctacccggcctatgctggatacagcaatggaatcggctacagcaatgcaatggccccagcctttcaccaccaggcttactaccggtaggatcagtcgaagccgatgaaatgacaatgagctgaatcgctgatggtggcagggcggctcgccaccatggccatgttttgtagtgactgactacaacggtaggtgggtgggggcgtgtgttccttaatactagaagatgcttgtgttggttagttctccccgttattagctgctctcgctacttcgcactgaagaaactgaatgtaaattatggacgtgttgtccctggaccctcgtcgtcatcttgtgttgtaattcagtctaaaccactctaaaacccacaaaaaaaaatccggcatgtaatcttcaagcactgaactatctcggcttaattaatgactatcttatgttagtt

SEQ ID NO: 26949 - DNA, 2778 bp, Oryza sativa
  ref <308>: DATABASE ACCESSION NUMBER: AK102391
  ref <309>: DATABASE ENTRY DATE: 2002-08-28
gagcgtcccctcccctccccctcccgtttcaccctcaccacaacagcggcagcaaaagcgagcggcagcgagaggccggccacgcacgcacgcacgtcgaagcgcgccgcccgccgccgatggggcccctcctccggtcgtcgccgccaccgcgccacctgcgcctcctcctccgccgcctcctctccaccgccgccggtcggccctcccgcctcctcccgctccccgcctcctcctccgcccgcctcctcgtcaggcccagggttgcggttgcggctgctgcggcgggtgctcctctgcggcggaatggggtcgcggtgagggctttcatggcatccacggcggcttccgaggcgatgcgggagaagcgggtggccggggagtacaccgctgcgaacgtccaggtcttagaagcattggatggagttcgcacaaggcctggtatgtacattggaagcacaggatcacgagggttgcatcatctggtttatgaaatattggataatgccgtggatgaagctcaagcaggctacgccactaaggttgatgttatccttcatggcgacaattcagttagtgtaacagacaatggtcgtgggatccctacagatatacaccctcagacgaagaaatcttgcgtggaaaccgtcttaacgttaatgcacgctggtggcaaatttggaggttcaaagagtggctacactgtttctggagggctgcatggtgttggcctatcagttgttaatgctttgtcagaggcactagaagttactgtttggcgtgatggaaaagaataccgacaaaattactcacgtggaaaagctatcacgatgctaactagtaggacattgtctgatgaatcaagttctcgtcaaggcacacggatcagattttggcctgataaacatatttttaccaccacaatggactttgacttcaatacgatagctggtcgcatccgggaacttgcctttctaaatcctgagctgacaatagcattgacaaaggaagaagatgacttacaggttcaacacaatgaatactgttatgctggtggtctggttgagtatgttaaatggttgaatactgacaagaaatcccttcatgatccaatcgcattcagaaaagaaatggatggaataacagtggatgtttcccttcaatggtgctctgattcatactctgatacggtgctaggatatgctaacagtatccgtactattgatggtggtactcatattgatgggctgaggacttcattgacaagaacaatcaataacttcgcaaagaagtcgaagactcttaaggataaagatattagcttgagtggggagcatgtaagagagggaatgacctgcattattgcagtgaaggtccctaatccagagtttgaagggcaaacaaagacgaggttgggaaatccagaagtccgaagaatagttgaacaatctgttcaagaaaatttaactgagtacttagagttacatccagatgttttagattcgattctgtcaaagtcccttaatgctctcaaggctgcattggcagctaagagagctagagagttagtgaggacaaaaagtgtattgaaatcttcttcacttcctgggaaattagctgactgtgcatctagtgatcctgaagaatctgaaatcttcatagttgaaggtgattcagctgggggtagtgcaaaacaaggacgtgataggaaatttcaggctattttgcctctaagaggcaaaattcttaacattgaaaggagagacgaggcagccttgtacaaaaacgaagagatccaaaatctaattgtcgctcttggattaggagtaaagggcgaggattttaacaaggaagctcttcgatatcataagatagtcatactcactgatgctgatgtagatggtgcacatatccggactcttctccttactttcttctttagatatcagaaagcactattcgatgaaggttgcatttatgttggtgtgcctcctctttacaaggttgaacgtgggaaacaagcgcactactgctatgatgatgctgaccttaaggagctagttaacaccttcccaacaaatgcttcttatcatatccaaaggtttaaaggtcttggtgagatgatgccggcacaattatgggagacaacaatggaccctgagaggaggatgttgaagcagctaaaggttgaagatgctgctgaggccaacgttgtgttctcatctcttatgggtacccgggttgatgtcaggaagcaactgatccagaatgctgcaagcatggtcaacctagaacaccttgatatttgagcacattcggcaatgctgacagtcgtgtatgttacaggagattatccactgtttcaatcccctcccacaggaaccaagcgtagcaaacttgaattccttgccaacattgttttggtgctaatttagcagtaaatgtaggctagggaagaaaccagaaatgatttcatggggtttaattccttgccaggggagctgtcaactcccctactacattacacaattactgcctaattaactggtatatctgggagacagttcggttgtggtcacgttgtaagttggaactcgttatgacattgggggtaatcttcccttgctaggggaagacgtaatcccctgacaggcggacacttacaaagagtaatcccctgctagtagtaagtattactagtaagtattcaggagtagttgttaatgtttctttcgcctgtaattttgtttagattttgtagcaagtttttggacagtc

SEQ ID NO: 26950 - DNA, 2377 bp, Oryza sativa
  ref <308>: DATABASE ACCESSION NUMBER: AK102392
  ref <309>: DATABASE ENTRY DATE: 2002-08-28
ggccccacacctctccactcctgtcctgtcatcttgtacactatcgcgttgctgatctcctcctcgactgcctcgtttcgcgcgaccggagacggccatggcgagcacgccgaacgggctggcgcggatcgagacgcacggggcgaagacgaagaagcacgagaacgggatatgccacgacgacagctcggcgccagtgcgggcgcagaccatcgacgagctccactcgctgcagcggaagcggtcggcgcccaccacgcccatcaaggacggcgcctcctcgcccttcgccgccgccctctccgaggaggagcgccagcgccagcagctccagtccatcagcgcgtcgttggcgtcgctgacgcgtgagaccgggccgaaggtcgtcaggggagatccggcgaggaagggcgaggccgcggcgaagggcgcgccgtcgccgcacccgcagccggtgcaccaccaccacccgcacgtcaccccgaccatcgccgtcagcgacagctccctcaagttcacccatgtgctctacaacctctcgcctgctgagctgtacgagcaggcgatcaagtacgagaaggggtcgttcatcacgtccaccggcgcgctggcgacgctgtccggcgccaagaccggccggtcgccgagggacaagcgcatcgtcaaggatgaggcctccgcgcaggagctttggtggggcaagggttcgcccaacatcgagatggacgagcacactttcctcaccaacagggagagggccgtcgactacctcaactcccttgacaaggtgtttgtgaacgaccagttcctgaactgggacacggagaaccggatcaaagtccgtatcatctcggccagggcgtaccactcgctcttcatgcacaacatgtgcatccggccgacggaggaggagctggaggagttcggcacgccggacttcaccatatacaacgccgggcagttcccctgcaaccggtacacgcactacatgacgtcgtcgacgagcgtagacatcaacctcgctaggagggagatggtgatcctcggcacgcagtacgccggggagatgaagaaggggctcttcggggtgatgcactacctcatgcccaggaggggcatcctctccctgcactccggctgcaacatgggcaagcagggcgacgtcgccctcttctttggactgtcaggtactggaaagactactctgtcaactgaccacaacaggctgctgatcggcgacgatgagcactgctggagtgacactggcgtgtccaacatcgagggtggttgctatgccaagtgcatagacttgtcacaggagaaagagcctgatatttggaatgccatcaagtttgggaccgtgttggagaatgtcgtctttgatgagcacacccgtgaagttgattacaccgacaaatctgtcaccgagaacacgcgcgctgcttaccctatcgagtacatccccaacgccaagataccgtgcgtcgggccacacccgaagaacgtcattctcctggcatgcgacgctttcggcgtcctccctcctgtcagcaagctaaaccttccacagaccatgtaccacttcatcagtggctacactgctctggttgccggcacggaggatggcatcaaggagccgcaggctacgttctctgcttgcttcggtgcagcgttcatcatgctccacccgaccaagtacgccgccatgctcgccgagaagatgcagaagtatggcgccaccgggtggctcgtcaacaccggttggtccggtggaaggtacggagttggcaagcggatcaggctgccgtataccaggaagatcatcgacgccatccactccggtgagctcctcaccgccaactacaagaagacggaggtgtttggcctggagatccccactgaaatcgacggcatcccgtctgaaatcctcgacccgatcaacacctggacggacaagggcgcgtacaaggagacgctcctgaagctggctggcctgttcaagaagaacttcgaggtgttcgccaactacaagatcgggggagacagcagcctgacagacaagatcctcgctgctggaccaaacttttgagttactgaagaataaaaaatatgcagataaagaacgcgatgaagctagtcagttggttacaataaagaagtgggtctatgcgtgtttgccaatgatgatgacgaaaatgttggatcgatgtgcagctaccggtagagtttagctagcttcctataagtttcatgcgtgtctgttaggttctgtcagtttgtctagcttgacggtgtgtatgcagtatgctccattcccccttcccctgtacacatctctattttctgaattggaatttgaaagcatcttgatttgatc

SEQ ID NO: 26951 - DNA, 2571 bp, Oryza sativa
  ref <308>: DATABASE ACCESSION NUMBER: AK102393
  ref <309>: DATABASE ENTRY DATE: 2002-08-28
gacacgcattcctcttcttccctcctcttctctccccgcctcctcgcggtgtctgcctctctctctcgcgcgcgcagcctaccgccacaagcaaagtccaggagggctcgggcacggaagcttctggaagcttccgcgttggcgtgaggaaggaggcggaggggaggggagggggactgacctactccctcaccgcggtcgttccaagtcccgcgccgccggggattcccatcccctctcgcggcgcgccgcttcgacgggaggcatcgtcgtatcgcatcgatctggtttggggggttttgggagtctgaagtggtgggtttgagatggaggacttgctggacacggagatcgggaagcatgactacgactggtaattgactggtttctccttacttatttggttttctgaattttgcgtcgatttcatgtttgctgcaattggtgaacccgttgtgctaagttgggtaagccgtttctctaatttggagtagctggtggcaatgccgcgtttgaaatttattttgggggcgttttattggttaaacttggacgacgttatacttatcgtgcttgtggttaggtgaatgaatggtgcttgtttatccgaggaatcagtggtgtcatcccagggaaatcatgatttggtgtatttaggttgagttctgctgactgcgattgtttccggttttaagattggccatgtacggatgctacttggtttagttagggaattagtttcgttgacagcaaagacaagtaggtgactgtattgtttggtctgtgggctccttcctagcttgaagagcaaagcgttggatctcaagtaatgtcttctctatattggaaagggaaaaaaattcggcaggcaaatagcattgctaactttaggatgttttatactggctcgtattataggataatttcaatagttcaaatgaattctataactcttttgtgaaatttctgaaactgaattacaccagcacccagccacccactgggaattacaatgaccagacattttaattgcaagtttagttgaaataactactgctacactttagttgactttcatcacattccactattgtggtgataaggccgatttggatgtcacgtctatgggcttgccaccaaacgggagtgcttcgtgtcaccaaaggatatgcctttccattatttatgtgtcatctgttctatgaccaagttatctaatttttattggtctgatcttctatgacttgcataacattggaatatttcttcaggcttctgactcccccaggatcacctcatgctcctatactggaggttgtggagaaagctccatcctcagatgtccctaaacgcattactactagatcatcctcaaccactagagcatcaagggttggtgctattttcttcaaatttttttttacatgcaagtgtttcgagattctttttattcaagcagtcaggatatttgttccaagagcatagtagatgtttttttccttgtattgtattcaatgcctcattggcatttgaattcagccatccgggtcggttttcttgcataagaggataatgaagtaatataactctgaactggaaagtggaaatgatttttgatgtttgaaaaccctaccatgcattgcccaccaaaataaactagttgaaagaaaattatgttcgccagagtgattttccaaattttagaatgcacctagtcacattataattgcaataactgtttcagtgcacatcgcctgcattggtaggttgttaggtgctgcaactagcgctaagaacaatacttgtttgaattctgtttaggcaacaatagtagaaaggcatggtaatcctttaacttgcctttttattgacaactgaatgccaatcttacgtttcatgcaaaaggagttataagaaaaaggcttgatgaaccaggtgatctgtcaataccatcataggatgttgaaaacagatagtcaccaatgctaccgtgatttgctgtattattgggttgtaatcatgtaaatttggagtatttcacgttattacatgtttgctcatattcatatagtgcaaagtgtacaatctgcagtagtcagtaatacattttcgtctacaatgaattgtaatttgtttttgggaagcaatcaagttccatctagttagcaatataatattgtaataatattgcaccacttatcatataaccattgatacatgctttagctgtatgacctgtttcttcaaatctactatttgctcagccaggcatgtgttgatgctcataattaacagaaatgtgctgcatgtttattgcagctttccattcctgaaacagagaatgggcattccacagtaccaactaggccagcacggagtaactctgtctctcgcccttcaatccaatctactcttatttccagcaacaacaggtcatcagttgtcaatgcaagcatttcctctgtctgttcgccacctacaactccaagcaagaggactagcactctttcttcatcaaagccatcagttccagcttcacttcaagtaccaacacggccctctactccaact

SEQ ID NO: 26952 - DNA, 2992 bp, Oryza sativa
  ref <308>: DATABASE ACCESSION NUMBER: AK102394
  ref <309>: DATABASE ENTRY DATE: 2002-08-28
gatctctactgcagctactagggcaatccagtctctctattagcttgtatccctattcttattctaccttgttctagtcaaacacttccaagttgtattgagaagtaccgttgtttgattctagtgaagaaggttgctaacaatctggtatcagagctactcggttcgtgggatttctcatcatggaggtcttaggaaggcagcggtgcaaggtggaggaagaattgggcaaggggggtgttcaagaatctagcacacacaacctgttcgacagaatgccaagccaacataaggtgttcaaggatgatgaaaggatagcagagcccgttcccatcaagtccaccatgaacaaggagggaatatccatggacgaagctttagatcggattcttgagaggtttgagttgatggaggccaaccgtagacaagaggagaagttcaatcaaatactatagaagttggaggaggtagaggctcgtaggagcaaggctgccgaggagacaattgcagccatcagggcaaccaccgctgtcctcaaggctaaatcacctacagcacccatggcaccacctactccagcgcctaccaagtgtttgactgaatgccccaacaacaacctcacttgggcgacggcgagttcaagtcacattactgaggatactgctccaacagctgcctgggagctaggaaacaacaagcacaagggccacgcctcatgcgtcgtcaccaaggactcacccgaggtcacacccaccatgtgttcaacgaaatgctccggtcctaccgtcgagcctgatctcactgtggctgcagtggttacgtccgccaccactgtcgtggcctctatggagttggtagctgctgggaacgcaatcggtgccacttacatcaacaatcttgaccaccccaaggtgacgcatgctaagtgttcgatgtctggctccggcgtcaaacggggcactgaacaagttgtgcttgcattcccactcatggctagccctgtggagttcacgacatcattggtggaaccatctccacccacggggctgaagcttggtgctgccatctgcgtgggagatcaggtgcctatgaagtgttcgatgaaatgtactgagagtgacaacaagccactgatggaacaccccaagagaaacccatggccacctgcttggttaggatggaagaagtggtatgtgtcctggactgtagtcaattattctgatatgagattttatttcattccaccgtggccaccgccacttaaagtaggttggcttgcattggtattttctaaatttggagcagctcatactgacatgatggatataatgttgcattggactgatatgaaaccatggcctccaccaaatcaaaatttgagaagtatcatggtgcatctatttgcttggaagcattggaaagttagtgtagaagtgagtctctttgcttggaacactaaacaatacatgaatagtgtgctacttattacagttggcaccaaatggttgattcactctgcagtcaaggactgttttctccaaggcaagccattcaaacttgtggacccattggaactcatgcaagtaatttttgtgctattagtgcgggatccagatgttgagatgtttcagattggcagctactctctacaaccagaaaattatcaattaactaactacttggtggcaagactattgaagcaaggtaatctgaaaaaggtactcgatggtgtggatcatagcaaaaacattaagaagagtgatgttgatgttggcgaggacaatcctggtaatattagtactgcagcaaaaatgttcattgatggtcttggtatcaaggaagattcagacatgctatgtccatcagcccagtacattgataattggtctactaagctgctggatgagataagaaacgggtgcaatatatatctgttagtagcactaatagatgatgagcttaatccatggtgtttcctcatagataagatatggtatgatattttggtgcttctattttttactggggctacatggaaggttgaaagctatgcacttccaattaaagatgttatccatatggttgtttattttgtgcaacctttgcaaggtattctgctccaaacaaggcaaggaaaaatagagaatcctgtcattttggacataacttcagcaactcaaactgtcaagtttttgctctgttacaagtcaactattaagatctacccaagttgttcttccatggtacaaatttctgccagtaaattcagagcttgtgggaaggagaacatatgctacatgcttctattgcttgtattgaatattggtgactgcacttttctgaggtccacttcctatatgctacatgcttctattgcttgtgctgaatattggtgcctgcacttctctgaggttgtccaacatgcaatttgtattggatggattatcaattgggctattcttttttggatggagcaagctgtatgttcaccaaggattattttgcaaatgccatgggatccaggtggtggtaaacttttcatagcttcaggctgccggcttggggacaagccggattcaaaggaaggggtattgttaggaattgggccggctgcactacgacccaacacagtgagtagcccaatccttggcccaagcaagcccaacagagagctagaaaggaagggatgctgcactctcaggaaaaggaatagaacagagatcaaacatgcatcggcggcttcggccacgacggcggcggcggcgacttggttcaggctgaaccttgtcgatcttcctctcttcctctactacctctcttgctactatctctactgcagctactagggcaatccagtctctctattagcttgtatccctattattattctaccttgctctagtcaaacacttccaagttgtattgagaactaccgttgtttgattctagtgaagaaggttgctaacaatgttctatctctttttttcttccc

SEQ ID NO: 26953 - DNA, 1650 bp, Oryza sativa
  ref <308>: DATABASE ACCESSION NUMBER: AK102395
  ref <309>: DATABASE ENTRY DATE: 2002-08-28
gactcctcctcctcctcccgccgcgtccccaccgcaggcgactcccccaccctctgaccccacctcccgcctccccgccgccccgcgaccgccgcggatcgatcgaggggattcttgccacctgggatctctcctcccctcccctcccccgattcttggtctcgcgcgtctgtctgcccccccgtggtggattcttgtctggctcccggcaaaaggaacggcgtctcgccgcgggccgcggattcgaccaggcatctcagtgtccacggctgtaatttataaccaagcctaagaaacttacattattctagcattcattggatatggtatcggtgaatcttgggctagtacattatgtactggaccacatatatggtaccgtccttcatcgcaccaaattaggaacgccatttttctcgaaaggatggggaggcaccaaacttgatttgttagagaagatggtgaaacagttattccctgaagcacgttgccagaactggccaccaactgccgtgcaacccatgtggaaaacggtttgggagacaaagagttcttgtctgcgagagggtgttttcaggactacatgcgatccacggctaattgaagcattgcctcctgagagtcacaatgcaagagttgcttttcttacacctaagtcagtttcacctgagaagatggcctgtgtgattcatctggcaggcactggtgatcactcgtttgagagaagacttcgacttggtggacctcttttgaaggacaacattgcaactatggttcttgagagcccttattatggacaacggcgaccaagcatgcagcatgggtcgaagcttcagtgtgtgagtgacttgctactattaggaaaagctactattgatgaagctcgcagccttctgtactggttgcagaatgaggctggttatggcaagatgggcatatgcgggctcagcatgggtggtgtacatgctgcaatggttggatccttgcacccaacaccaattgctacgctgccatttcttgctccgcattctgctgtggtgcctttctgtgacgggctctacaggcatgccacagcttgggatgcattgaggaaagatgcagcaacattggcccaagacgtaacttctttgacagaagacatggcccagaaatcaggaatcactattgagcaagtaagagagaggttgcgatcagtgctgtctttgactgacgtcactcgatttccagtgccaaagaacccacaggctgtcatttttgttggtgcaacggatgacggctacatccccaaacattcgataatggagctccaaaaggcatggccaggttcagaggtccggtgggtaaccggagggcacgtatcgtcgtttttcctccacaacgacgcgtttcgcaaggccattgttgatgctcttgatagactataacagcagaggaaactcatctttgtgatggcatttcttggtgtgcttgttgtgaaactcataggcatgccacatgacaagatcacatttttatgagtgggggagcctagaaataccacattctgtctgtaactcaatatatgtgttttcccaaagattgggaagatgcatgagtgtaacattgacattcgttacctgttaactaagtcccccattgttaatctgtccc

SEQ ID NO: 26954 - DNA, 971 bp, Oryza sativa
  ref <308>: DATABASE ACCESSION NUMBER: AK102396
  ref <309>: DATABASE ENTRY DATE: 2002-08-28
gaatgtcgcctcccctcgagccgcacgactacatcggcctctccgctgcggcggcgtccccgacgccgagctcgtcgtcctgctcgtcctcgccgaacccaggcggcgaggcccgcggcccacgcctcacgctccgcctcggcctcccggggtcggagtcccccgagcgggaggtcgtcgccgcggggctcaccctcgggcctctgcccccgaccaccaccaaggcggcctccaagcgcgccttccccgactcctccccgcggcacggcgccagctccggctccgtcgccgccgccgcagcttgccaggacaaggcggcccccgccgccgctccgccggctgcaaaggcgcaggtggtgggatggccgcccgtgcggaactaccgaaagaacacgctggcggcgagcgcctccaagggcaaaggggaggacaagggcacggctgaagggggccctctctatgtcaaggtgagcatggatggagccccctacctcaggaaggtcgacctcaagatgtattctaactatgaggacctctccatggctctcgagaagatgttcagctgcttcatcactggtcaaagcggtttgcgtaaatcatcaaacagagataggcttactaatggttcaaaggctgatgccctccaagaccaagagtatgtccttacatatgaagataaggatgctgactggatgcttgttggtgatcttccttgggatttgtttaccactatctgccggaaattgaaaatcatgagaggatctgatgctgctggaatagctccaagatcaatagagcagtcagggcagagcagataagattaaccttcgtccggacgagaaaggcaactgatctagcagctttggaattgttcatcgcaagtatcccaaatatctcaatgtctgtgtagtttaatgtgttcatcagacctgtgcattgtatgtctgtaatttgttcctttcagatcgtgc

SEQ ID NO: 26955 - DNA, 857 bp, Oryza sativa
  ref <308>: DATABASE ACCESSION NUMBER: AK102397
  ref <309>: DATABASE ENTRY DATE: 2002-08-28
ggccggaggaaggaggagacgccgccgccgccgccgcagccatgtcggggggaatcgcgcgcggccgcctcgcggaggagcggaaggcgtggcggaagaaccacccacacggtttcgtcgccaagccggagacgttggccgacgggacggtcaacctcatgatctggcactgcacaatccccggcaagcaagggactgattgggaaggtggatactttcctctcactcttcatttcagtgaggattaccctagcaaacctcccaagtgcaagttcccacagggtttcttccacccaaatgtctatccttcagggacagtctgcctttcaattcttaatgaagacagcggttggagacctgctattaccgtcaagcaaattcttgttggaatccaggacttgcttgatcagcctaatcctgctgatcctgctcagaccgatggttaccatctttttatccaggatcctacggaatacaagaggcgtgttcggctgcaggccaagcagtatcctccgattgtctgagaatattggcatagggacccatgctgcacattcgcttagttcttgctagatctaaaatgagtgcctctgcaaatatggattagaccaaaatatgacctggaaaaagggtgctttcggagtttgagaagtattatcatcgttgtggactaatgtcttgtgagatccgtcttggatgtaaacggttttcttaactgtgatttttcaaccgtttgagtgcttgctttatgggataatgtcaaacattggtttggcaggcaatctcaagagtattgctatttctgtgctagtctatatgaaaacccagattaaattcgacgaaacatattagtttgc

SEQ ID NO: 26956 - DNA, 1197 bp, Oryza sativa
  ref <308>: DATABASE ACCESSION NUMBER: AK102398
  ref <309>: DATABASE ENTRY DATE: 2002-08-28
ggctctgccacaggagagagctcactctcactctcacactctcttggggtgttgtgttgcaaaaagaaaaggagagaagaaattgagaattttttttcttggatagtgtttaatgtgttgttgtgaatgatgatggcataggggttgttttgggatgaggggtggtaatagctggatctctctttcttgggtttggagctgcacttcagggaggaaagatccaaccccagatgtcatcctgcctcctcctcactcctcttcttctcctgtgaaggtagtttgccgggattagattttcatgtaggttgatatcccgttgctttggtcaccattggctttgaagccataaaagtgttcagaatcaaaggggtgctgttctcttgtcttgattggatctgatggagatgatgtcgccaacgaatccgatgcgcaagtactcgtggtggtgggatagtcatataagcccaaagaactcgaaatggcttcaagaaaatctcacagatatggatagcaaaatcaagcgtatgatcaagataatcgatgaggatgctgactcgtttgcaagaagagcagaaatgtactacagaaggcgtccagagttgatgtctttgctggaggagttataccgtgcttaccgagctttagctgaaagacatggtcatgctgctggggagctccgaagcgcccagcggaaaatggcggaagcatttcctgatgagtttcagttagacttggatgatgatttgccagctgaaaccttgtctacagaaactgaggctgatagtcgtgacatgacaccatttttcctctctttcataaattctggtgattcaaaaaagcgtgccaaagatgaccaggaacatgagaagctgcagaaagaaatatcgagcttgtcgcaggaaaaccaagaactcaagaagaagatctcttcagtgttagaaaatagcgacagggccgaatctgaagttgcttccctcaaggaggcccttgcacaacaagaagccgagaaggaagctgccttttcacaatgccaacaatccagtgatcgattacaggccctcaagtctgaaatactgcaaacccaggaggagttcaagagattgaaggaggagatgcaaaatggactggagaatttgagcaccgcagaggaacgctgccttcttcttgaaagagctaaccagaatttgtattcggagc

SEQ ID NO: 26957 - DNA, 1652 bp, Oryza sativa
  ref <308>: DATABASE ACCESSION NUMBER: AK102399
  ref <309>: DATABASE ENTRY DATE: 2002-08-28
gaccggcagagaaccgaaccacgcaagctagctggtcgatcgatccatccatcgacaggcggaaaaggaggcaatcgattccctaatctcgctaccgccatccgccaagcgaagcgaagcgaagcattgactcctactcctactacgagcggcttaaagtgaccagtaaccaccaccaccacgccgcggccgccgtcgccatccgcgcgcgcccccacctgcctccgctcccactcgcgcacgcggccaccacccccaccgatacgcttctcctgcctgcctgcctgctgctgctgccgcgcgccggcagggagaggagaggaggaggagcatcgcttccttgcttcctcctcacgtgccttgcccccgccgctaagtagccggcttcctaccgaacaagaactgcagcgagcgactcgggaggaggaaggcgaggggatatgcagcagcagcaggcgtgggcggcggggcttggcggcctcgcggtcgccggggtcggggaggagggcggcgggggaggtcccgctcccaccaccgtcgacgaggcgtccatggagcggagcaagagcttcgtcaaggcgctccaggagctcaagaacctgcggccgcagctctactcggcgtcggagtactgcgagaagtcgtacctccacagcgagcagaagcagatggttctagacaacttgaaggattatgctgtgagggctttggtgaatgcggttgaccaccttggcacagttgcctacaaactgacagacctgtatgaacaacaggcttcagaagtttccactcttgagctgaaagtagcatgcttgaaccagcaagtcctcacctgccaaacttacacggataaagaaggcattaggcagcagcagatgaccggaaccgccacaagacatcacaaacattacattgtaccgactttggcgaacaaaagaatgcaggctttctctgagatgcaaactgatgctgatattgactcaaggcctagaccttatccctcagcaaaaacccttttctggcatttggcttcagagaaaaactccaaaaccaatggagcacgccaatctgaatttgtcctagaagaaacaaaggctacaaaacctgcatcgagaggtaaggaaccatcaacatctccattgcccaagcatctgcagacaaacttggccagctctgattttgctatgcataatgttggcatgaaggatcaacctggtgtcaggcatctatcgtcatttagttcttttgacaacccaagagggcgtcaaatccaaaaggctcccctccgtaccaaaagtatgctagctgctttctttgtcaagcacaagtcgggaaagatgaaaaacgtttctgttcgttgatcaatttcaagcctccagtttgtccagccctgtcacaacgaagtacaaccacggaattcagattacatctacaatatgtctgtgtcttgtatattagtgctctagagatgaatcttttggataaagtttttatatcttaatgttaatgtcatctttctgatgacttaaatgtttaatatatgggtatagaataacagttttcagtataagtggatgtaaaaggagtatgtcaaccatcattttcattcatgtagattgtatgatgtgtttgtacagaagaaaaaaaaagcc

SEQ ID NO: 26958 - DNA, 2276 bp, Oryza sativa
  ref <308>: DATABASE ACCESSION NUMBER: AK102400
  ref <309>: DATABASE ENTRY DATE: 2002-08-28
ggggcggagagacgggagagagaggagaggagtcgaactagggttagtgaggtgaaggggggcgattttgctcatcgccctccgcctagatcgaatccgaatcccgcctcctcctcctcctcctcctccccccgcgccgatcttgccccgctccctcgccgcagctgcgggcttgccctagcccgccgcatcgccgacgtactacgcccgctcggctccaggctccagatccggcctccagggcgtgcccgctgctggacggcgctctcccgcgtccgtggctacctcctcctccgggtttgcgttgccgtcgccgaagcgatccgttggtggattgtgtgtagctctgtaacaaaggatcttggtccataggagtgaaccagaaggtacaaaacttcttggctattatgacatcggtgggtctagtagattcttcatcaggtttcccggaaacgagtactagtggagccactgatcgtctgacagatgatatcagcgagatgagcataagagataaggaagttgaagctgtagtggtcagtggcaatagtatggacataggtcacactattgtgacaactgttggtggaagaaatgggcagccaaagcagacaattagttacatcgcagagcgtgctgttgggcgtggttcatttggagttgtcttccaggtgggccattggtatatgccattctgtcattacctttctgtttagagattactaattaaattatctttgacaggctaagtgtctagaaactggtgagagagttgctgtaaagaaagttcttcaagatgcgagatacaagaaccgggagctgcaaacgatgcaagttctcgatcacccaaatgttgcatgcttgaagcattacttttgctcgactactgcgaaggaggagctatacctcaacttggttcttgaatatgtgccagaaactgttcatcgtgttattagacattacaataagatgagccaacgcatgccattgatttatgttaaactttatatgtaccagatttgtagggctttggcatacattcataactgtgtgggagtatgccacagagatataaagccacagaatatattggtgaatccacataatcatcagttgaaattgtgtgactttggcagtgcaaaagtcctggtgaaaggggaaccaaatatttcatatatctgttctagatactacagagccccagaactcatatttggggctacagagtacacgacagctattgatgtgtggtctgctggctgtgttcttgctgaactacttctagggcagcctgtttttcctggtgacagtggcgtcgaccaacttgttgaaattatcaaggtactgggtactccaacaagggaagaaatcaaacatatgaatccgaactacactgagtttaagttcccccaaatcaaagctcacccatggcacaagatctttcataaaagaatgccatctgaagctgtagatcttgtgtctcggcttctgcagtactcaccacacctccggtgcagtgcattggaggtgttaattcatccattcttcgatgaactacgagatccaaatgctcgcttaccaaatggccgtactcttcccccactattcaatttcaagcctcgtgagctgaaaggagcatcaatggaatttcttgtgaagttggttccacagcatgctaagaagcaatgtgccttcttaggattatgagcagacagttcatacactaatcgggtattacgttggtctacttggttccgtagaacagcatggcctgcagtattattgaatgggccctaattttgttctacgtgcaccctgcttgggcatgccttctaccatcatattctgtaaagcagatgaagacatggagtgagtggttattgattggggcttgtatattggtctgcccttgacttgagaactttattcactctgctgtatcaagcaagaaagaacacgtatgtatgcttgagccatatttcattccagagcctctatcaggtttcaccgaccatcagatttaagtcttccagtttgtagggctaagccaaaaaagttctatgtgtgaagagttggagacatctgtttggttacaagctatttgattgtatttgatcattcttttgtattaacactctgataaacttacatgagttaattctattgttatgtgatatagttgtgtgccacttttaaacacctaaacaactctgttcaatgttgaaatgtttggcatgtatcaacatatcacctcattatttcgaggttgattttgt
